United States Patent Application Publication US 2007/0054278 A1 - sequence listing, part 91

SEQ ID NO: 97005 - DNA, 12279 bp, Homo sapiens
accaaggggatgtgtgccatgaggtctaaccactgacctactcactgaaatccgagaatgagaatgggccagcccaggggcttctacacatatgggtcatctctcaactcccttcttttttttttttttttttttttttttgagatggagtcttactctgtcacccaggctggagtgcaatggcgccatttcagctcactgcaacctccgcctcccaggttcaagcaattctctgcctcagcctcccgagtagctgggattacaggcgcccgccaccacgcccagctaatttttgtatttttaatagagacggggtttcaccatcttggccaggctgatcttgaactcctgacctcgtgatccacctgcctcagcctcccaaagtgctgggattacaggcgtgagccactgcccccggccccaactcccttctttagcttccccgtaaacactgctgaccccaaagctgcatcagcttttggcctcttcccctttcacccacacactgtcctggataacctccccagtctccacctctggcttaaacatagatccatgggctgatggagacatctgcctcccgagaccctgatctgtgtccctccccaggacactgggctcagaagcttcccctaaacctgttcctcctcccggtgcccccatctcacgatggccccaccatcccgcagtcacgggcagacccctaggagccatcctcctcctgacctcctcctcgcccacctcccccaccatcagtgcccacccctgccgcctgacgcttgtgccctgctcccctctgcctgccccagctcaggcctcctcctctgccctggaccctcccccagcctcctctcaagctgcccaggctctagtctccccagcctggtaccagaaacgtcttcccacacacccagagtgatgctgctcacagcccccagtggctccccgctgcctccaggacaaagtctgatcttttcaggctcagctttgagccctgactggccttcccttctgcacccctccagcctcatgctcttttctcctctaagaaatttttgtcctcatggtggtccacatgcccccagctctgtgttcctcacacccactatacctgtgtatcgccctccctttccagaatgcctttcccttccccacacaggaactcctgctcagccctcaagaactagctccaatgtcccctcctccaggaagccttccctgatacctttagggaggaactggccacacccaacatcccctccccacccaggtcagagcccacttgcccatctccccttctagaccaggatgggggccatgtccaggtcatttctatgccttgacactgactggtttgggagtctgagagatgcgagatgcatgagtgagtgaaggggcactgccttccctctgaggtcctggccagaagggggaagccaggtggaccaagaagaaggctgaaattagatgggggcagcaaggcttctgggagggggtgagattcgaacaaagtgctgaagaacacgcactcatgtgccacgcaaagacaggcagggaaacaataggtgccagatgtgtaggtgggagagccctgagggcaggtggtctgggcactgtacactgttcacagaaccagagctgccataaaagacatggactgaggtaagtggggatcttggttctgctgagattcagggcaaagagagtgaccatgaggccttccccagagagtcagaaggcgggtacctggcacgcagtggctcacgcctgtaatcccagcactttgggaggccgaggcaggcagatcacttgaggtcaggagttcgagaccagcctgaccaacatgatgaaaccctgtctctactaaaaatgcaaaaatgagccaggtgtggtggcaggcgcctgtaatcccagctacttgggagggtgaggtgggagaatcacttgaacctgggaggcagaggtttcagtgagctgagatggcgccactgcactccagcctgggcaacagagcgacactccatctcaaaaaaaaaaaaaaaaaaaaaagacattgaggggctagcaggggccttgaacatgaggctgaggggcaagaattctgtggctccaggcactggggagctacaggagggctgtgggcaggggacggacggtagataaacttctcagccatcatgccctgtcagcactgaccagtggcacaggggaccagcttctgtccgtggccacagtgattcaggcaacaaataatcactgagcccccgggaggacacagcacgcctgggaccctctcccagtctcctctccagctgcccacatccctgcctccatggagctcacagtctggctggctggctgaaaaataggcaaaataacacgcaaccgggatgagctgtgaccagccgggccagccgaatgaggggggatgggcggcgttaacagttcggtaatatcggaggagcagtggcatctgagttgccgtggagggcaaggcggagggcatggtgtgggcaaaagcccaggggcttgagagtggtgaatggccagccgtgggcagaaccacgaggagaagccgagtgtgggctccaggcccggcctccaccctggctgcccgggcagctcagcaccatgtctgcttcttccacaacaggccctcaaagacctcaaggcactgggctgcagaaaggcgatgaagaagtttgaaaggcacacgctcttggtaagtggggatcttggttctgctgagatgcagggcaaagagagtgaccatgaggccttccccagagagtcagaaggcgggtacctggcaccctagtcctgccaccgccttcctgcctgacccgggggctggacacgccccctgtctggacctccgtttccctcatctgtcagagagtggggacaggatcctacggtccaaggacatgtcatgggaccaggaggcccagctgcggaggggctctctcaggggtgcagcctgcctgggccctaacctcggcctgtgcccaacctgcaggaatatcttctcggggaggggaacctgagccggccggccgtgcagcttctgggagacgtgatgtccgaggatggcttcttctatctcagcttcgccgaggccctccgggcccacagctgcctcagcgacagactccagtaaggggcggggctggcgggcagggggggggggcggggggcaatcagggaaagtagcagggagtgggaggagcctctgggtctgggggcggggctgttgtgaagggcgtggcctaattgatggtcgcggggctaagggttcccagataaaggacacggcctaggggagaagtggtggggtccctggtgacacaatccactactcctgcggcctttgggatgtcagggacgggcggggtcgggagaggtggatgacgggggagcgggccggtgccataagggccagctgccggggtgggtggggcaaggcagaggggcagggccgcagagcccaggtcacgcccccaccccgccccgccccgcctgcaggtacagccgcatcgtgggtggctgggacctgctgccgcgcgcgctgctgagctcgctgtccgggcttgtgctgttgaacgcgcccgtggtggcgatgacccagggaccgcacgatgtgcacgtgcagatcgagacctctcccccggcgcggaatctgaaggtgctgaaggccgacgtggtgctgctgacggcgagcggaccggcggtgaagcgcatcaccttctcgccgccgctgccccgccacatgcaggaggcgctgcggaggctgcactacgtgccggccaccaaggtgttcctaagcttccgcaggcccttctggcgcgaggagcacattgaaggcggccactcaaacaccgatcgcccgtcgcgcatgattttctacccgccgccgcgcgagggcgcgctgctgctggcctcgtacacgtggtcggacgcggcggcagcgttcgccggcttgagccgggaagaggcgttgcgcttggcgctcgacgacgtggcggcattgcacgggcctgtcgtgcgccagctctgggacggcaccggcgtcgtcaagcgttgggcggaggaccagcacagccagggtggctttgtggtacagccgccggcgctctggcaaaccgaaaaggatgactggacggtcccttatggccgcatctactttgccggcgagcacaccgcctacccgcacggctgggtggagacggcggtcaagtcggcgctgcgcgccgccatcaagatcaacagccggaaggggcctgcatcggacacggccagccccgaggggcacgcatctgacatggaggggcaggggcatgtgcatggggtggccagcagcccctcgcatgacctggcaaaggaagaaggcagccaccctccagtccaaggccagttatctctccaaaacacgacccacacgaggacctcgcattaaagtattttcggaaaaagccgtgtggtccagcctcccccgtggctcagttacttccccagtttgcctgcatcggaaccactagccctgcagttagcaggcgccacgcccatcctggagcccccccaaaaatctgcccctcacttcttcctggacagtggggctccagaggagggtggggggtggtgcgcacagagggaaccggaaggacgccctgcaccaccgggaaatggcaatcacagcgaccacctctgtcacgaggctgaagtccagatgggccctaatgcaagtaacagaaagcccagctgacagtggctgaacaggaggtgatttttctcacaagcagcagctgggagggcaggctccccagagtgcatctctgcaggcccttccaccttggttatgtccgggaagtgttcccacacagctaccaggtcgccgccacagcccagagcaccctatcctcttccaaaaaccccaaatcaggccgggcgcggtggctcacgcctgtaataccagcactttgggaggccaaggcaggcagatcacctgaggtcgggagttcaagaccagcctgggcaacatggtggaaccccatctctaccaaaattacaaaaatcagccgggtgtggtggcacacgcctgtagtcccagctactcaggaggctgaggcagggtaattgcttgaacccgggaggcggaggctgcagttagccgagatctgccactgcactccagcctgggcgacagagcaagactccatctcataaaacaaacaaacaaaaaaacaaatcaggcaactcaggaagccctgcctccacaaaccccaatcattcaccctaggctctgcccagccaccatcccctcctcaaccaggtcagagcccacttggcagccttccccccaccaacaagaagccaactgcacatgagaagtgtcagtttaatgaagccagcttatcagcagggcggcggagcacacctgccccctcgcaggtgtgcctggctcgggctaaagtgcctgtgcagaacgaggctgcctggcggggttaggagtcggcgccctcgtcctcctcctcgggcaggatctccaggctgctgtcgggctgcggggctgtgtccgtggagggcggcggggtgggcggggcccgggtgggcgacagaggcagcggggaggcggtgggcgaggggctgtggggctctgcgggcggggccagccccaggatctcctgcacgttgtggggcagctcctggaggcacgggatgagagaagcgaaaagcggaaggtgaaggtgagaagggggcgggggtcggtcggggttcgggcggggcgctgcggggcggacggggactcacggggcaggcggttagctggcggtgcagggcctcggcgcgggtcagcacgtcctccacgctcagcttcatagtcagctcgttgatgtgctgcgggagggggtgggtcaggcgccagtcggcactcaaccacctccgcccgagcgcccactctgtgcttcgtgctgggaaacaatgaagacacaccgggctggccctctgggggctcagaagtgcgctgggcgagacatgcttctcaggcctccgggagcattctgagcacgtactcggggagggmargtccccacccacctgcccggaggaccttgctgggagcaggcatggcatggggcagaagggaaacctacgcggccccacccccactgcgctcccaactaaccaggctttcaataatcccacactaaacacctgctccccggaggtactgcggccctgggcagcgcccagctcaggggggacagggcgggggcggggccggagcctcaccttgaggatctcattggagccgaagccggacagcatgagggtgtccctctccatgtccaggatggcgcaggccaccagcaggtgcagattggggccagggagccctgtccacagcacctgagggtgcgggacagagggagggagggaggtcatagcccagcctgggcctgaggtcccaccagggtctgtccctctccgcccaacctcccagggcaggtgagcccaccccttcaggcctctcgcccaaactggctggcccacctcccacagccgaaggacatccgggaaggggaattccctcttgaaccagatgagcagccaccggaaacagaagcagagagagccggagtcctgggaatctgggggatgacatggagcccactcagccttgcccagcgctgggactgagagtttgagaagtcatcctgactggaagaccttccccaagtctaggcaagtgacttatgcctggctggggaacctcggaggtgaggcaggagcagccctgaacgcgggccctgcccctccttcctcccactctccagaggaagtgtgctattatacttccacatctgccatggacatggaagggaggcaggacgcccagcacgcccgacgaaacagacctctgcccgctgctggtgagcgctaagggaactgacactcctagatacgctgttagcaaaaatttaagctgaaggccgggtgcgatggcgcacgcctgtaaccccagcactttgggagggtgaggcgggtggatcacctgaggtcaggagttcgagaccagccaggccaacatggtaaaaccccatctctactaaaaatacagcctggccaacgtggtgaaaccccatctctactaaaaatacaaaaattagctgggatggtgccacacccctgtaattccagctccttgggaggctgaggcaggagaatcgcttgaacccgggaggtggaggttgtagtgagccgagatcacaccactgcactccagcctgggtaacagagcgagactccatctcaaaaagaaaaaaaaaattaagctggtgttgaacctttttttccccccaagttaactcaaatgaaagtgagagtctgagcattctaacctttgaggaaagtaacaacggaggacaaactctccaaagctgtgtgaaaacaagcactgtcctgaacaaaattccacttcttggaagtgaacctaaagaagaaattacccagactatgcaccgtgatgaaaaactgcaaaggacccgaatctccagcaggtcaagttacatcaaatctaccacatcttgcaggtggacacaatgccgcgcagtcaagaaaagtgatgtttcagaagactttgaatgacccagaggcagcctctgtccttgtgccctaggaggtgatgcttttctatggcttagtttcctcatcagtaaggtgaggacagagtatctcagctccctcccccgggggtcctaaagcatcgaggaaatgttcatgaataagtttaacttattatcatcaccatctgcactcaagaaaaacaatgatatcaaacagcaactttaactttcttttttctttttttttgagacaaagtctcgctctgtcgcccaggctggaatgcagtggtgcaaccttggctcaagtgattctcctgtctcagcctcctgagtagctgggattacaggtgctcgccaccacccccggctaatttttgtatttttagtagagacggggtttcaccatgttggccaggctggtctcgaactcctgacctcaggtgatctgcctatcttggcctcccaaagtgctggattacaggcgtgagccaccacacccgaccttttttttttttttttttttttttgaggcaaggtctcactctgttgcccaggctggagtgcaatggcacaatctctgctcactgctacctcccccactccagttcgagtgattcttgtgcctcagccgatcccaacagctgggattacaggtgggcgccaccacggctggctaatttttttgtatttttagtagaaacagagttttgctatgttgcccagcctggtctggaactcctggcctcaagtgatccacctgcctggcctcccaaagtgctgggattacaggcgtgatcccaggatgacattgcgcccaggctaatttttaaatctttttgtagtctcccaattttttttggtctcccagtgttgcccaggctggtctcaaactccttggctcacgtgatcctcccaccttggcctcccaaagcactgggattacaaccatgaaccaccacacccagccttactttttcttcttcatcttaatttcctgcagtttttacattgaccaagtaataaagaatatatttttttttttttttttttgagatggagtttcgctcttgttgcccaggctgaagtgccatggtgtgatcttggctcactgcagcctccacctcccaggttcaagcgattctcctgcctcagcctcctgagtagctgggatcacaggcgtgtgccaccaggcccagctaattttgtatttttagtagagacagtttctccatgttggtcaggctggtcttgaactcctgacctcaagtgatccgcccgccttggcctcccaaagtgctgggattacaggtgtgagccactgtgcctggtcgaagaataaaaatgttaaagctgggatgcagcacccccagccccagggcccagagaaccagtctctgattcctggttcaaggtgagccacagccaggtggggataagaagtggcaggaatgcctaggtccttatttctgaaaaataccctgcaggttaagccaaaggcaaagcccaaacaggatctaggtgagcatgaggacggggtgagtcagcattcctgcgtgtctgcatttggtgaagttttgcttcaaacagcaattctgcctctacattctaggttgtgtggggatgtttctcttgtttggatcaggacccaatgtccaggatgccactgtggctgctaccagagaatctggcaaggtctatggccccattgtctcctgcccaccctcccgagagacatacccaggaagtcgcagagcagggggtccagcaccctcaggagcagcagcagtcgcccgagttgccgcttcatggtctcctggctctcttcaaagttcccttgctgtgggacggaaggaggggggaaagagcagaccccgtgaggtaccaggacacctgatcgctcgataggcctgtgtcccacccctgacccaagcctcaccacgagctccatgaagccacagaaacaccagaaagcatccacctcgttctgaatgacgtagaggatcggggagagaagatcactcatgccctggacgtagcctggggggacatggggtcaggctgcagccaagcccgcagcgctcccctggacagccccggccacgcccgtccccaggcctggcacccaccgaggtcgaagtgatacatgcagtaggtgaggaggatatcgttcagcaggcccagccccgggttctcgggaccctcgtagaacttgttggtcctgtcagtgcggctcacatccctttctgcggggaccgggcacagggtgcaaaggtgagaaaggtaggggggcccatccctgctggccaccagtgccagcccccactgctcctcctgctggcagcccccagcctcggggtttgctctgggggagaagcagagctggttctagaaactatcactgatgctcctgctgtgaggcgccaggcctcccactcaccagctggctatatcctcccacagtaggggaaactgaggcccagggaggcaaaatcacttgccaagatcaccaggcattgacagaactgagactgggcctgaagggagctgggctccccttctttcccatcctgtccctggccttgctcccccagggccattccccaacagcccatgcagctttcccccaagatgccctctcactggtcttggggaggcagggggctccctctatctcccactcgcacttatgcctgaggccctcctgtggttccctgctcccatccaccctaagtgccacccctgacactgaccgatgaggctgcggtatccatgcagaagtgagtttctccgctcctgctcagggctcacagatttccactgcagcttcatgcggaaatactcatccctgagtgacagagggaaacaagatgtgaggccgccactgtctgcaacacccagagacctccaagcctggcgccacctcccaggtcagccctgcagagcccctccctgaccacacagacccaagcaggtcacctcgtcattcttgccactatcccttacacttcaccttcctggcatctctcactacatagccttgtggccttttgatgaaaatttgtcaccccccactggacagggcaccagggacagggaatcgtccagcactgctgcatcctcagtgcctggcaggtatataacctacaccaggaatgaggagagacgggccctcctaggttataaaacatgctgcaaaactgtgatcattaaaacagtatggcacaggaatgaaaactgcaatggagacagaccatacaggggtgaggatgggtctggcttgatcattgccgtattccacaggcgcaggatggtgcccagatacagcaggttcacaaccagcgtccacagaacttgcccattggtgccctaggaggtaccaggtgtcatgcctggcagggcagggcctcctgaggactcacgttttcttgcgtatgtgggccttgtgctcctcagctgtgccttcccagctgaggtaccctaggaggaacttccaggcctcgcgccgcaggctggggctcagaccctgggggtgcaggagggcaggcagctcagtggggccttgttctggccctgccccattcttccacctgtcctggcactcacccccgagaagatccggttcttcagctcagggacctgctgcaggcgaccttcagggcccacgtggcgtgcccactcctcctctgtaactggagggccccgctccacggttggccgaggccccagctccacctgcaggcaaagagcaaatgagcctggggctcggcggggtggtggggggacccaacccagcctcagtccacaagctcagagagcttattagcttgacggatgactaacattcaggggcaggcagcagcctcttccggggctcagcagccaagtcatcccccagttaggaggggtcccccaataagggtgagcaggtgctcacagtgtctggcagagccatgagcgctttcctcatgcaccccctgagggtgtcccattaccatccccgttttaccaaagaggaaactgaggcccagggaaatgaaatcatgcgcccagggagacacggccagaaataacagggagggtccactcactactcacacaggaaatgacctcgaatccaggctcgggctcatcgtcgggtggcgggggaaggtcggaggcggctccctcaggctgtggctgcagggcaccccggaagaagttggtcactcgggagaagctgctgaaggtggtggagtagggatcctggaggaagcgctggggacgaggccaaagggaggtcacggcccgccccttctcgtccctccctgcccacacccgccaggcctcctgctggggacactcactgacaccacattggagctgtcctggtcaaagagctgcaggtggtggaaggagttggagagagcagaggagtcgtgggggaagacaaggtagaggcgggagtcctgcggggagctgggaggcgggaggtgacgcacaggtgatgcacaggtaggggcccagtgtcccaggctgtctgtgctcggccgacatcggttccagctgcagcgtcccaaccacccctgggcaacccctcatttcagggaatgctgttaaaggaggcccacagctggatcccaggggtgggcacatgactcggggctggccaatgagg

SEQ ID NO: 97006 - DNA, 26365 bp, Homo sapiens
agaggcaggcatttccctgacctcagtctctgtcccagcatttttcatgcctgaaggaaaatccaaggacttttacgatcagaatctacaaagttttagataatgatgtacatgtttgtcctcactatgatcaatttctgcatatctcacaacagcacacaaagatacagcctacaaaagccagaggcatgagtttgccccatgctggcgataattgccgttaatactacataactcaattttgtggaacattttgtccttggcataggttttgcacatgtaaattcattcatggcccttaatgcacattgcaggggatgaatgaagagtgagaatggtcttttctgtcttggtattttgttcagttcttggcctcgtggatttctttttctccacacttttcaagatgtgcactatccatggtatccaacccctcaactcctgctcaataacctggggccagcactgagtgcccttcaattaatagagctttttctggtcctgtccttgagatcagctattggcccagggacctagcagagttttgcttcctaacaataaggagggtcactgaaggttataaatgtatcaaggagccccatgttcatgttgagattccaagtaaactgactaattttgtttttcagggttttgttgttgttttgagacagaatcttgctcttttacccaagctggagtgcagtagcatgaccatggctctctgtagcctcgacctcccaagatcaaacaatcctccctcctcagcctcctgagtagctgggactacaggcatgcagtagtcccagctaatttttttaattttttgtggagatggtatctcgccatgttgcccaggctggtctcaaactcctgggctcgagcaatctgcccacctcagcttcccaaaatgctgggattacagtcatgagccagtgtgcccagccactaatttcaaataaacatttttttttctgataaataaatcaatttgttgcagttgactacttggcatttaggaagagcggttgttgaatttatcatcaacatcacaaggctaatgtttagctgacacacacaggaatgctcatagcagttgttaaattattgaaatacataatggttgataaatagggtctgccccccaaccctattcccacatcctacctcactgaggctgacctaatctgttccctaggacacactggatctcccccaaatccagaaactaaaagggtttatgcctggcaaagcaattagctgagtagatgcatagctgttgctcattctgactgatcagcatccaagccactcaaattgttaaatattttgaataataatcctgagccatcacggtatcgaagacatgatacacctgagcaacataaacccatccagtggtttaaaaaaaaaaactagcccagcggttctcaaacttgaacaggcagcagcatcatctggggagcctgttaaaacatacactgtcagccctaccctcagagattctgagtcagcgggtctagggtggggcctgggaattggcatttctcacagttctcaagtggtgctgatgctgctggttcacaggtccacaggtccacagaacagttctctgttagaaatactgtctccagaacagtacttctcaaacatcaatgttcacaagaatcacacagattataattcaatggatctggggtggaactagaagttctatagttctatcaagctcccaggtgacgctaatgtctatatatgaccatgtaatgaaagtcttacttatatgttttctggttttgtttttgtttcttttttttttttttttttttttgagacagagtgtcactctttcacccaggctggaatgcagtggttcaatatcaactcactgcagcctccacctcctgggttcaaacatttctcctgcctcagcctcctgagtagctgggattacaggcacatgccaccaggcctggctaatttttgtatttttggtatactgagatggggtttcaccatgctggccgggctggtctcgaactcctgacctcaagtgatccacccacctcggcctcccaaagtgttggtattacaggtgtgagccatcacgcccaacccctaattataagttctttatcctctgtctataattactttttcacccttctttcatttaatttttaaactttgctttgccttcttttgctcttcctttctcccttttcctcttaccagttttcttctcctcctctcctttctctttttacttcttttctttccagtctgtttttcttgtagatttttcaagatttaaaattcccaacccactctcagggttctcttcctggttaaattttttaaaaaacaaaataaaaacaaaaacaaaaaatgcaaccctcactactcaaaaagagactccacccagactgttctggagctttgtgagtccaacgaagtaagaaattagtctagggaaacaaagaaggcagtcaagtgcaaagggaaagcccagatggctcttttctagaaaatactaggccaggagcctttttccaggactagaaatttgccatgcttactgactagctctctctgtctgcaaaacataaaaaaatatcaattttagtgaatttggccattttctggattgtagtagtgtttattctagttgagaataaataaacctctgtgagccatcagcttgtactctccctgtccttgggctaggcaagcttcttagcagcaaattccatgaaaaagtctacaagccctagcactgaaaggtagacgtactggcccagccttgcttgacttccagaaaccccagggacatgaccagggtttgttggtgtagcagctgtgtctgagcgttcgttatgaaccatcttcttttcaaatgctgtggagagaagttcaagaagagctaattccacaagaaaaaggagaatggaaatggtaggtgtcttcctggtgcagagaaaaaaggaattcactctgaattcagatcatccagtgctaaatggctttcttagagacctatatattttagccgaccctgtgttccttcctacatgagaagcaacccaggcttggattccaaattaattctaccaatcgtaagttatcgaaacttgctgtacctggaccatcttacctgtagatggacacagttaccttagctaactgggcacttataagatgtatgaaaataatgcttacaatggagctcacactttgaagtagcggttttccagtggggacaattttgcccccctggagacacttgtggttattaccacttggaggtgctactgacatctagtgggtagaagtcaggaatgctgctaaacagcctacaatgcacaggacagccccctataacaaagcattattggcccaaagcgtcagaaatgctgtggttaagaaaccctgcttggaagatgttcagtttgtgtcaacatccatttttccttcttgaatgaaaatgagagaaaagatggaggagaaatagatgaggataagctctacaatatataagcatgaataaaatttctggctgtgatggaggatgcatcccagtgaaaacgagagagaacaagcaatgaacaaagacattgaaaatacttcaagtaccttttttaattttttaagccaaaattgacaaatgggatctaattaaactaaagagcttctgcacagcaaaagaaactatcatcagagtgaacaggcaacctacagaatgggagaaaatttttgcaatctactcatctgacaaagggctaatatccagaatctacaatgaactcaaacaaatttacaagaaaaaaacaaccctatcaacaagtgggcgaaggatatgaacagatacttctcaaaagaagacatttatgcagccaaaagacacatgaaaaaatgctcatcatcactggccatcagaaaaatgcaaatcaaaaccacaatgagataccatctcacaccagttagaacggcgatcattaaaaagtcaggagacaacaggtgctrgagaggatgtggagaaataggaacacttttgggctgttggtgggactgtaaactagttcaaccattgtggaagtcagtgtggcgattcctcagggatctagaactagaaataccatttgacccagcaatcccattactgggtatatacccaaaggattataaatcatgctgctataaagacacatgcacatgtatgtttattgcggcactattcacaatagcaaagacttggaaccaacccaaatgtccaacaatgatagactggattaagaaaatgtggcacatatacaccatgaaatactatgcagccataaaaaaggatgagttcatgtcctttgtagggacatggatgaagctggaaagcatcattctcagcaaactatcacgaggacaaaaaaccaaacaccgcatgttctcactcataggtgggaattgaacaatgagaacacatggacacaggaaggggaacatcacacaccggggcctgttgtggggtggggggagggaggagggatagcatttggagatatacctaatgttaaatgacgagttactgggtgcagcacaccaacatggcacatgtatacatttgtaactaacctgcacattgtgcacatgtaccctaaaacttaaactataataaaaaaaatttttttgttaatacgtgtattagtctcttttcacgttgctgataaagacatacccaagtctaggtaatttataaagaaaaagaggtttaatagattcacagttccatgtggctggggaggcctcacaattctggcagaaggtgaaagtcacgtcttacatggcagcaggcaagagagaatgagagccaagcaaatggggaaacgtcttataaaaccatcagatctcatgagatgtattcactaccatgagaacagtatggaagaactgcccccattattcaattatctcccaccggtccctcccacaacccttgggaattatgggagctacaattcaagatgagatttgagtggggacacagccaaaccatatcaatacataatacttctacgtatttatggggtacatgtgatattttgttacatgcatacttcaaatacctctacagaggcagccactgtctccatctgacagttttcatgcaacacatgactgaaggcccagagctgcatatatagaaaaacagaaagaaggattttgctatttttgttttattatagaatctactatttctcattttggttgttcttgttgctctgtagatttgaagaacattggccatggtcatgttcagaatttttctgacatcagttctgaaaatggcaaatcatcaagtgcaggggtcagcaaactgctgctgttctttgtacatcctactagctgcgaatggtttttacattttttaaaggttgcaaaaacataaggaacatgcaacaaagactgtatgaggcccataaaactaaaatagtatctgttcccttagagaaaacatttgccaacccttgatctagagcataaaagtgacatttctttactctctaaataattagagcaaaataacaaagttcagggaatttatgactcatgaaatcaaacttacaggaaactcattattatagggttaagactttagtatttttctcaacagcaaaatcttcaaattcttaagtgaaaatctcatctatttaatattactctgcttacttctcatttggtgatgggatggagggattagagaagggagaaggatatttagaaataggttataaaagatgaaaataaagcaaacacattactgattctgcatataaagccctcagttttctgattcttggctgtccacaaatgaactagtcatggcataaaagtgaaataggatccaaagtctgccaaagttccaggttctgagatgacatgtttaatgatgtcatagagaagttatccatgtattccaggcaggatactgtaataaataggagacagctacagtgatccaactaaaccaacaggggattttcatcagcacttccctggtgtaatcatggtacagattattaaagacacggcaagtatttatttggcttcactgagtatttcaaatgtggacatcttgggaacagatttgaaaaactttaagaatgtgttctctctatccagtattctatcattgcattgtagcaaggggagagttctaaattcttgttctttatcttgttccttgagggatggtactatcaagaaaagcagccaagggkcaaattgataaagaagggctttcttcctcctggacttttatttcctgcctgacttcaggtgaatcccagaccagctcctagtacatcccatcctgtatctgatcccatggatcgtacctcagttgtgcttggaaaattccatggaagtaaggaagtccacatcttttctcttatccaaggaaaaataatagaaaccccagatgtggaatggggtgggaaaattgggaacagcccaatgttgctgtcacaacaaatctaaattcatgtatagracagagataattcttgatttataaaggagaaaattgcctctaaaagagaggttcagggctagttcgtttaagaggtggtgtgggcattagaacccagaccttctgatgcctgccctcattacaagaagtcaagagctggaggaggggagggggtttggggcctgagcctcatgtccaccagcagcctcagatttagacttgtgacattttccccaaaggtggctatacagatcacaaaaatgacactgaccagattgaaagagagtactgccctgtaacttcgacataagaacatgttttgaaacatcacacatttgctaatgcttttgacacttattgttttaatattctggggatgtcacagaatagcctggagccttattccctcagaagacctttcatctcctccccagggacctttccagaggccctgatctccatcccatctttattcagatgccaccttctctttgaggttgaccttggccatccagactacagttgtaatccaacccccattcttccttcctacttcattttctttttattttctttattagcaattagcactaatatactacaaatattacctattgaccttatagtaagcttcccattctaaaatgtaaactccatggagacagaatgcctagtttttgttttgttttgttttgtttttgtccacagtggtatcctagcagtttgtgcagtagctggcatagtataggcctcaatacgcatatgttaaataaatacctatactatgagagtattcccttcagatagtttagtcaagtcaagttcatgggtccaattaggccagctcacacccaaacaacaactactggaaagtgaagagtgttgggagtttgtgaggatagcatctaccttacaacttcagaagcaagtgagaaataaaggcttggcaaggttctctgaaaagttagttactccctcccagaggaatattgataaagaaagagagtgcatcttctttgagtcatcactttcacctgattgaaactaaacaaagtagccacataattgtcaaggctattatagagcaggcatgttgtattagtctatttgcatactgctatgaagaaatgcccaatacttggtaatttataaagaaaaaaagatctaatgaactcacggttccacatggctgggaagacctcacaatcatggtgaaggcgaaggaggggcaaaggcatgtctgacatggcggcaggcaagacagcgtgtgcaggggaactgccctttataaaaccgtcagatatttttagactgactcactgtcatgagaacagcatgggaaaaacccacccccataattcatttacctcccactaggtctctcccatgacatgtggggattatgggagctacaattcaagatgagatttgggtggggactcagccaaactgtatcacatgtcatttgtatggattaaacccatccatagtgggaataggccttgcttgacttaatacaattaacaatcccatccccctcctcttaatgttcggtccaggaataagcacacaatgcaattagggccaatgaaagggagaataagtcctaattctataatgaactcaggagtggattttctrtagtggttaaggaaataggaactggagtcaggctgcctaggataccaatgccagctacaccactcaccagctaactgatcatgataaagttagtgaacttcacttttctcatttgtaaaatggagataataatagtacacacgttgtagtgttgttgtaaagattatgggagagaatatagggcacagagtaaattagctacaattgttgcaattccagtgagaaaaggaaaagtcttgaacagagtactatgtattagcaaatcattcattcatcaagaagacacgcaggctgggcggggtggctcacacctgtaatcccagcactttgggagactgaggtgggaggatggcttgagtccgggaggcagagtctgcagtgagctgagatcgcaccgctacaccccagcctggatgaacagccagaccctgtcaccaaaaaataaaattaaattaaaataaaaataaagaaaacactctatgagcacttactctatgagtacactatgagcacttatgtgtcagttagggatcatgggaggtacaggaatgaatcaagattaaatcctgtaaggacttggggagatcaatcatgcatgaaataactagtgtaggaccagtcacttgtcataaagcaagcaaatatagatgcagtcatctgagtcccaggaagggaaacctttatttacttagatgatacaaacagttgatgggaaattcacttgacattcagcaataagcatgtcaaatccttaaatgtatagttttaactgtagctgtaataatgatcacttcccccccaaaaaacaagaaattactcaaggtgtgagattaattcttctccttttaaagttcactagtcatgcatgtttaggcccttgtttaataaaaatccagtattatagatatccaccctgaacagcagttcacctccaccctccagcccccatccctccctggccaacctgtttctcctcagaggtaaccaccgttatcaacttccattaccaacctttttggtrcatagacttccatgatttttatgtacttacaaagagaaatatatttgacatgagggacatwtaaggtggggtcagctagagaacaatggcatggtacacctggttaaggtttttaagaactaacatggccagataaggtggctcacacctgtaatcccagcactttgggaagctgaggcaggaggatcacttgagcccaggagtttgagaccagcctgggcagcatagtgataacctggctttaaaaaaaccaaaaacaaaaccaaaactaatctgtcatcttcttctctacaaaatgtcatgagattcagtgattatgcacatttcctcatttattttctgttttcagaatgaatttaaaacatttttgacagctgccggacacaaactcgcagtggttcaattttcttcgaaacggtgtggtccctgcaaaaggatgtttcctgttttccatgtgagtacaaccagtatatatctcatagtttcagaagaaatttaaagttccagaatatttttcccagtaattcttaaaagtttggcaattatgagccattctggagccatagatttttgaagcaccctgattaactgaagataatataccgagatctaattagataataagtgtacacaccagaagattaatactacttgtccacaggtaattctgcaagaacatcccaagatgtgcaaaggagtccaattgtacaaattaatggattcttcatattatagcaatgacattttaccaaagtttcaagagttcagaactttcaaacactggattagaatacagataaatatgatatttgtttttaaatataacataaaagaataaatttctcccaattcttcaaccttattatcagaacaaaccatatgtctttgttatttttcctacagctttattgatatataattgttaaatatctttattgaggtataattgttaaataaacaaaatctgtttatttaatgtatacaattgatgttgggacatatgtatacacccatgatattatcaccacaatcaaaatccatcacctccaaatgaaaccttgtgtacatctgcttttgtgtgtgtgtgtatgtgtgataagaacacttaacatggaatctacactaaatttttaagtgtgcaacaccctaatgttaactctaagcactatgttgtatatcacagtggtccccaacctttttgacaccaggaccagttttgtggaagacaatttttccatggactagggcttagggtagggggtgccgggatggtttcaggaagaaactgttccgcctcagatcatcaggtattaagattctcataagtagcgcaacttagctccctcacatgcacagttcagaatacggttcttgctcctatgaggatctaattccacgctgatctgacaggaggcagagctcaggcagtaatgacagctcacccaccgctcacctcccgttgtgcagcctggttcctaacaggctgtagactggccctgggattgaggatgcctggtatatcagatctctagaacttatcatcctgtacaactgtatctttacacccattaaacaactcatttactccttccctgttccctggcaacctccattatattttctgcttctctaagttgactatattttacatacttcataaaaattgaatcatgcagtatttattctatggtgactcactcgtttcacttagcatgatgtcctccaggtccatacatgttattgcaatgaggcgaataatacgccttgcatgttcctttcttgtccttgatttactttgtaaaatattctagtgagttgtaatcatatatttatattcaaatctttttcccacatacacattggttcatgttttcatagtctccaaatgaatcttttaatatctatacaatattttatctggttaatttctgtaatatcctacrtaacagtttttaacattttatatatttatttttggtataacatacagcagaaagaatctcagggcactttttttcatttttccttattgtataaaactttacatgtttttatggtcacttttgtaaagtttattccttcaaatgtaaagactatacagctaaaaatactctggtttatttttagcaaggtttctaacatttctactttttttaatccacctgagcctcagtcacagcctgagttaattttaaccacagtcacaatctttgatatttaattcaaaatgaacttatattccaatagagaaactggctacataacatcacaacatcccttatccgcctaaaattcttagaatatctagaagggaggccagccatggtggctgatgcctgtaatctcagcactttgggaggacaaagagggaggattgcttggggccaggagttccagaccaccctggccaacatagtgaaaccctgtctgtatttaaaaataaaaaatgaagaatattctgagggaacattttagtttctgacaggtcctaccatgctgacactcaagacttaggaaagaggatctccttgactttgccacagaatatctagtgttcagttttttaaccactcttcagaacagcacagacccacctgtggagattctaacttcgccataaccagttttttcttgtaatgtttgaacttttgcaaaagaagacattcctgtattatgtgtgtaattttttttaactcatagtatatgagggggttggaggaagactttacttaccctagatcaggggtccccaacccccaagccatggaccagtaccactccacaggtgcatggcctattcggaactggccacacagcaggaggtgagcggccagcgagtaagcattacctcctgagctctgcctcctgttatattagcggcagcattaggttttcataggagtgcaaaccctattgtgaattgcacatgcgagggatctaggttgcaccctccttatgagaatcgaatacctgatgatctgaggtggaacagtttcatcctgaaaccatccccccacccccagtctggggaaaaaaatgtcttccatgaaactggtccctggtatcaaaaaggttagatgactgtatcagtcagagatcaaagcaagaaacataaaccacattagaaccaaattagaaaaggattttaatacaaggaattaaatgctcataaaatcatcagaagactgggtgaatgggcttgggacagaaactccacgaaccactcttcagagcaccacagacccacctgtggagattctaacattgccataaccagaagtcatgggaaacgggaggccatgattgggagttaaagaaccaccaacagagcagcggtcagagtcagaagcagaattaggcagctactacagccaccatggcctctggacatctaagaagttaatttctggaccctgagtctggctgccaccactgcttgcctctagcacaaccagtacccatgacctcactttccaccaaaaaagaagaagaaaatagcttctgtctcatttacactggcatgcatctgactagtaaaatgaaatttgcatccagaactctagctgcaagggaggcaaagaaatcttcaccacttttcctttccaggctctccaggatggtgaaatggaagttagttagcaaaaccattattcaagagagggaaagaattcaagacattttcagacacacaaaaactaaaagtttactaaccacagaatctctctgaagaaattgctaatggatgtattacaacaagaaaaaaaaaacagtgaatcataagaaaatgtgggttttaagaagtgattgaaattatgcaagagcaggggtcaacaaacttttcctgtaaaagacaagatagaaaacattttcagctttgcaggccatatgatctctgtcacagttactcaactttgctgctgtagtgcaaaatccagtgacaacacaaaaacagatgggcaactagttccaataaaactttatttaaaagaacaggtagagggatggatttggtccacagggcatagtttgctgatcctgggctaagaggatcactaggcatagatccctgaaaagaacatttctggaaaaggagaggctaaaattttgttgagaaattgtatgatgtgatcgggggaaggcaatatgtagtctgtgaggcttacatatagtgtgcaatggaagtggcaaaaaatgagcctcaaaaaggaagctgaggccagatcaagtaggatcttgtgttataacttaacaaactgctgtggagagtccaataggacaattttaggaaggattttgccacaatcaaatgtggcatatagaaaatatttttggaggttgcacaagaatagattggaaagtctaaaagcaggaaacccagagtgaatgtcagtaatgataggtttttccaaaactagagcagtgactttcagagaaaaaggaaagatcaaaattcaggaaacattttagagttagatcaacagaaataagcgactagaaatacatgagatatgattttaagcaaacaattcaaaatgccatcaagtgtccttaaggtatgaacacagctgtctgaaaagatacccaggagctgacatttacaggccactgttgtcactgctgctgctgtggctgctgccacttcctcttcccctagacccactaccagcaccatggtcaccgtcactgccaaagatgattccagaacaaaacagaagtaggagggagttacttcttccctcctccccttccatttcctgcaaatacttcccattggaagaagctaattggaagtcagccagcaatggaacctggaaaatctagtttccacacatagtagagcacagagagacggcaacaggagtgcaaataaattaggctaatggtcagcattaaaatgttgacatcgcttcaagcagaacagccttctagcaccagtagcaccagcacctcccaaaatgccaggcaagagaaggtagagtttggctcggagaactgtatctcaaagatcamtgaagacagactcccccaactgctctcccaggagaaagctactctactatcccttcctccaccccacaaagtaagtctggatccaccacgcacattctgttatgtctttgccaaccttgaaactctaatcttcagtttggttctttgactctgcttctgccactggtccttacatcatctgaccttggcatcatctggtatttgacttgatgcttcaggctctaggctgtagtgaaatgtcagaatgatgcttagtcctctttaacagcctttctgttcaattttcktttctactgaaaagacacttccagtgtgtattttaatattaacaccaaactaatgggaaatatttattttttattttgaaggctatgtctgtgaaataccaaaatgtattttttgctaatgtggatgtgaacaattctccggtaagaatcttaaatcttctgtgcacatactcaaaatccaaaggcattgtaattgaatagcactgtctcagtaattattaatacatgaccaatttaaaatcaactagaattttacattttttctaataactacagtaaacttcctcattatgctcttatatgttttgtattacttaaaaacaaaaaaaaagattagcaagaaaaagattagctctcctgatacccctctcccctcttatgctgtggcaggcctcactaatcaatcccagttttcttcaccacttgctctgcgttctgcctcagaatcctcctcagcagagttgctctagggagacaatagaaatctgttaaagttgagctcaaggtgaaagatggttttcatccctgtgatggattgttaatcaatttctttatttggggggtgggggacagagtttcactcttgttacccaggctggagtgcaatggcgtgatcttggctcaccataacctccgcctactgggttcaagtgattctcctgcctcagcctcccgagtcgctgggattacaggcatgtgccaccacgcccggctaattttgtatttttattagagacagggtttctccgtgttggtcaggctggtcttgaactcccaacctcaggtgatccacctgcctcagcctcccaaagtgttgggattacaggcgtgagccactgcatccagccttgttaatcaacttctaaaacctacctcagtgcattacagacatcttaatatattttgcttttctcttgcaatatcttacgctttttgtgtgtttttttgaagcatcataagaaattcccagaaatcccttcttcctgtctctggagccatccttcctcatcccatccccccaaaaaataatcaaccccataacctcaaacaaagtgtgtcttattaatacacacaatgtttctacaaaattattattttaaacatctgttaatttgtaatgatgagaggtaccaacaggtggtctatccacatgttagaatgcatttgagctttagaatgaaaaaagtgatatctaccattctgccctttaatgattttatgacccattatagttcaacctccataaacttcagtttcttcatttgtaaaacaggataataacacttaaccgaagataaaatgagataaaatacattaaataaatgacatggtgcccagagcataatagaagttccctttctccatttccttcaagcttcattaaagtgtgagtgtttaattgccctttaggatgaatcataacctataaattcagaatacacagctagtatgactatctctttaccttttctatattcacagagttgtgcaatcatcactacaatcaattttagaacactttcatcactctaagaagaaacactgtaccctttagtagttacacccaattccctccatcctccaccccccaatcctaggcaaccacaaatccacagtaagcaaaatagatttgcttattctgaacatttcctataaagggaatcatagaatatgtggtctttaatctctggctgctttcactgcatacattttcaaggtgcattcatattatagaatgtatcagtactttggccaggcacagtggctcacacctgtaatatcagcactttgggaggcccagatgggtggatcgcttgaggtcaggagttcaagaccagcctggccaacgtggcgaaccsccatctctactaaaaatacaaaaattggccaggcgtgatgatgcayacctgtaatcccagctacttgagaggctgaggcaggagaatcgcttgaacctgggaggcagaggttgcagtgagcccagatcgcgccattgcactccagccagggcgacaagagcgaaattccatcycaaaaaaaaaaaaaaatatatagtataaacattagtgtacaaatttttgtgtaaacaaaatttccatttcccttgggtatatatccaggattggaattttggggtaatatggtaactctgtgtttaactttctgaggaagtggcaaactgttttctaaagcagctgcaccattttacattctcaccagcaatggatgagagctctgatttctccacatccttgccaacctgtgttattgtctggcyttttgattagagctcattgtctttgaaggtaaaacaaaatgcgtaattgtctaatagtaatttatgtatcagttgttatcactgtgtggtcatgaaaaattataatacagtatgtcttcacgtgtgtgtgtgtgtgtgtgtgtgtgtgtgtgtgtgtgtgtgtgtgcatgagtagcagggcaagagatttaatgccaacaaaatgattggtatattagagagagatgtcctgttctgttgatcctgtgggtgactaattttcttttgactcctaaacaagaaaaacaaaaactaacctttgaaagtagtttgaaatagattaaaacaattgggattctggcatattttctcatattttggctccaaatctttcacaaagattggcagtgaaggacttaaaagaaagacatgtataagccttacttaaaatgctagatcaggatgcgttccacgtctcaagtagagttataaagatttgtttactcttttctatttttgcaataagctcttcttatactgagttccactggggcccctctgtactctttcacaaggtcctttaaatgcagctcatattgttattgagcatctattctgttgtggcctccatctcttacccacctcctggttctatgggatgaaaaagcccaggaacgctgtaacgatcattttctatcaatcattttatgtcaatcattgtgacattcctgaaggaatgttagaaaagttcatagcaggagagtctgtaaagtgtcaggtgtccttggaatttcagacacgcctcctaaaaagttaccaaataacatgcttggtacagagagaggacaccaatactgtaacttcatgccatttctttgctttcccaggagctggctgaaacttgtcacatcaaaacaatacccacatttcagatgttcaagaaaagccagaaggtatgtttccagggtaaccagcagggttgaattagattatagaaccatcagagtccctcaaaaaagcctggctgtcctgggtggatgaaataactacatttatttttaatgcttaccaatataattctctacatacaagtatgttgtactttacatacaacaactttacatacaactttacaaagggttaaaaaatgtatgacttattaataaatctccccattcagaccatctgaggtatccaagtccataagtattttcccactattatctctacactggggcaaaaccatcaagaaagactcttttcagagraagacattctgaaattcttacaaaaatgtatacaagttgcaggccgggcgcggtggctcacgcctgtaatcccagcactttgggaggccaaggcgggcagatcacaaggtcacgagatmgagaccatcctggctaacacagtgaaaccccgtctctattaaaaatacaaaaattagccaggcgtggtggcgggcgcctgtagtcccaggtactcgagaggctgaggcaggagaatggcatgaacccaggacgcggagcttgcagtgagccaagatcgcgccactgcactccatccagcctgggcgacagagtgagactccgtctcaaaaaaaaaaaaaaaaaaaaagtgtatacaagtttaaacaatacttgaggaaatgctaaccaaaagctatcacaaagcaatattgcctagtggttgagcacgcaggctcgggattcaggttcccatgattcacatactgcttctagcacttcctagctgtagcgccttgagtagtgtatttaatctgtttatatcttagttttcctatttatacatgaatcataataaattttcccctcatagggttggtgtgataattaaatgaattaacatgactcaggtgtttagacccatcctggcattaagtgcttactgtgttatgttagttatcttaaaaatattaatggaataaaatgtctaaaatattcagcaagttatgaaactagtactttgttctttttttttcgggggtggggggatggagtcttgcaaggtcacccaggctggacagcagtggcatgatctccccatctcagctcactgcaacctccgcctcctgggttcaagctattttcctacttcagcctcccgagtagctgggattacaggcaagaaccaacatgcccagctaatttttgtatttctagtagagatggggtttcaccawgttggccagactggtctcaaactcctggcctcaagtgatccatccaccttggcctcccaaagtaatgggattacaggcatgtgccaccgcacttggtggaaactagcactttcttacatggccgggggcattggcaattttccataccttatgaaaggcgattttgcaaacatatgtaggagacacaaaatgctyattccgttttacacaattaccccattcctgggaactttcggtacagaaatacctcaaggaaaaaaaaacagtttcatatataataatatttgtagcactatatctagttttaaaaaatgaaagcaatctcaatgtctttaagtaaaaaggctaagtaaattctgatacatctactccatgaaataggatgcaagcaaaaaaaaagttataaagaataatttaaagcaaaatgcatgcttaagctttgtaaagattatgtctgcagtgtaaagaatgaaaacattggatatgctagctgcagaattttattttcaatttctaagtattttctgtaatatagctggtgcaatatatttaaattattttttaaaataacactacatattccctcatttggatttttacttgaaaattaaagttatttaacatatgctccctcaacttacctgacttagatgtccaattgtctacatatcatcttttattatcttctccttcactcccatttcggaagtgagaatgcttcctcctttcaaaatcagtttcatccatgcagcttgattgcattccctaccttctgcttcaggcctctatccatcagttactctctttaaaacttggagtttagacacttctttttggcacccagcatccattctctattaatagtactctgattttcctccaaggaaccactcccttttgcattcttatcccatgtacttccttagggctccatctccaggcctacaccaaccagtgaactccatccccatcagaaatggacccttgactccagtcaagccaatccaagtcaaaccagagctaatttcaggactttgcttaagcagctaggtaaataaccttctcctttgatatcactggatttgaatttgggaagatatgagtctgaagctactacagcttgtcaccatgtaaaacctgaaaacgaatctaccacacagaagaaaacagagtcaagccaagagtactaatggcattgactgcaccctgaatctatccatgcctgaagcctacactatccccatagattcttcagctatgtaaactctgggttggtttctctgtcacttgcaacccaaaaaattctgatgaacatatctggtgttctcccaggctactctccttcatttcatggtgtaattgttaaaagagtagaatatatttgcagtttccaattctcattttccactcattccctcatctatttatctatttatctttctgtcctctctaaagtcaccaaggatctccctgcacctaatttaaatagccatttctcaattcttgattccttagctacacagaagcaccattaactaatgagcttctatattctggaaattttcttctcttttgactttatctctcatccctccctatgctctcctctggcttgtctcctgttatagtcaaatatatccgttttggatatctatctttttggttcaatccatttcccattctacctctctcctttagcaatgtcattcctacttctagttccatctataaatacttttttacttagacaattgcaatgccccctcctcaccctcaacttagcaccatatctctgttctccagatttgtgcacagctccctgtatggcatccttttttaacatgtgatgtcctccccctccattgcctatagaatcaaggctaaaccattgtatttaaggctggcattcaagtttctccataattttgacccaatctactgctccaagcctttctctgtttaactcagatcttcatgtatttttctcatactagtccaagcacctgaaggaggtcatgtctgatttgaaagctcagtgactagaagaatcccaagtggatagaaaatactcatgatgtgtgtgatgaatgagtgagtgcatgaatgaatgaatgaatgcttctgttttttccctgcatcccactgccagctcagcctctcctcctgattctgtcctggtaccaacctgattcagggcaagtttctctccagttcagtataattttctggttttattcctgctgctgctgatattgtttggtagctgctgccactcaacagtttttactccattttatgatgacacaagactctgagttctcaactgattttgtgtctatgctcttgaaccaattcaagctatgcttttgaggaaaggcatggccctgcttggtctcaattctgtatggggatggaagtgccctcaataagctggggagagaggacatttataaacaattatatctaactggtctctaatggatatgtatctcttttgaattgatagatcctgcattccagagatcactaaagatctcaaatctgaattttctgccaggcagctattagaaaacaaattaaaccattaagatgattacacttccatattctaattccagggtcacccaacaagcctctgattataatgtggatactcatatctcaagaagttttattgaggattcaatttatcattgaatattagtaacttagcatcctggttatgaatttaaaaaaaaaaaacttgagaccatttatgtcacattatacaaatgactctacttctaaacgttttgtacatcgtaatcatatctttgacagattcatacctggatcaatttagatataatttgaaaacctccagaaaaatttgtaatactgacttcatttggcaaagaatatcaattttctatgcaaaagatacaaaaaggaggaggagatcctaaagagagagtattacaaatcgtttacctcttgtgactcagactgcaggatttggtatctgagcagcactgtcagggtcagtgaggtccccacttctacattgcctccagagctgcagttaagccatgacacctctgaaactctcccctggtcttacctcacagtgacctgcaaggaaagtcactagaaccagaggaggcaggtttggatggccagccaaaaagacatgttcctataaatttccttttttttttttttttttcatagaactgactaggaaggtgtccatgaacatccactgttttcctggtgggtcaagaaaaatcaaatgcacttttttgaggactacctccataaatgtgctcctctcttttatctgggacagcgcaactgaaaactgacttattgaagcagttaagtactgtgtgtcctttattattttaaaaaataaaacctagagttcagttcctattaaggcttcttacaagaaatgtcttacatttctgataaaacatctggcaaagagccacttgtccattatacccttttaaatgtacattgtataaaaagctttatgataatttctcccagaacacaagagttaggagaatactcacctcccttgaaagcatggctctcttctctgcattggatcagaaaagttagggaatcccttgggcttctctttttgccatggccgccaagaatctcaggattgcctcctctgctcaaacacagtaatctcccttaccagcagtttcctggcactccctatcagccacccccacactgcaacatccttgaatggtttcattattttttcttccccttgattctagctcatttcaattattttcaaagtatataaaacatcaataaaatagaacttgaaaaaactaaaacaaacaaagctatatacactgacctaggaccatggcagattatgggccatccctggttgctgaagttttcatgcagagattgaatgaacatctggcagggatgcaatataagcagtggctgaagttatgtcctagttctagggcaaagaagagcctaagcaaattccaggtaataaataaggggagcttgttccttcctgctgtactccttagtgttttcatctaggacatcacaccatgtttcaggaagattaattgtggtgaataagatcattcctgtggtttcttccagatgggggacccaaaactttgtctggtctttgtaaccagaatattaaactgcattctcttgtaagttgttcataaattggatttatagaccctcttaaaatctaataaaggctatgaaccgtctccatccggacaaaagaacataggcacataaactaaaatgtgagataatactaggatattcagtgaccgtctgaagcctatcagtggatccccaaagtgaataactttggttgtagacccattgtattaatccgttctcatgctgctaataaagacacacctgagactgggtaatttacacaggaaagaggtttaattgattcacagctccacatgaccagggaggcctcaaaatcatggtggaaggcaaaggagaaccaaagggatgtcttatatgatggcaggcaagagggtgcatgcaggggaactccccttcataaaaccatcaggttctcataagacttattcactatcacgagaatagcacaggaaagacccgcccccatgattcaattacctcctgctaggtccctcccatgacacatgggaattatcggagctacaactcaagatgagatttggatacacaactcatggttggtgtatgtctatggagtagggaaagagaaaccaagaattagcaagtttggggcaactgcttaaatataagccaaccatcaaaagttgactccatctttcattctttgattatagaataaaatagtttgccaaagcacttaggttcactcataagagagatgggatatgagtacatagatgctactaaacaaattagtcacaaatgaataattcaggaaaacccatctgctagactgagctatcacataaagtgggaggaagcttgtgcccttatgtttatgaactgtagggctcttgctgagattataaaagtcatttcaacagcatgctccttcaagtaggtacaggaattaaaataatatcaaggaggtgataccgtggtatgctagaaagaggacaagattggaagcaagggtcacacactctgtttcttcaaggaccaagtagggacaataaggtaaacaatacttttgaggaagatgttggtgcctggagaatcacgttcccaacttctctctgttcaacttcataaaacacagtgcttgatccatctcccaaaagagcatcttcagtaagtttttgccatctatagagtcagacaactgcaggttgagccccaggtctgcctcttattagtggcaatgtaccataaccaccttgaggcttagtttccttctctgtaaaatgaggacaccacctatgtttaaacaactgtcagacaaatttgtgatattgtatctaaagtgcctagcactggacttggtaaatactagaagatgtagctatcattagagtcccaggatctagctgtgcacggccatctctctgaaaatgtataaataaatagtaatttagaaataaagtttatgaagacctctaaggctctttcaataactacaacatccatttaagctaagtcatcttagcattcaggggttgcctacccaataatatttaacctgtcaaggattgtgttacacacagagatgttctgcatgaggaaaaaaagaaacctcttacgtgcaggactctaaagggtgcagatccctaaaaggggttcctatcaactccataaacagttgatgcactggcagagattgactgggggtcggggggcaagaactaagtgagatggaacaaaagtgggcaaagtgtagtaactatttagaaacatctagcaaccttcagcacctttgctaaagatgctgctctctgctttgacagttcaaaggctcacatgtgtctcttctcccaggcagggattagggtgcagcaagcaagtcaggatatgacaagtgcaggattaaatcttacctttatttaaatttttgatattttgttcatcatgtattttttgcactgagttttaatacttttatataatacttattaacataatatttatgttgattactgagttttggcagctaccccttaaaattttttttttttttagacggagtcttgctctgtcgcccaggctggagggcagtggcactatctcagctcactgcaagctccgcctcccggcttcacgccattctcctgcctcagcctcccaagtagctgggactacaggtgccagccatgatgcctggctaattttttgtatttttgtagtagagacagggtttcatcgtgttaggcaggatggtctcgatctcctgacctcgtgatccacctgcctcggcctcccaaagggctgggattacaggcgtgagcaaccgcgcctggccaccccttaaattttttaccccagtacctaccctgctcttctcctctgaattttaagttgttgaaatataggagtgatatgtttggtgattcaccagaaggacttacaagacccaatcacaagttatattcataactaagatttagtacagcaaagaatacagagaaaaagcgcagaaaaaaaagatatgcattgatggagtccagaaaggtccagcagagacttctgaggtctttccttgtcagacacataggaatgctctctctctagcaatgaacttccggtagctatgtggtatggccctacttaggaacaccacttggagctcagagactgaggtctttgtggaagtaggggagtagttgtgacatacacttatcttgtgcaaccattgctacacaacaggccatggcaatagaaactcagaaccccaacaataaaaccaggggcatatcatcaatattgatgtgtatgcaaagcaacttgacacgccagcatggcatggtccatccctccaggaatatataacaaagtccgtcaatcaccaacacaaggaacacttggagggccacatttctagggggtggtgaagggtcaaacatagttctcttggagacacacaagaagaaagcaaccagacctgctgcattaactcttttctcccaaggagtcacgtggctaatcacaatatcacctttattataagtagtcataatgctacactgtgctcattgaacaatgtggctgggatctatgtcaacagacttcctactattcccttaaagcctagacattggggtgacccacctgtgggagaatctggggctgcaaagaagaaacttacctgtgcaggtaaaagaggtattgttgctttgcacaactatcaagccccaaaagtgaggctatagtatgatggccttccagatctatctgggcaggtttagggcccacttcccat

SEQ ID NO: 97007 - DNA, 162499 bp, Homo sapiens
  misc_feature (1)...(162499): n = A,T,C or G
aatggcagttagagttttaactcagactgtggggccctggccaaggccagtggcctatctctcaaaacaactatacagggtttccaaaggctggcccccaggtctaagggccctagcagaaatggccctgttagcacaagaagcagataaactaacccttaggcaaaacccgaatataaaggcccccatgctgtggtaactttaatgactaccaaaggacatcattagttcacaaatgctagattaacctatgtgaaaatccccacataaccactgaagttcgcaacaccctaaaccccaccaccttgctcccggtatcagagagcccagtggaacataactgtgtagacgtgttagactcagtttattctagcaggcccaacctccgagaccatccttgaacatcagtagactgtgaacggtacgtggacaggagcagcttcaccaaccgctgcaaagtgactctgaagaagacgacaaaccctgctccagtcacacccggaagctgactggtccacgcatggccaaagcatgagaaaactcatcgcgggactcattttccttaaaatttagacttttacagtaaggacttcaactgaccttcctcagaccgaggactattcccagggtatacaacaagtcactgaggtaggacaaaaagttgctgcggtcctattattttgtggttattataagtgtactggaactctaaaaagaacttgtttggataatgttattctatacaagggtatgtagcccaggaaatgaccaacctgatgtgtgttatgacccatctcagcctcccatgaccacaatttttaaaataagattaaggactgaggactggtgggggctcataaacgatacgagtaaagtgttagctaaaacagaagaaaaaggggtgcccaaacaagtcaccttaaaagttaatgtctgcgctgtcattaatagtaataagttaggaataaggtgtggttgtcttaattagaaaagaggctatatggcagaaaataagtacatctgtcataaattaggactgtgtggaaataaatataaatactggtcttgtgtcatttaggccacttagaaaaaaaaatgaaaaagatccagtccaccttcagaaaggaaaaaatggcccttcctgtactaagggacaatgtaaccccttagagctagtaataaccaatccccttgatcctcgcaggaaaaaagaggagagtgtgaccttaagaatcgacggggccggactggatcctcaagtaaacatcttagttcgaggagaagtttataaatgctctcctaagccagtgttttaaactttctatgatgaactaaatgtgccagtaccagaaattccaggaaaaacaagaaatttgtttttgcaattagccgagcatgtaacccagtctctcaatgtcacttcacgttatgtacgtggagaaactgtaataggagatcaatggccacaggaagcccaagaattagtacctacagaccaagttcctgatgaattcccagctcaaaagaatcaccctgataatttctaggtcctaaaagcctcaattattggacaatattgcatagctagagaaggaagagaattcactcaccccgtaggatgacttagttgtctgagacagaaagtgtataatggcaccacaaaaacagtcacttggtggagttcaagtcacacagagagaaatccatttagtaaattcccaaagttgcaaactgtgtggacccacccggagtcccaccgggactggacagcccccactagattgtactggatatgtaggcatagagcttatgccaaattacccgaccagcaggcaggtagttgtgttactggcactattaaaccatctttcttcctactgcccataaaaacaggcgaaatcctaggcttccctgtctatgcttcccacgaaaagagaagcatagctataagaaattgaaaacatgataaatggccccctaagagaatcatgcaatattataggcctgctacttaggcacaagacggctcgtgaggataccagacccccatttgcatgatcaactgaatcatacggttacaagctgtcttaaaaataatcactaataaaactggcagagccttgactcttctggcccggcaataaactcagatgagaaatgctatctatcgaaatagattagctctcgactacttgctagcagctgaaggtgaggtctgtaggaaatttaaccatactaattgctgcctatacatagataatcaagggcaagtagttgaagacatagttacagatataacaaaattgacacatgtgcccgtacaagtgtggcatggatttgatcctgaggccatgtttagaaaatggttcccagcactacgaagatttaaaactcttataataaaagttataatagtaataggaacctgcttactgctcccttgtttgctacctgtacttcttcaaatgataaaaagtttcatcgctaccttagttcaccaaaatgcttcagcagaagtgtactatatgaatgaatcactatcgatctgtcttgcaggaagacatagataagaaaatgaaagtgaaaactcctactattgagtgagagtctcaaaggggaggaataaggcaggagaccacccctcatattgtcttatgcccaatttctgcctctaaagaaagaaaaagtaaaaactaaaaggcagaaatgaaatccacaagcagacagcccggccccacaccctaggcctggtagttaaagatcgacctctgacctaatcagttatgttatctatagattacagacactgtatagaaaagcactgtgaaaatccctatcctgttttgttccggtctaattactggtgcatgcagcctccactcacgtaccccctgcttgctcaatcgatcacgaccctctcacgtacacccccttagagttgtgagcccttaaaaaggacaggaattgctcactcggggtgcttggcccttgagacaggagacttgctgatgcccccggccagataaaccccttccttcaactcggagtctgaggagttttgtctgcggctcatcctgctacaggctcattgcaagttccgcctcctggattcacgccattctcctgcctcagcctcccaagtagctgggactacaggcgcacaccatcatgcccagcatttttttttttttttttttagtagagacggggtttcaccgtgttagccaggacggtctcaatctcctgacctcatgatctgtctgccttggcctcccagagtgctggaattacaggcctgagccaccgcgcggccattttcaattttaaaaaacttttttattacagaaatgttcacatatacactaaagtagacaagctaatataaagaatgtaatgtatttatgaggtagtttcaagttatcaacccacattccccacccctacattttaaagtaaatttcagtgatgtcatttagtgtacagatagttgcctagggacctttaaaatttgttctttcttttttctttttttttttttttttgaatcggggtctcactctgtcacccaggctgcagtgcagtggtgcaattatagctggctggaactacaggtgcacgccaccatgcccagctaatttttaattttttttttttgtagagacaaggcaggggggtctcccttttcttcccaggctggtcttggactcctaacctcaagggatcctcctgcttcgacctccaaaagtgctgggattacaggtgtgagccaccatgcccaaatttgtacattcttttggtgtacatataagaatacatttgtaagataaattccaaaatatgaatatcttgggtcaaagaagagctgaattttacattgatagctattgcccacttgttctttacaaagcgtgtatggatttatactcctatcaacaataaattagccaggcatgctgacgtgcactcgtaaaccctgctattcaaaaggatagttgaagtccaagagttcaagaccagtgtgggtaacatagagaggcctcctctaggggaggaaaaaagggtttccctatatcctcatcaaaacaatatatagtcaaacttttcatctttgcatttgtgaaaaattgtattttatttttgttttatgatactttaagaaatcatttgtatttttctgtagaaacctgtttttctctgagttgaacatttttgtactgatttttttaataattagaacttttttaataatttagaactttttgtcatacattttacaaatatttttcttggttggggtttgttatatttatttgctatgcagaaaatttagatttctatgtagttacatttatcaatttttatttatttatttagagacagagtcttgctctgtcgcccaggctggactgcaatggcgcgatctcggctcactgcaacctctgtctcccaggttcaagtaattctcctgcctcagcctcccaagtagctgggattacaggaaccccgccaccacaaccggtgaaatttttgtatttttattagagacggggtttcaccatgttggtcaggctggtctcaaactcctgacctcaggtgatccactcacctcagcctctccaagtgctgggattacacgcgtgagtcaccgtgcccggcctacatttatcaatttttaattttatggtttatatgctctttgaaaagtctctcaccactccaaccttacttttgtttttttcccttgttttcttctggtattttcataacctctctcttttttttttttttttttttgttttttgaacatttaactatttgctttgtttggaatttactttcatgtgaggacatcaaatagatccagtgttttcctccgacatgcctcgactggcaggagaccaaagttttcattctattactagagagtagctatagttacagaatcaggtatcctgagagagatcatttatgcccaggatgaataacttgtcttatctattaaatctattaaatcctttggagatttcacttttttttttttttttttgggacggagcctgttacctaggctggagtgcagtggcgcgatctcccagctcaccacaagctccgcctcccaagttcaagcgattctcctgcctcagcctctcgagtagctgggattacaggcatgtgccaccaccacgcccggctaattttgtatttttagtagagacggggtttctccatgttggtcaggctggtctcgaactcctgacctcaggtgatccgcctgcctcagcctcccaaagtgctgggattacaggcgtgagccactgcgccggccccaaaatttcaggttttgatagacggaatgggtgaagaaaatgagagctagcaaggaagaacaggatgcagaggcaagactggaaactctccaagaaaggttaacttttcttaactcacaagttaaacaaaggctgcaggctccatgcggagctcaggcacccagcggtgaccgatccagaccaggtcctcccggaagcccggcctgcccgacagagccttaccacagagccccctcaggcgtcctcgccaggacggggcggaaccctgtgtagctcccacccccgggacgaaggccgctgccagggccgcgcagccacgcgagtggaatcagaggagcctcgaggcaaggagagccgggccccgctccctgcgcccgtcaccgccatccttgttgtagggaactcggcccccgagccgccgccgcgctccgtgggctcccaatgagcccctaccccagccacccgctgcgtttgcgccagcctcccagactagcctggggtgctgaaatgggggcgggcccgagccacgggttggggcggggtctgatgcgcgccccgccccgcaacgccccgcccccccgcgcctacctctccagtccgcgcccttcggcgcccgccccgccagtccccgcccctccttgcccagccgctcccgcccctcccccgccttcccgcgcggcccgcctcgccttcccccccctcccgcgcccccgcgcggccggcccctggccttcctccccttcctgctccgggcccgccagtagccggccgcggcggcgagggactaggacgcggctggagcggcgccgggagacgaggggctgagagacggcggcggccgaaagcggagagatgctgggcgtggcggccgggatgacccacaggtacgggccgcaccgcgcggcccccgccacgtccgccccgcagctcccggcgggccttcgggccgggccgggccgggcctggcgcgggcgggcggccgggctttccccgcggcctcccccggtcggccggagccccgacccccagcgctcgggtggcggcgtggctgcgtccgggcccgcggaggagacggctgctgttcactcccgggtgtccgcggtggcacaggcgctgacgccgccccgctgctccgagagttccataagacaaatcagtatttgccgagctaatcatttatcttctagcagtagggatcagcgggtcgcagacgtcttggtctcaggacccctcttgggactagaggacctggaatggtggctatctccatagactgtactagaaaggaaaaccgagacactgaagttactattaactcattgaataaatccgtggtatgttaacgtacataccacatttttatgcaacatagggttttgctaaaacaaaagagttcgtgggacgactggcgtcctttacagtttgcgaatctcttgagttgtctgacttagtagagacaactacgttctcccatctcctttgcagttcagtctgttgcggtatgtttttatatgaagaaaatctgatcttacacagatgtgtagttggaaaagtgagtactgtcttaatagctgtttcagataattatgggtattctttattactacaccaaaactacgtaagtggaagtttctcaaaggctggtttggacgtggaatctgaagctactgtcagcggacttttcacacagtttcgttaaaattccttggtctgtcttgcagtttgaatgcagctaaagctcctgtcagtggcctttgcacacagttacgttaaaattccttggtctgtcttgcagtttgaatgcagctgttacccattgtaacaccatatatttgtcgtttggaagatattggctcactgagtttggcagatctcaagctgacgcatttcattaatagcgccgaataacattcgttaccatcgctattgatttcattaggaaagtctttatgttaaaagccgtcagatacaaggtggtgtttacaagttttccaaaattctcattttcggttgaaagcttgctttttatcattgggagcaaaatattgtcaattgttttcctcaaagtgacagactcactttgttcagtttcaaggaagtgtccggcaatacaggtttaaataaccctagtttgtcagttgttctttcccgtaaaaatggtatttcatgacacaagcaagttaattcagctcatcgctctattacagaagtgcacgcctgccatttggtcacaagtaacaaaaaagagtcaaagctcaagatttgataacaataatttgtactccttcatcatggacttttttccttaaaaaaaagtattgactagtaagttgatataaaatttaaagtatttgtgagatattaagaataacggatatgtagtgtaataaaggagataatagtttccttttaagaccttcaaacctctctggtccagtgtctctccgcatcctatccccttcccatcctgaatttaccattagtaatttactttttggagggagagtaataagttcattcaaattattgtgcatccgtaaccatcatacatgtccagaaatctttatcttacaaaactgaaactctgtacctattaaacaataattctccattcccctcctcccgccagtccctggcagccatcattttaatttctgtctatgactttgactactgctggtacctcatatctcatgtaagtggaatcatacgctatttgttgtgcatgtcatagtttgttcctttttgttgctcagtagtgctccatggtatggatgtacagcagtttaactgttcacatgtttgaaggacattcaggctgttagttttgggctattaagaaagctactacgaacaaatagacaggtgtttgttgttgtttttgagacagtgtcttgcttagtcacccagactggagtggaatgcagtagcatgatcatgacttactgcaccctagacctcccaggctgaagcaatccttccacctcagtcccccaagtagctgggactacagacacacgccaccatgcctggataatttttgtatttttttggtagaaacagggtttcgccatgttgtccaggctagtctgggggtcccaaactcctgggttccagcagtccacccacctcagcctcccaaagtgctggaattttagagccactgtgctcagcctgtctaagttttatgtgaatgtaacttttccttttctgggataaatgtccaagagtgtgcaattggcaggttgtacagaaatcgtatgtttagttttttgagaaactgacagtttttttccagcatgactgtaccatttcacttaaaaagtgaaattgacattattttcctgtgagtacataaaggtaaagaattcagggacagtaccacggccctctttmgtgctaagcggccagcagttgtaccgactgttgtttttgcactatctgtgtgtcaacacagtccacaatgctacagtgacttcttaggaatatcttagtatgatgaaaatagttttgatctctcggatcccttaraaaggtcttggagaccctcaggagttcaaggccatactttaagaaccactgttaaagacataatcctaaatgatgaaggatatgcaggtattggggatatttaaaaaggaacaaatacaaggtttctcttaaaattgctcttgaatgcttgtggtagtgtgtgccttgtagttttggctagttttagtaggatgtaataactaagacttggaccaccatggaagaagcaactttctgcctttcaggattttccctgataagaaaatggccagtgccattatgaagagggacaatgccatgggcctaagtgtattcacacttttcagtgctctgtgcctgtttgtatggtgagaaaatcgaactgttgatttttaagaaagctaaggaaagtttggtggtacaaaagatcatttcagttctggtggttccggtttttgcaggcttagagaaaactgtccatcaggattgtgctgtcttgattttatttgatcattcccacccttttccctttgctgtagccccttgacctgtctcctgggcagttctttcctttgctaaatgtgagtacaacaagtaggctttcctttcctcctagagagggggaccttggagcccctccactgggtcagagaaacttccatagctgcagcagatcagtaacaggagagccgagctttactctgaaagcctctattttcaataatgttgtgtttgctctttggataatcatttaaataaataaacctcagtataggtcatgttcttacctaggtttgcacttaaatagaaggaaaaacatctcaaaccattttgttagttttatagttctcgtaactacactttaagctgtggttttccacccacagggatgtcatctacattatatgctggactgttgccacattgtcttccaaaaactttaattttaagacacttgagaagcaggagctgcactacctgttgccatatactgtgcattcttcagcaacagaggtttccttttcactctttctgatataatctcatctcttttatttgatcatatcacacatttccaccctggagcttactgcaggaatgagtaagggagtcattttcctgcatcttttttcacgttggagcacgttttggagcttgatgagtcttcagtgacatttaacagtggggcgggacagctgcagataaagcaagtgctgaagagtgcattctgtgagaggtaggaagaaaggtgaaggcagtagttcagctgctgggagtatgtgcttggcagtgggaggcacgggactcagcatcagcacaccaggaatccagggctttcaggatgtctgagtagcaggcaaggtaaagcaagataacagacaacatgcatttacaagtaatgtttacacatactttccctttctacaaaaatggaatcatagtcatactattctgcaattgctttttttagtattaaaaaagttacgggaaaacatgcaaaacaaaatttactattttaaccatttttgagtgtacagttctgtggcattatgtacattgacgttgctgtgcaaccatcactacccttccttccaagaactttttcatcttcccaaactgaaactctgtgaccagtaaataccaactccccatttcttgcaattgcttttttacttcaacaagctgtcttagagcggtgtatctgggtttaccttatgttttttaaccttagttttaatggctgcatagtatttcacagtgtacatgtgatatgatttgtacatccagtccttgactagtggttatttgggttctattttttaattatcacaaacactttgaacatctctgccagagtgttttttgttttgttttgtttttgagacaaggtctcactctgtcacccaggctggagtaaagtggtgcaatcatggctcactgcagcctcaacctcctggggtcaggtgatcctttcaccttagacttctgagtagctgggacaacaggtacatgccactatgccyggctaatattttgtattttttgtagtgacagggtttccccatcttgcccagcctagtgttgaattcctggcctcaagcgatccgcccttctcggcctctcaaagttctgggattacaggcgcgagccactgcacccagctaccagagttttcatagctttctgagtgtagagttagtatgtgcatgagtgtttgggtccatgttctagtcctagttctgtcccttcatggctctttgactttggccctgtcagygtctttaagcctcagattcttaatttataaaataatcccacctgtctcagaggttgttgtgataactaaatatgaaggcaaatgcaaatatttctgaaaggataccgatgaaatttttagtgattgttgcttctggagagggagtctaggcacctgagaatccaggatgagagggacattttttgttgtatagctttttgtactgttttgatttttaaaatcgtgtatgttttcatttttaaaccatttaacaccatgccaggaacatagtagatgctcaatgaagtcatcatttcccatcatcctggttcttttcctccrgacttatactgctgctaatggcacctaacatggttgcttttgtttcttcctgtccttccctccctatagccaccttcttgctgagttcttaccttcgaattttctcttgaatccatcgttttcttttttcactcctttcttactgatttccttttcaccctggttctgaaaatctttcaaatgaacataagatgatagtattaagactgggaaagacttgagagaatgcagagccagtgtcctgtggactgtaaacttattccaactggcttgaaaaaaaaaatctatgcacatactaagtgtttgaagtggaacaaatratgttttgtgaatgtttctaattttcatttaacaggtgataaagtacagattcctttttttttttttttttttttttgagacggagtcttgctctgttgcccaggctggagtgcagtggcatgatctcggctcactgcaggctccgcctcccgggttcaagtcattctcctgcctcagcttcccaagtagctaggactacaggcgcctgccacaacacctggctaattttttgtatttttagtaaagacggagtttcaccgtgttagccaggatggtctctacctcctgaccttgtgatctgcccgcctcggcctcccaaagtgctgggattacagacttgagccaccgcgcctggctgataaagtacagattcttttaaagggtttgtggaattcgtggtagtatttatatagtgcatgctttatctgttaacgtgctaaaaagacaatcatggtgacatgaagatctaagaaaatttatttaacatttaaaaagtgggtttatatgtgaaaaagttggaacctactgaactcatgcactttagtgggtcccctgcattagccctttatttaaatacactgcttctttattttacaggacaggatttgcctagaaggtaaaatagtttattcaaggccgaaagtcagttaacagcagggttaggaatacagcccaagatgtggttgtattgtggggtctcctctgctatattacgttggtttgctctgttactttattcacattgcattgttacagtttgttgtgtgtatatattttatctttttgtctacagtatagagtaaataccttgaggaccaagacctatagctgagcccattaacatagtacatttggaaatgtctgaatgaattatggatattggcccagaattgttctattacaggtgtcctggatgtcagtctctttcaagtgattccttttgaagaacacttcagaagtgttgttgaagacctggtattcctagccacatgtgctggtgcttgcaactttttcctccccagagagatcccttcctattgacgggcttccttaccaatgcatcagctgagtgacaaatgttaccaactacttaaacagatatgtttatttctcattggtaaatgtagctgttgttttgtttttgtttgcttacttttaaagctgggcacattgctgtccattttaaaatttgccttgttaatacagtgaggaagggagggagaatggacattgggtaggcagttgcagcttttgccacagctagctgtttctccttctcagtgcagtagattcaacaggatttgtttttctgtgcaggtacagtgcaggtgcacctgactgatctgtcatccatgttggtttcagatttttctaaagaactactttggtcacatgttttcaaaatattgagaagctgcttattgcctgtcaagtaggtccaaactccagcgcctggaatttaaggctgtttgtgatctggcccaacccatcttcatagccttgtcacacactgtttccttagcctttgtctctctaacccactgcctttttctgaaaatgatgatttcctgcctcagtgctgttcatgcccttctctgggcctggaaaatcatcatcttttgtgttttcttggcagctggracaaaattgccgcttctctcataaaataacgaattcctggagcattaatttagcccccgctgtgtagtagggaattagggattcagagctttttctgttttcccaaagcattttgaattcttttttggtaattaccaatttctgttttgttttatagttttttgtatatatgtctaagcttttctgccaaagtgtaatctctggaagtaaaggaatgtcttaatcaaatttgttaaatatccaaagaaaaacaagctgcacagtaggctttatttctccttttatttgttgttagtgaatcgaaaagttcagggctagctctgtttagtgtctttgacgttgtttgaataaattcacaaaactttgagtaaaacaggatcattttctttggtttagcttgactctacagtgtattacagactgctggcagagacccaacatcatgaaacatttaggagaaattcagatgatatttaggcatccttgtttagtttcctcctaggccactgttttggaaactcggttagtcataaccaccttctcttaattacctacttccacacaaataccttaaggatattgttttatataatcttaccatcacagccacaccacgaagtaggatctttatatctattttacagataaggaaaccaagctcaagaggttaagaactcaccaagtcatacaattagtgacagctgggattcataccgaagtgccctgtagagccctgtgtctcctcacttcatggcactggtcaagaagaggtcacagctcgctaattgtttttccaagtctcaaggctttttcttggcatgtccagacaacctatccagttttactccctcctacccttacgcttatatcatcttattgccaaccataccacagtccttctttctgaacttgatttttgttactctgctaggagtagcctttccttttttaagggggtaggagttcccaagtcttacaactcaagtcccagcttaaactcctctgtcttgaagatgacttccttggctgcttcaacacctattaggctttcttttcttgacctcccggagaatgcattgggtaagattcagttctytacccaaatttaatgtgtctgtatttgtgtgcaacacacaaacttcattatttttatttgaactcttggctgtgcttgcatatgtgaaagtgatatttacaaattttggaacacatctttcaatacaatttgtgtccattatatacactgtactatgctatagggcatggagtatacagctgtaatagagtgaaggacacattgtctaatattgtagctttgtgtgtacaagtcccataagagactgtttaaaaaagtcttttagaaatttcactgggcatggtggctcacacctgtaatctcagcactttgggaggctgaggtgagaggatcgcttgagcccaggagttcaagatgagcctgggcaacatagtggtacctcatctctacaaaaaattttaaaattagctgggcatggtggcacgtgcccgtagtcctgtggcaggctaggtctcactaatgcaggcctccataacarctgtttcaatactgactgactggttaagtgaaatagtaaaagctaaacaagtcagtgcccttatcaaaggctggagtgtaacagaaacctaccaagagttttgcctaggcctttcctgggccttaaagcatgagaaaataacaaaagaattcttaacaggacccttttaggattaaacaaattttattgtgggtctgaaaaaactccccaaacctctgtgatttagtaggagasaagggtaatcacctcagcacctggacccatttagatgaagtaaatctactgaggatccagaagaaggtctccagcactcagaccttagttatagattaaaagaagttaatcacttacgtcttcaggtgaatgcacacttacctgtagacatatagcttagaaggtatataagctctggaaaactgcaattttgagttggtctggtgataatttccaggccttctccctgtaactggttgcagaaataaaaactctcttcctcccctgttcatctgcatctcgttattgggccacgagaaatagcagcccaaccctcagtttggtccaggaagagtcccagctactcaggaggctgaggtgggaggatcacttgagcctgggaggttgagtcttgccactgcactccagcctgggcaacacagcaagactctttctttctctgtctttctctccctctctcttttctctcttctctctttccctgtctctctcaaaaaaagtaaaaagaaatttaaaggaggaagtggtaatttgttagtagttattatagattagttgttacttattgaagacattaggaccagtcaaatattattggattcttagcaggtagaggtgtattggtcatcrtagggttcaaccagaggcctggcttatttggaatgttgtagggaaaattcaagaatcagggagaacagtgctctcaaaacatgggctgcagacttctaatggcatggggttcatgctaaaaatgctgattgctcagcctcatcccatacttcttgagggatgtatgtcatgaaatctatgctttttaattttttattatggaggatttcaaacatatacaaaaatacagagaataatatgtctctgtgtgtttctgctcagcttcaacaattattattttatttatttatttttgaggcgatgtttttgctctgttgtccaggctggagtacactggtgctcttggctcattgcaacctctgcctcttgggttcaagcgattctcctgcctcagcctcccaagtagctgcgattacaggtgcctaccaccatgcctggctaatttttgtatttttagtagagacgggttttcaccatgtgggccaggctggtctcaaactcttaacctcaggtcatccacccactttggcctcccaaagtgctaggattacaggtgtgagccaccacactgggccagcctcartaattattgactgatggcaaatctttgactgaaggccaatcttttttcactcttctctcccctgtgtcatatcatagagattttaatatgtatccttaaaagataaggactcttcaaaaaactgtttaaacataacctcagcatcacacctgaaaaagatgagtagtaattccttgatatcatcaactacacagtgtttaaatttctgtttatcccaaacatcrattttattttgtggtttttctaaattgagatctgaataaggttcacaaatttgataggttgataagtcttttagtctcttttaacatataagtatacctttcatctttttcttttctcttgtgattttgttgttgctgttgttgaagaaattgcatggttatcttgaagaatttcctgccatctggatttaccagcttatatcctcagggtatatggtttaacatcctcatatatataattttgttgcccaggcaggagtgcagtggcttgatgtcggctcactgcaacctccgcctcccgggttcaagggattctcctgcttcagcctcccaagtagctgggattacaggcatccaccacctcgcctggctaattttttgtatttttagtagagacgcggtttcaccatgttggcctggctggtcttgaactcctgacctcggtgatccacctgcctcgcctcggcttcccaaagtgcagggattacaggcctgagtcaccgtgccggtgcatcctctattatattaatatattctgtaaattggtagttggatctaaaaaagcagttctcagttcttggtcttgggaccactttactctcttaaaaattattgaagactgctgtgtcttttggaaataggtaacttgtttgatcttaagggctcatagctggaggagaacttgcctcaggatgaatggtgccttgagtcttacccatatctgattcagatgcacctctttcataataaatgggaaaatgacagaactattttacctcacaggctgtacaaaaacagggacaggctggtttggcctctggaccccactatgcagactttcaatctggattattrttaatgcattgagggtttcaaagatggaaatattctaattgttattgaagacattgcaggtcctagctgctgtacttctaaaaagagaagccctccttaactatttagtaatctgatgatacaatctgacagattacacatcactcttatgttgttagcatgtaatcctgtctagtctcctacttaataatatgtgtattgccttagcatatatcactttagtataatactggttatagaatctgtgctccaaaagtacattgtctgtggtatctagatagtccttcacttttggatgctttaggtttacagagtactaaattagggttgaggtgtcactttctgacttggactagtgattgttttcccttgctctcaggctaccgcctttttttttttttttttttttttaggagacagagtcttactctgtcctcgaggctggagtgtgtgcagtggatcgatcatagctcactgtcaaccttgaactcctgggcttcagggttcctcctgcctcagcctcccaaaatgctgggattacaggtgtgagccacggtgcctgggccgccctcctactctgtaagtgcatgttgctcttgtactatgagcccctctggttaggatggcctctgcacttcttggaagtccactggaatggtgataacttcccactcatattaagtgatccctgttcattggctgattggcattccatcattaatgtttgggtcatttatagctaaaccagcagagcctagtggatcattctctagcgagcctgtctaatttgagtgatctttttttttttttttaaagacaatggtataaatagttttatgttaaatatcatacagactttgaaatgttcaatgaaagatagaaggaagataatctctaaagggcaaagtaagttgtttatggagacttctataaagcacctgtaaatcatttgggtgtcaatactgtgcatgttttataatggagaataaagyttccttaatgatgcttgtgtttgaagtataacgttttgcttttcagtaatggtctccctgactataattgtgtctataactttagtctgttacggaaaaaatgaaatggctgatagataagagttctgatttcattatgaggtaagaagaagggttgatggagttcattgggggagttgtggtttgaagttgtttaatgtaaattttgaataaaggttttaccttgcgctttggattgcaaaggtgcagttagactttgacttcaacacaaaactggtgtgcttccacacttactgatagtggtgttaaacttttcagttgctgggaaataggccaagtcctgttgtggattgggtggtggatagtcaggcaggacatccttagggattgcyctgctgtacccttcatcaccaagggatggtatagggcagaggtggaattgatgaggttgagggtgtctttctcttcaaacccttagaacatgatgcttagtgtctccagcataggtcagtttgctaactgctggctccaagagggtggacactctcttgggtgggatagttctctcatagctgggcccacaacacagatgcagaaagagacaggtaaaaatgacaggtgccaagcccataactagccaagagggactgttggcagtttgacttatgtcttctgtccagttgagatttgttctttgagtgtcctagaagctaaagcataggaatataggttaaaatttagcctggttcctcaggcttgtgttgaacgcctctttctgttattctaatgggaagtttcagaacaaaacaattattcattctccactttcaaatttttccttgatagagtgtgtggaggaaatggtgcccaaaataccagcatttaaggtcattgcctacattagaatatatcggttcccttgggttttactggattgctgtcagaatacttctttctttagaatacaatacggactttgtcatattgaagcatgttttagggaatatatagtagtcttaattagaatctggagatggagtaattcatccrtcaaatgagcagccttttgttttaggagtgtgggtagtgatatttttgcaatagccgtgaaacctttgtaaacatggctagagactggttttctctttttaaaaatgggttcaagaaagtaggagctttgtgactagccccatgaaatctggaaagctgtgttcgcacttagcccatttcaggtcattgaatgtgtttacatgactgaggataatgatgaaaaaatgtggttaaagattttaaaatgatggatatctaggacactaggttacctggttaataagatggatgagaattacaatgatataactttgaggtgggtgtaagggtaattgctgaaacaattttaacaatgtttgggttttgttttttttttttcaatgctggctaacccacatcaggaattgagaacttttttgtcttttgggcatttgccagatctatacaaagcatgaagcatctacagatgtctgtttaacacaattcctttatacttcgtaatggaatgttttaaccctgagcatgtggtatatactgtatgaaatgtactttgttttagacctgagttttccagtattcgtcaggtgctttccctttgggagtggtattcatgatgacagaggacgttggtgaagtgtagaatgtgatgcttaattttaatacagaactgtctattgagtttgatgaaaaacaaaacaagttccagcaattcctcaaaatttcagaggtctgttccatgctctccccaccagcccccctggcaaagggtcattttgggaccgtgagaacagacaaaaaccacatctctgataatttgctcattcatttagaatgctttctatgacggaagttacggcgataggttttggaatgtggagggtgatgggaactccaaggatataaggcatgggaactctacgaatataaggcttgggaactttttagaaatgaagttttgttttgcactgtcatgctttccaggataaagcattrctggagattagctgaacaaatgagatgaaagccaaaatatgcagttggatattttagataaattttgataagacgttactttctaagaatatagcacttttctacaaaaagctacctatgctttttgagatacttaaaaatctcatgctcatgggacagtgcattgcatatagtagccattcagtgaatacttgtcaaatgaataaataatgatgcgcagtatattttatttggtatatatggctttttgtttggtttagtgaagtatatttgtgggtagttgctaataagtaacttttcagttgacttgacattaaattagacatggattatttcaataataatgtacaagtaaagtrtttctttttttttttttttttttttttttttttttttgagatgcagtgtcrctctgtcgcccaggctggagtgtagtggcatgatctcggctcactgcaacctctgcctcctgggttcaagcagttctcctgcctcgccctccctagtagctgggactacaggcgtgtaccaccatgcccagctaatttttgtgtttttagtagagacagggtttccccatgttggccaggatggtaagtacagtgtttgctttctccattaggaggcaatgcaggaacaagttatttgatatgggaagaggttatattttagataaatgaagcttccagattactggattaaattttttagctgaaacattaatttttttcttacgaatttcctcaactttccatattaatatatagcttcaatactattaatcagaattccaagtggaattcttttggtaaaatggacagaatyattatgaagttcgttgagaggaataaacaggcaagaatagcaaaaagctaattattaagaagaaagacaaatggataaaacctgttagtaaaataatttgtcagtatgtgtcaagtttaaaatgatttgtaacttgtaatttgtaatttctacttttgttaatcaaatctaagaacgtgtggagaaaactgggtgtgagtagattttggtagcattatttatactaccagaaagtttgaaactatgtagataataaaaggatcacttaaaatgcctgatgatatcctagagtttagtgaaattatataatatttatcatatttattaaagctttgtaatattttaatgtcatgacatattattcagaaaaacaggatgtgaaactataaatatggtatgattagaactttataatgtttaaacataaaatgactaggaaaaatacaaagtgtttttttaaaaataaacagctggctgggcgcggtggctcacccctgtaatcccagcactttgggaggtttaggtaggaggatcgtgaggtcaggagatcgagaccatcctggctaacacggtgaaaccccatctctactataaatacaaaaaaaaaattagccgggcgcggtggcaggtgcctgtagtcccagctactgaggaggctgaggcaggagaatagcgtgaacctgggaggcggagcttgcagtgagccaagatcacgccactgcactccagcctgggtgacagagcgagactccatctcaaaaaaataataataaaaaaaaataaataaataaagcccaggcacggtggctcacgcctgtaatcccagcactttgggaggctgaggcaggcggatcacaaggtcaggagatcgagaccatcctagctaacacagtgaaaccccatctctactaaaaatacaaaaaaattagtcgggcgtcgtggcgggtgcctgtagtcccagttactcgggaggttgaggcaggggaatggcgtgaacctgggaggcagagcttgaagtgagctgagattgtgccactgcactccagcctgggcggcagagagagactccgtctcaaaaaaaaaaaaacccagctttaggccaggtgcagtggctcatgcctgtaatcccagcactttgggagaccgaggtgggaggattgcttgaggccagaagtttgagaccagcctgggcaacataacaagacctcatctctacaaaaaaaaaattgttttctaattcagctgggcgtggtggcacacacttgtagtcccagctgattgggaggctgaggtgcgaggatcacttgagcccaggaagttgggtgcagtgagctgtgattgcaccactgcactccagcctgggcgacagagcaagagcctacctcaagaaacaaaaacaaactcacacacagcttcgttgaagtataatttaaatrctataaaattcacttgttgcaagtgtataaggcttttatgtatttatacagttgcacaaccattacaacaatgctgtttgagaatattttcatcactccaaagttcactcatactatatatatataaatatatatttttatataatagattttatttataatataaatatataatgtattatgtattatatatttatatataactgtatattttatatttatatatttagctataatataattatatagttaagtatatatagtatatataatatatagttagcacactctatatacatatatgcgcgcgcgcgcacacacacacacacacacacacacacacacacacacgagacctctgtaattctcacaaatcctggacgttcagattgaaaatgatccaaggcatggttcctatatatatatgtatatatatgtatatatgtgtatatatatgtatatatgtgtatatatatgtatatacacatatatacatatatacactgtatacatacactagtatatatgtatatagtatatgtataatgtatatgatatacaatatacatacatacctatgtatattgtatatcatatacaatatacagatatatctgtatatatgtatatgatatacaatatacatatatacacatatactgtatatatactatgtagtatatatgtatacatatgtatatatgtgtatatacatgtatatatgtatatgtgtgtatatgtgtatatatgtgtgtgtgtgtgtgtgtgtgtgtatatatatatatatatatgtatatatatggaggaaccatgcctcagatcattttcaatctgaacgtccaggatttgtgagaagtacagaggtctctagtgtgtgtatatgtgtgtgtatgtgtgtatatatacatatgtatattgagagagttaactatatattatatatactatatatacttaactatataattatagttaaatatataaatataaaatatacagttttatacagtatatataaaatatacaatatataatacataatacattagttatatatactatatatactatatatactacacgtatagtatatatatgaaactatatatatactatacgtgtagtatatatatgaaactatatatatactataygtgtagtatatatatgaaactatatactatacgtatagtatatatatgaaactatatatactatatatacttaactataattgtatatagttaaaaatataaatataaaatatacagttaaatatattaatatataatagtaatacattacagttacatataatatataaataaaatatataaatatatcttatatatttatatatatacactatgagtgaactttggggtgtatatatatatattttgggtgtgtgtgtgtgtgtgtgtgtgtgtgtttttggagacagggtgttgctctgtcggccatactgcatgatcaccactcactgcagccttgacctcccaggctgaagcaatcctcccaagtagctgggactacaggcatgtgccaccatgacaagctaatttttacatttttttgtagagataaggttgcaccgtgttgcccaggctagtctggaactcctggcctcaagcaatcctttcagcttggcctcccaaagtgctggaattacagacatgagccactgtgcctagtccaatttaactataaacaccagaagtttcttcagtacttagtttctgaggcatagagatagattggggaaaatgaaggatattaatctgagaatcctttgtcacggccatatccaatgaaaaataaacgaagtttaatcaggatggctctgaagaaggtaccagtgcatgagaaatcactgtggacagtgatgggatgttaaagagaaaagcataaaaagagtcataattcatgtgggcctcctccttacataagagaatatgctgccactttctagcatggtcttccatgctctctcctggacacaatttgtagggttcaaggtttccttctctcactgcccagatgcagcctgggtgcagataaatatcttttgagggagagagttagtacttgtctggggctcactgccgtttgtgtgcttttaactgttggtcctttttaaaatcattgctccacgattgaagcaaatgacctttaactgttatataaacttggagagccagttgaggacagtgctttatgcttggcaggagtaagtgcgggtcataatagaagctttttagcagtggattctgggctaaagtttctctaggaaaggcccaggatcacacaatcccaaaatactagagttagaagagactttagagaactatccagctctctttcattagaaataatgatagtttttcattgacattcctattttgtggtcttctctttgcttggaaggtaaatcccttgctttgcaaaacactcttattagtgccataaactactaaggaacaggaaattccaaattgcaggctagtacagacccagacgagccttcccagaatctctggggaactggcttcaggccgtacacccccagaactgctgtgatgactctgttggacattagagtatatggaggagccatgcctgagatcattttcaatctgaacatccaggatttgtgagaattacagagktctctggtgtatggggaaaactgggattactcttctaccatacggagaacttcgaatgatagggacaaacatttgtgtagtgtttgatgatatagataggcatgattatcctcrttctcttttatttttttagataagcaaaccaagactcaggaaatacttgtttactcacatagttggttggtaaaatgacaaagctgatgttgagacctgggccctggaatttccgatcctatgcatttcctgtagcattacattttctctgggaaatccattcaatgttggggaacaccttgttattctgaagccaaggaaattgccaggagaggatagaagaggtggtggaggaatgacacctcttggtggggtcagtggtattgagatcctgtggaaaatctaggagatgctgctacttatttcctgtrtattcacttgatacctattgccctttacatcttcttcagtatgagccagactaacccatggctccacttcatcccagactctagagcctacactctattcccgaggastggtcaccttctccccctgtacttggcatggtgtcccattggggtagtgctactgaaggacagtctctgaagaagagtatcttccttattcttggggtagaaactcttaacatagatggggtgataaaatgcaagagatttataacagcttgccattagagctagagtatattatttatcaccattgattattttgccaaatgtttttgtttaaaaagcttcttagtttctggatgcctcagggtaatttgtcacctgcactattcaatatccgtgccattacagctgagaggagtgtgctggcctctaatgttcagagcgcagctggcaaccagcctgacaaaagtacatgacatgacgctctcaggaggcggccagacaccctggtcactaggggaggtgtgctctttaggtaagggacacacaaaccattgttgaatagctcctgtgtgcagagagggaccaggagcataatcattatctggaagcttattgaagatgtagaatcttgggccctatctatctcagacctamcaaatccggatctgtgttgtagtgagatcctctgggagttcatgtgcattaaagtttgagaaacacaggaatagtggacagtgctggctgcctatcagcatccatttcctttgtctttcctaataacgagatgcacattttcttcggttacttccccttcacccttagccatgagaatccattctttaagtaggtgagagcatggttttcccgtggtgactgtttatggtctagaggtatccacatgatctgggttgcctcagtcataaggaaagactttattttttgaggggggagggggaagcattttccttcacatccagaatgagagagcaaataatgaagcatagctgtgaccgtatttccactggcagccattctgtgaccttgaggggatcagtcttgaggtgagtctgacactgaagttgtcagagcagaaagacagaaggaacctgcatttttggttctggcactcacctgctggtcacaggatccaggcctggatctccctctgcctctcatctcatagttctgtgtgataataaattttcccatggtttatgccagtttgactttgggttttctgatttcctgcagctggaagcatcctagtctgctttggtaatgagcactctgagcacaaagtgctgtgtgcrtggtcctcttgtgaaaggcctacattctcaggtgctcctaggcttttctcctagtcttgtgaattgtgcttttaccctgtggtgattattccactgttcacatgaaagttggtggagggagaggaaagctataagggcagagagtagaattgggaggctgtcctgagggaaggcaggcttgcactcagaagtgctgtgtgctggactgtggggtgagccaggctgcagttggctggctgtggagcccactggctggagtgctggtccatgctttgctcctcatttggtgtttgaacctcagtttccttatctgtaaaatagaatcctaatgaaatagtggaggtagattggaaatgctttgaaaacttgactcttttttgcccggtttaattatcctggttttttttttccttttttgctatagcaaaatataaataacacaaaatttaccatcataatcatttttaagtgtataattcagtgacagtaacttcacattcacaatgcgattaaacaataactcccattctgccttgcccccagcccctagtaacttctgttctactttttgtctctatgaatttgcctactctaggtacgtcatataagtagaatcatatatttttatccttttgtgtcttgctaattttacttggcataatgtccccaaggttcatccatgttgtagctatatcagaattttgttcctttttatggctgaataatattccattgtatgtatatactgtacttgtttatccatttatctgttgatggacacgggtgattttcaccttttggctattgtgagtaatgtcacttatgaacacttgagtactgtgagcactggtgtacaaatatctgtttgagtccctgcttttaattcttttgggcatatacctaggagtggagttgctggatcatatggtaattctgtgtttaccttttaggacctgtcaaactgttgaaaagttaactcttatgttatttatattttcagacatagattggaagatggacttatgctttttctctttctctcctttccttccctcccttcctttgttggaggctgaaagaatgagggtcagtgatcaactcagtataccactggaggctatatgagtaaacagcaaactgttctcatgaatgcagaatgttagcaagctgacaactgcgtctgctgcccagaaggaatgctgagggcagtcatgccccaggcacagtgttgcttgtgattaggcaaatctgaagcctgttagcartaatgtgaacctgtgatcagtcaagcagctgaccaatcgttacctactcctccctgctctttctacccaataaatacaaaggctgtagaagctcagggctgcctttgctcactagaagcagggatccccctgaccccttctttaaaacagtttcttttttgttttcatttctgcgttcatccgccttcgttcagtcctgtagtaactgtcactacctacctacctttgttccttccttccttctcccctacccttgacatatagggtctcactgtgtctcccaggctagagtgcagtagagccatcacagctcactgcagcctcaacctcctgagcttaagcgatcctcccacctcagcctcctgagtagctgggaccacaggcgcacactaccgtgcctggctaatttttcattttttgtagagacggtgtctctctatgttgcccagactggtcttgaactcctgggctcaagtgttgctcctgcctcagcctcccaaaatgttgagattacaagtgtgagccaacacgcccagcctttttttcttaagactatagattttcattggttgagaggacttggtaattttaacatggaacttctgaactgaccattttataagatatcgaacataygatcagattcatattttaccctcattaatcaaaaaatagtaggaacttttttttttttgagagacctagtcttgctctgttgccctggctagagtgcagtggcacaatctgggctcactgcaacctctacctcccatgttcaagcagttctcctgcctcagcctccctagtagctgggactacaggtacgtgccaccacgcccagctaatttttgtattttgatagagatggggtttcaccatgttgcccaggctggtctcaaactcctgacctcaggtgatccacctgcctcagcctcccaaagygctagaattacaggcataggccaccatgcccagttggaattttctgtaaagtttcaaagatttaagtgaacatgattcttgaagttgttgatttgaaggtacccaactttgtgtgtgagaacaaattggtttatttctactaatragtacaatgttatctctatgatctgtgaaaaacaaaaggctgaatgtatgaaggggaaattatggatataaaatacaagatctcacagttctattaatactttctagcaaacagactatttaatacctaaaaattktaagtataggactatgaagaaagccattatgagaattcctgttacagtatctttgaaacatactagaaggtaattatagatttaaaatggattgccccttctttccttgaacttgtagtatcggttatatcagcccacctgaagatttgtgcatttttttctttttttttttttgagacggagtcttgttctgtcgcccaggctggagtgcagtggcacaatcttggctcactgcaagctccacctcgtgggttcacgccattctcctgcctcaaactcccaagtagctgggactacaggtgcctgccaccatgcctggctaattttttagtagagatggggtttcactgtgttagccaggatggtctygatctcctgacctcgtgatccgcctgcctcagcctcccaaagtgctgggattacaggtgtgagccaccacaccgggacgatttgtgcgtttttatagtactctaaatgcctttgttgcactggcatttctcgtcttttgttagatgtgaataaattgacagtctatagagtgcattggagacaaatatccttttacatcaactgtgagaaaacttttaagaatatatttatttatttatttttaatttttttttttttgagatggagtcttactctgtcacccaggctggaatgcagtggtgcgatctcggctcactgcaacctccgcctcctgggttcaagcaattctcttgcctcagcctctcgagtagctgggcctacagttgtatgccaccacacctggctaatttttttgtttttggtagagacggggtttcaccatgttggccaggctggtcccaaactcctgacctcaggtgatccacccgccttggtctcccaaagtgctgggattacaggtgtgagccactgtgcccggccaagaacatatttaaatgtacaaaaataactcttcagaaactgccaaggcgccgggggcagcttctgattcccaccgttagggcaggctgagcaaggagctaagccttgcttagctaagcctcacactaatatcacttccacgaaattattctgtatgggataatttatatacccttagacactggctttaattcagagtttgcacataaagttctctgtagaaggctatgaagatacataatcacaatatcccttgacatccatggatgtgagaaatgctagcctggaaaatgtgagaattggttcctgagaattkttaaatgtcctcagcgacattaaaacacttcaaaataacttgtaaaaatgtgttgttctagagtgatttgcattacatgtaattttaaaagtttattagtctgtaaatatgagttgattttaattgcctgtgatacataattacttatgttccataaggagtaagaaaataagactttctcattgcggtcttataatcaactctcttaatttttaaaaactattacttttagtttgcagcacagtgctaggtttatattagaaactataattatgaagaagcatgataaaaatctaatctctttataggatcacattcttcacatttaaaagacatttttctattaccctctccctcaaatgaaacctctgtgaaattggaaatattctgtcttcgatgtgcttgttatagaatctatatcagtcttcaacatacatttgtgggaagtgtgtggcgtgtgtaggtatgtgggtgtgtgtcctttcataatatttttagtgagttgatcaacatttaaactggcaaacaattataaactggtttgacactaaagcagccttaaaaactgttatctgaaagtcactctgagcacaaatatttataccacggactgtcgtaggtgctggggagtcagcagtgaacaagtggagcccaccckccagccccaccacctcccatggagtcctgggttctccccacgttggagcatcctttgctccctcatttcctgcctgaggaagaggtggtggagaatgccttcctggtgcctttcctgcggggagttgttcagctgtgtattctcagggccagcagatgatgggccacagggtgggtgtccacaggtattttttgagtggatgatgaggttgctgtcacctctcaactggactgttttattagcttcctaacgagtttccctcactgcccctcgccagctccagtctattcttaacacagcagccaaagtgatcttgttaaaatttactaagtcagatcctgtcagtctggttcaaagccctccagtggatctccattttaccctaaggaaaagccgtagtctttagagagacccatgaggccccacagtgtttggccccctgctgccctctgatctcatctcctactattcttcccctcattcattcccctttatccacgtctgtcccctaggtgtttctcaaactcaccagcggggcttccatcccagaggctttcaccagctgttcctacccaaagactgtggcagagctcactccttcacctcctctgggaggtcctccgtaactgtcctatcaaaaattgccctgacactcctgattgccccctccctgcttgcttttctcctgacacttagaatataaatgtctctttgttcactgctaaacacaaacacacacacacagcttcgatggatggatggatggattttaattttgttgtcatgtctgtccttactataagcctcaccatggcaagagtttttctgttttgttcatcgtatccacaacagctggaagagtgcctgttagtgtacccagttaatatttgtcaaattaattttaaaaactcttaaccagcatttctgcctgaagtatacttttagtagggtcagaatgatgccttctgtgtgtctgtgtgtgctttgataaataaccattggttttgccacactagctcaatgctaattggtctgattctgttaccaatgggtcagaagaaaggttgagcccctgtctttcctgataaacccagtagctcagtgaaaaaaatcagctgcatttgtcatttggctgcaaagtgcaaacaccagtacagaccttactctcagttgtgttggtatttgtcacttaacctgctgttggaatctctcactctgtgggtattttgtttgagaaatctccaaactgctttccacagtggctgaactaatttccattcccaccagcagtgtatagtgttccttttctctgcagcctcaccagcatctgttattttctgactgtgcttaatctgtttgaatctctgtttaacacagtgtatcttcataagtggcctatgaagtaggtactattattagcccatctgacagataagaaacccgaggtttagaaaggctaagcagtgtgatcaaggtcatgtggtaaattaataataatttgtattgaggcagaaccaatgcagtgtatgtgtgtgtgtgttaggggtgggggtgtatgcatctatgtgtgtgtagatggagaaagatatacctcattttattgcacttcacagatactgcatattttacaaattgaaggattgtaaaaccctacgtcaagcaagtctgttggtgccatttttccaacagcatgtgctcacttcatgtctgtgtgtcacactttggtaattctcacaatatttcaaacttctttgttatgattatatgttgtggttctctgtgatcagcagtgtttttttttgttttttttttttttgaggcggagtctcactctgttgccaggctggagtgcagtggcgtgatcttggctcaactgcaacctctgcctcccgggttcaagcaactctcatgcctcagcctcctgagtagctgggactacaggctcatgccaccatgcccagctaatttttgtactttgtagtagagacagggtttcaccatgttggccagaatggtctcaatctcttgacctcgtgatccacccaccttggcttcccgaagtgctgggattacaggcatgagccaccatgcccggccagtgatcagcagtcttttatgttaccattgtaattgttttgagataccacaaaaatgcacccaaataagatatcacactcaattgataaatgttgtatgtgttctaactgctatacttactggccatttgccgatctctcaccctctccttgggcctccctattccctgagacacaacaatattgaaattagaccaattaataaccctataataatcttttaagtgttacagtgaaaggaagaatcacacatctctcactttaaatcaaaagcgagaaacaagtaagcttagtgaggaaggcatgttgaaagccaagacaggctgaaagctaagcctcttgcaccagttagccaagttgggaatacaaaggaaaagttcttgaaaaagtgctactccagtgaaaacacaaatgataagacagcaaaacagctttattgctgatacagggaaagttttagtggtttgaatgggacataaaaccagccacaacattcccttaagtcaaaacctaatccaaagcaaggccctaactcttcaattctatgaaggtggagagaggtgaggaagctgcagaagaaaagttggaaagttagtagaagttcattcatgaagcttgaggaaagatctccgaaacataaaagtgcaaggtgaagcagcaggtgctgatgtagaaggtgcaccaagttatccagaagatctagctaagataattaatgaaggtggctacaccaaacaacagattgtcagtgtagacaaaatagccttctgttgggagaagatgccatctaggactcaaggctggagaggggaagtgaatgcctggcttcactgtttcaaagcctcaaagggcaggttgactctcttgttaggagataatgtacctagtgactttaaattgaagccagtgctcatttactattccaaaaaagccagagcccttaagaattatgctaaatctactctgcctctgctctataaatggaacactgaagtctggatgaccacatatgtgtgtgcagcatggtttcctgaatattttaagcccactgttgagacctgctcagaaaaaaggattccttttaaaacattgttcattgacaatgcatctgatcacctaagaactctgatggagagatgtgtaaggagattaatgttatttccatgcctattaacacagcatccattctgcagcgcagggatcaaggagtaacttcattcttattatttaagaaataaattgcataggctatatagctgctgcagatggtgattcctctaatggatctgggcaagtaaaatgaaaaccttctgaaaaagattcaccattcttcttgccattaagaacattcatgatttatggcaggtggtcaaaataccaacattagtaggagtttggaagaagttgattccagccttcatggatgactttcgggggctcaagacttcagtggaagaagtaactgcagatgtggtggaaatcacaagataactagaattagaagtggagtcttaagttgtgacttgaattattgcaatttcatgataaaacttgaacagatgaggggttgcttcttatggatgaacaaagaaagtgatttcttgaaatgtagtctactcctgatgaacttcctgtgaacattattgaaatgataacaaaggatttagaataatacataaacttagtaaagcaatggcagggtttgagagaattgacttcaatttygaatgttctagtggccaggcgcatagctcatgcctgtaaatccagcactttgggaggccaaggtgggaggattgcttgagcacaggaatttgagatgtgcctgggcaatacagcgagwtcctgtctctacaaaaataaaaataattagccaggtgtggtggtgcactataatcccagctacttgggaggctgaggtggaaggattgcttaagtccaggagttcaaggctacagtgagctatgatcacacctgggtgacaggccaagaccctgtctcaaaaaaaaaaaaaaaaaaaaaggaaaaggaaagaaacattgtttgccacaaggaggttttcttcaattgccacagccaccccaggcttcagcagccaccatcctgatcagtcagcagtygtcaacatcaaggaagaccctgcaaaagataatgactcgctgaaggctcagatgattgctagcatttttgagcaataaagtattttaaaattaagatctgtacttctttttagacataatactcttgcacactttagacataatgctcttgcacacttaatagactacagtgtagtgtgaacataattttatatgcactgagaaaccaaaaaacttgtgactcgctttattgtgatacgcactccattgtggtggtctgaaactgaacccttagtagctccgaggtatgcctgtatagagatagataaagagatagacttattttgaggaataggcttgcaggattttggaggctggcaagtttaaaatccacagagacccaatccacttgagacccagggaggagccggtgttgcacttcaagtctgaaggctgtctaatggcacaattcaaactcagttgtactccccagttgcttttaccattatgctgtgcctcttatataaacccgttagctcagtgcttggcacgtcatacgatttagtatacaattaagttccacaagaatgtttgaaatggaaggtacgtaagattgctgcagctatgttgtcatgttagggctgaagctggaatgggggttgtcaaagagggaaagacaacactgtaaaaaaaaaaaaggtgtgggtaacactgtgtagcctaagggaacttgtctattataaacgtccaaaataagcactttgtactgtagtcactgtaccccaaggttacagggaaggaaagggccagcgctctgccctagctctttaagagaaacccctagctctttaagagaaacccatagttcaggaagtgtttgtgctggacaaaatctctgagctttctccaagtcggtttctgtcaaaactgagaactgctccataactgagttgacctctggaatacttgattctctcaactcaactttgttacttatggctgttgttaaaagccaggaggtaactttttccttagttggataccgtcttcgttccacagagttttttaaatggaatgtatggaaaggttgctaacagctatgttgtcatgttaggacatagccaagatgatacaatttctgggaagtttattacagtggctactgtaaaatttggtagcacaaaggtctctaataaaatttgggaggcacataatttagtcgtctactaatcatagatggtgttaagtaactcttttctatcttagttggagtaagaaataaagtaacttaaactgcattatgaattagagttataattctatcttgaaagacaactgaatattaaagtgaatgcttaaggagggaatgaacttgtttaaaaggtaagcagggaaatcatgaccttttaaaccattctttggaaatgtaaattttaaatataaaattgttttccttaatcttatctgatcattaattgacttttgagacacagtccttatggtctgttttatatattgtgatcctgtcttagtgcattcctgctgctataacaaaataccacagactgggtaatttttaaataacagaaacttacatttcacagttttcgaggctgggaagtcctaaatgaaggcaccagcaggttcagtgtctggtgagggctgccatcttctccaggatggcaccttgaaggctgtggcttcacatgacaggaggtgacaaaaggacgtggaagttcccaccagcccttcacaaagcactattctcatctgtgacacagagccctccatgcctatcacctcctaaaggcctcacttaatactgttgcattggggattaagtttcaacatgaattttggagggaacacaaacattcacaccatagcagctcctttttgagttttgtgttttgctgtcagtttcattttctgtgttgctagctctgtttcatgtctctgtgaagtaaaatgaagcaggctccgtcacttactgtgttgtctgggcaggttaggccacttctctgctttgctttcctcatcagcaaagtggggattacagtcttccctactttcctttctgcaagtattaaatgtggttcctggcatatcacgcagagcagtgcaagactcagtaaggctttaattcatgtaagctgctttgatgagggtgatgcattgatgcaatccccagaagaagaattaaggaatccagctgtgagtgtcttctatgtcagcagttctcatctactcttcagatcacttttaagatatatattatttataccctcatttatatagatgaggaaactgattctcagagggtaaattgcccagggccacacagtaggtggcagagctgttagagtttcaaatttgagtctgtaaaacccaaaccctactctttccagtgtatcatgctgctgttgtcgtaaaatgccaacataaaatttaccatcttaaacatttttttttttgagatggagtttcgctcttgtcacccaggctggagtgcagtggcatgatctcagcttactgcaacctctgcctcctgggttcaagcgattctcctgcctcggcctcccgagtagctgggattacagatgcccagcaccatgcccagctaatttttgtatttttagtagagatggggtttcgccatgttggccaggctggtctcaaactcctgacctcaggtgatgctcccgcctcagccttccaacgtgctgggattacaggtgtgagctactgcacctggcccatcrtaacactttttaagtgtgtagttcagtggtgttaagtatgtttatattgttgtgaaatagctctccagaactttttcatcttgcagaactgaaactctatatccattgaatagcaactcctgctttatccccagctcctggcaaccactgttctactttcaatgtctataaatttgaatacagcagattctcaaataatgttgttttattcaacatgattttgttataatgttgatgagaacaaaaaattgattcccagttgggaccagtgtctgtgtggggtttacgtgtttctcccatgtctgcttgggttttctcctggtactacagtttcctcccgcatcccaaagatgtacatgttaggttaattgatgttaaaatcgtcgcagtgtgagtgggtgtggctgtatgccctgtgacgggatggagtctcgtccagggttggttcccatcttgctccctgagctgctgggataggctccagccacctgcaaccctgaactagaataagcagggtggaaaatgaatgaataaatggacacacattattgtaaaataaaaatttgtaaagtatatgatcatcatacaataaatgatgatcaataaaacacgacagtaaacgatgtggtacaaaagcactcaatgaagatgccctgttttccttttctttgcttgttttttgttttttgagatggagtctcgctctgtcatccaggctggagtgcaatgtcgtgatcttggcttactacaacctctgcttcctgggttcaagcgattctcctgcttcagcctcccaagtagctggaattacaggcatgcgtcaccatgcctggctaatttttgtatttttagtagaggcggggtttctccatgccgttcaggctggttttgaactcctgacctcaaatgatcctcccaccttggcctcccaaaatgctaggattacaggcgtgagccacctcacccagcctgccctatgttcttgtttgtttccaaataacgtggtggcaggaggtgctacttgcaattttcactttgcaaacattgattcattgatttaaccaccattttgacctctgtcactcactgattcaccaaaaattgggtaaatggttatttttattcatctgtcttaaatgtctgtataactcgtatttatttcagtgcttaatattagaagtgttttgggtatttcgaagtttggtgatatttttgtgaccagaaatatgccataggaacttaactcttgtttgtatcaattagcctgcagaaaaattggtttcattatatgtcccttcacttaaagtcatagtttctgagaaccaattgttaatattgaagatttcctatactttagatacctcctataggtggaatcatgcaatatttgttcttttgtgactggctttctatttcacttcacataatgtcctcaagcttcatccatgttgtagcttataacaagatttccttcgggttcatagtattctactgttatgtataccacattttatttatctattaatctgttagtgggcacttgagttcttccacattttggctattgtgaatagtgctactatgaacatgggttacaaatacctcttcaataccctgctttagattgttctggatatttactcagaagtaggattgctggatcaaatggtagttctatttttagtttttgaagaaccaccttactgttttccataatacccacaccattttacaccaacaacacacaaaggttccaatttctccacatccccacctacatttgttattctttgttgttttgttttgttttaatagtagccattgtaatgggtgtgaggtgatgtttcattgtgattttgatttgcatttctgatgatcagtgatgttgaacacctttttatatgcttgttagctatttgtatgtcatctttggaaaaaagtctgttaaattctttgcccatgttgtaaccaggctatttgattttttttggcgttgttctttttttttgagatggagtctcactctgttgcccaggttagagtgcagtggcacaatctcagctcactgcaacctccgcctcccaggttccagcgattctcctgcctcagcctcccgggaagctgagactacaggcacgcaccaccatgcccagccaattttttgcatttttagtagagatggggtttcactgtgttggccaggctggtctcgaactcttgacctcatgatctgcctacctcatcctcccaaagtgctgggattacaggcgtgagccaccgcacctggccgtgttgttgttcttcaggtacagcagttcttcatatattctggatattaaagcctcatccattcatgatttgcaaatattttctcctgtttcatattttgccttttcactctgattgggtcctttgatgcacaamagttttaaagtttgatatagttccatttgtctgtttttgcttttgttgcctgtgcttttagttttggattgggaaaccgttgcctagtccaatgtcatgcctttctccttgtattttcttctaggagttttatactttggggacttatgtttaggtttttagtccattttgagttaatttttgtatataattcattcttttgaatgtggatgtccggttttcctagcatcatttgttgaagaaactgttctttcccatcttgctgaggtttttgttgtttgttgtttttgagacagagtctctctgtgtcatccatgctgaagtgcagtggtataatcctacttcactatggcatgaacacctaggctcaaggaatcctcctaccttagcctgccaagtagctattatagcattacaaacactcaccgccatatctggctttttttttttttttttttagtgatgaggtcttgctatgttgcccaggctgatcttgaactcctggcctcaggtgatcctcccaccttggcctcccaaagtgctgggattacagacatgagccactgtgctcagccatcatgctgttttttaagggtagaggagggagagtgaagagaagggatatttattttgggagaaaaataatgcaaaagtattttttagcttgtttgccactacataaatggagaaaagtatacaaaaatctttgataggataatatatttacaggaattatggagaacttatttgacagatatagaggagtttattattaatatttgtttgtatggggaaaggaaatcaagacattatagtaatactaggccgggaatggtggctcacgcctgtaatcccagcactttgggaggccaaggcggacagatcacttgaggttaggagttcaagaccagtctggtcaacatggtgaaaccccatctctattaaaaatacaaacattagccagcatggtggcgcgtgcctgtaatcccagctactcgggtggctgaagtaggagaatctcttgaacccaggaggtggaggttgcagtgagccgagatctcaccactgcattccagcctgggcagcagagcaagactccatctcaaaaaaataaagtaatactatattctctttggctatgaagagaccagctttccagaaacccagggttttctggaatccagaagttgctggcaggttggtcgtgggggaggaaacctttttaatgccaaactaatgagtctgaactcccacaagcaaacaaacagaagataaaaaaagctgaactctaaggggttgtctcctgtatactgtgatggcctgattcacagagggagtggccgcatctcagagggaacgtggccatcctgggaggcggtggagaagagcgggaggagttagcaagggagagccctggaggtccgcagtgctgagagtggttgtgagcagcgaccttgaggaagaccagactgaaggtactggctctgcagtcctgccctggaggggaaagggaggccaagaccgctcctccatcccctaagtgttagccgtcagctagctaatcccagcctctgggagctcttaatagctaactgaagaaaaataacatagcttttggtctaatgtggtaacatttctcaaagttgctaaaaacatttcaaatgtctgaatcttcttttaaaatctctgggcattaatcagttacagaaatcttatttgtatctttatttcctttcctttctgcatcagatattattacgtatactgtttattgggagggatgtaaatattatgcacccttccctcaagaagcttagagtgcagtagagaagacagagtgtttataaataatggtaaatatttatgataccagtggtaatagtagtaatcataagatataaggttgtctttctagataaccatttgaggttatctggagggagaaggaagatctttttaagggtggagaaattgagagctaaagattatgtaaactttacaggtgtgagtcttccacacattgcatctgacatgtaaatagcaagaggctccatgaaaatgactctgttagtcatgttagtgtgaacagtgatcgtggatgttttgagccacagtccactactgttcccagtgtgctggacattctccttgagctatttataaacaggaaatatacctctttgaaaataaacattggcgtacataattgcacggaatcctgttactcatctaaggtgggacaataaatagccttaaaaaatgttgtaataccttacattggaatagcattttattgtgaacaaggcagtctgttttatgaatagtacaaaagcttactaatgctgtgatagaagtaggaatgagtgttttagacagtgaatcttaaacgtttaatcttttctttcgttgaagactatcacttttcagtttctgacaatttagcacataattctgtatgataagaaaatacagatggggacatgggcttaatgctattgaggaaaactgttcaatgtagggacaggcacctgagaaactgtcttcaaatgtgtctcattgagccccagctgctcttccagagctcaactggacctgacaacagctgtctctaagccaggaaccatgggcccttatattttaaaaaggatgggtaaggggatgttctgttggaaaatatgcatttagtgtagcaatgccaaaactgtaataatatacatgaatgcatgttgagcttatgtctaaatactggttgtgtcatgagtggcctattataaagccactagaaaagttattttgaaagaggatttgagggactgggcttttttttttatcatggaatttatatcctaatcctgactttgtgtacatttctgttgtgtcttactgttctctcccttacttaaacttcccttcactgaaatacaacttacatacaataagctacttgtattcaattttacaatataagttctgacccatgaggttgttaccacagtcaagaaaatgagcataaccctttgtaatccttctctcccttggtctctgggactcttgcttttttttttttttttttttgaggcagagtcttgctctattgcccaggctggagtgcagtggcgcagtctcagctcactgcaacctctgcctcccagattcatgtgattctcctgcctcagcctcctgagtatctgggattacaggcaggaggattaccccacccagctaattttttgtatttttagtacagacagggtttcactatgttggccaggtgggtctcgaactcctgaccttgtgttccacccgcctcggcctcccaaagtgctgggattacatgcatgagccactacgcccggcctgactcttttgctcttgatgtgtataggaggaataagctacagaaaggtgtaggggacggtaggcaacgattacactttgaagtcgggtggtcttggaagtgtaggaaaacattttgagaaacactgtcttagagaattctctaacattctggaactggccgctgaacctgcctccccacccttctgtcatccaggtctctcttgtcctagaacccacataaattgcagtagtaaacttgtattgtgtgttagctttgttgctgttccgcagcttcctgggccacatcagactgagtgtatgcttgtcggtgcttcccaaactggtgaagaataaggattttaaaaaatactttctagtctattgttaagtgacacttctgtaaaagacaattaaaatgggatgctagaaaaataaaaaaggtcatatgaatgcaagtcccagttgtttctctttatattcagcagatgtaaaatttctatgtcacattggtaagtttctaaatacttactctcaatttctgcacttattttattgcagagtgattacaacattttgtgattcatgggccacactgagcaatactgatcagcagtcctgcttctcccgttttcttttcttttcttttttttttttttctactgggtacagtgatcttttggccatgcttttagagtttcccacttggaatgttctgcagcttttagccagttattttggcgtaagaaatgaaaggaaactaacagttgctcttgaatacttaacgatacaccagctgatgggaaaagcatttttattttttatttctaggtgatcctcaaaacaaccctgcaaagtaagtggtattagccccactgcagggatgaattacctcacttgtaatcatgtrttatttaacaaatattgctgcgtgcctggtagagaccaggtgtatgcttggctctagggatacagcagaaagcagagcagacagaactctctgtcttcatggtgctcatgtccttgttggggatggtagagacacatcataaacaaataaagcgtatagtgtatcagatggtgatgaacagtatggaggaatgagctagagaagggtgtaggggacagtaggcaacgattacacattgaagtcagttgatcttggaagtcttctctgaggtgaccttgggccaagatcaggctgaggaagagaagacttggagcagcagaggtgaggtcctgcagttttgaggaactcactgaggttagggactcttctcatgccattcagctagggaatggctgataataaatgtatgctttatagtctttactcactctccatgttcttggtttaaaagatgcctgaatcccccctcccccccaccaaaaaaaagtggaaatcagtctgggaatgggaaggtggaatttatgtgtggattttgcttttgatgattaggtctggatatttttcaaggctttaagtatctttttcctaagggtatgaagtacatgagttttgtaatggagtttccatttttaagtggatgaaatttctctaggggacatgaaaagctagacaagatcagggaaggggctttcaaaaaagaagagattaaagctttgggaaaaaggcattgcttttgtttaagcactttgaagttaaggatgtgtaggttattccctgcttatgaatgacctggtgcttagagacagctctccttgtatttgacagcagcatttgctggggcttttttctcatctggctgctctccactgcccaagacttaccttctgcaaactccgagagctctgacccaaacctttcactcgaggtcatggctcccaaacctcccactgcttctgtgctctctcacctcctccaccagccttcaattgggttagagaggaggaggagtagggatgatgactgtttataactagtaagtattctagtctcatttgagcttgtgcactacataaaattggtaggcaggtattactatacctgttttacagatgagaaatgtgaagctcacagatgttaaataatttgtccaaggtcatcattcccggtaaaccagagtaaagacctgaagcaaactctttggttttcctgtccctgattgctgctaccccatctcctttttcagctacgtttttttggtgaaggaagcttttggagattggtcatggttttatttttatggaatttactatatggttttatggaaaatgtgttccagggttggaaacttaatatagatcctacttcagatttttggtcattgggttggggactaactaaatatcattttgatttttaccgtgccttgctattttttaggttgaaatttaataattcatataagtgtcctttgaaatttggcaggatactcttcttttgaagtattacctgctgtttctcattgtaggttatatttcttagtaacacgcctcaacactcttggggttctcaatcttacaaataacttctctcaccctttttttttcctagctagtttgtttaatcatttgtaacttcccctccaaggttggggaggatggaggtggggtttttcagcttggggttatatggtttttgatcctcttacaaacatagttatatgctcgttagaatgtgagctaatcattcttcaaaaaaatgcaaaagagttagccaacgtggtgttgatggctgtgaaacctgagtcctctcagttagctgaaatagtagagatttgctgcccttacggctcacagagctgcagcctagcaggtgctgttacttctttgtttaaagcgtgttagccatccagatgtttctagctctttctctttcatcagagaacattcttcttgaaatttaatgtggaggcccttttgctctggtgcattttcttactccaaattcctgcatttgtcaccacttagtcacagtcaggctattgggctaagtggtctgggtgaacactgatgttagagttgcagggtttgctgcagcccacctcttgttctccagcttccttttaggcatcgtttatttttattctttaaagtattttatgttttgatttgttataactattgcagaaatcaatcctgagtcatcagggttgtttagtctttctccttttgtgcgtttgtgtgtgtgtggtawtattcattttggctgtttggatggcatgtgatacagcattttttattttgtagccaaaaccaaaccaagaggttgccaacaggacagaaaaaagcagcaagataatattaataggcacgtgtgcttgcacctgatcaggaagcaggcacctggggccaggatttgaagtctttctatacctgggagtggggaaaggcctggtcttcatgtcagtgttagtctggaagtagtgacagagacttagcagttactgggttttcctactcattttagtactgttcttgataaggttttagtatttatgtatgtgaaaataacttttgaagtctttaagatcatcaccttgactgaacgagagctaataggttttattcattcctgcaaaaggaatagaatagaacttgtcatactgggtcagtaccagttatgggtcaactaagcaagttttgttttgttttsttttgttttgttgagacagggtctgtattgcccaggctggtcttgatcctgggctcaagcaatcctcctgcctcagccttctgagtagctggaattacaggcatgcacctcattggctaacaagttgtttttctttttgagatggagtctcgccctctcacccaggctggagtgcagtggcatgatcttggctcactgcgacctctgcctcccgggttcaagcgattcttctgcctcagcctcccgagtagctgggattacaagcacgtgccaccacaccyggctaatttttgtatttttagtagagacagagtttcaccatattggccaggctggtctcaaactcctgacctcatgatctgcctgccttggcctcccagactgctgggattacaggtgtgagccaccgtgcctggccacaagttaaagtgccctttagagtgagccttatgcctcacattacagtggctaagaagctaagggacaaagttcccagtctcagaggttataatctagtagggaagagtaaataagtctcagatttatcttgatacatggcaacatttggtaaatatcctaaaaagaggtacagagcaatcaggattcaaggacagggagaactccctgaggtaggagggaacgtgccaacaggagtttctggccatcccaaacagggatgctcatggctgccacagcttcacatttccttataccattgtttgattttcactagtatgtccaaattccttgaaaatgggttttaaacttccagaaaacagtacgatctctcagaactgtgagtgcactcaacatgttttatgattgaccttttcttgtgtctcccttgaactataagctcatttgaaactagttaactgagtcttattgctgttgcctgagaagctagcacagtgcctgacacactgttaagtcagtgctctttcaagttactccctgagaattccctttccctctcccacttcgtgaaccacagctaatacagactcacttccgtgatgaacccggtaaggcctaggcctttcttgctgctgctgcatttcgcagcgctttgcagatgctgcctctgctgtgtcacgacagaatattgcaatatgttttgtgtgtacatcgcagtctaggaagttactccgggctctgccttagttatccttatgtgccccgtacctatagcagttagtgatatggtagtcattgggtaaataktcactgaaatgaaaatggaagttttcaatgtgtatgtatttgttttctacttacccctattttaatggtacagagtgggtaagggtaggttaacacttgcatttgytcaaaagttaatttttacaataactaaatgtttttacattcttaaaatgtattttacattcttaacaaacatgaatctatattgtagtactttattttttaagagagagagaaaaaaggtgcttcagatgttcttacaaagctgtttagcatttctgggaacttaataaagtattttggctcagcagttaaaaaatgaaaatctattttttctgagaaataaagtcttgcccatctgttctctcctcttaccgtgtgactgttaaatgctattctgagattgtatgttttgttttgttttgttttgttttttgagacggagtcttgtcttgttctgtcgcccgatctagagtgcagtggcacagtctcggctcactgcaaccttcacctcccaggttcaagtgattctcctgcctcagcctcccgagtagctgggattatagatgtccgccactgcgcctggctaatttttgtattttttagtagagatggggtttcaccatcttggccaggctggtctcgaactcctgacctcgtgatccacccgccttggcctcccaaagtgctgggattacaggcatgagccaccgcgcccagcctgtatgttttgatactatagagaggtatacaataaaattgcctgttagtcaccatttctaattatggttcattttatcattcaattatttttaagagcttattagcatgtgtatatgtaaagatgtgtttcatatatttttaatctctacatcctttcatattttgttatactctctttaaatgcaagcacttattttgaagtagttttaaatgttataatatctccaccatatgaaataaggaatatctgcactttcctccacccccttctctgagattactgcagccagaaggttaatgccttagctgaactcttaaaagcatttccgttatcataagcttaagaaatgtttgtcttagttcatggaatgtaaataatttttttttttttttttttttttggagacggagtctcycactgtggcccaggctagaatgcagtggcacgatctcagctcactgcaagctccacctcccaggttcacgccattctcctgcctcagcctcccaagtagctgggactacaggtgcccaccaccacgcctggctaatttttttgtatttttagtagagatggggtttcactgtgttagccaggatggtctcaatctcctgacctcgtgatctgtctgcctcagcctcccaaagtgctgggattacaggcgtgagccattgctcctggtcatgaaatgtaaataatttttaaatctagtttacaaagaaaaatgatgatgtagggatatcatwtttttgttcctcaagaataaatttagtcttaaatttcaggttagcatcctggattcattatcctatatcactttttggtatgcattcatgggattttgtaggcagtttcatgccaaagtgttgtgttttccaaagtccaattttttttgactggtttaactaacattcattttgagatgattccaaattttgtaacaaaaacaacttatatttgaattttcacctttataattttaaaaaatctattctgtagccctgagatttggacaaaatggtaattatgttattttatggatattaaagctgaatataaagaatttttatcgaaccaagatgtcacagctcttatagtaagtggcatgattaagactataattttacttgtactcagtgtaccttctaccactatataatgtttccaagcatatgaacttattactagtctgyatctatggttttcagtgatgttaaatgtgtttttaaaaattttattaatatgtaatacacaagagtgcaaaaatcttaagtgcacaacttaggaattttcacaaagcaaaagcatggtcaaatgatttggactatgaattaatattaaaatacaatgaatttaatattggatgcctagagtctcttgattccagagaaatacatttatttttaaacttgtgttacacttccctgaatactcatttgaagtgtttctgatttcctcatttgctcatttgtttgacagtattcacagcgagcctgccctctgccaggcatgactggcatggggcacagctgtgaacaggaatcatcacttgtaacttgaggtcagactaaaggacacaggcaaattcctgtggagcaagagggccttccggagaacttcccagaggaagcgacctcttgactgagtccgagtgtgaatgggaatcatcccaagaagagtttagggaggaaggcaagaggcaccaggccaggagggctgttgagatgtgacaggcagatccgcagggctgcagcctgtgcagtgagggctggagctgggggatgccgggtgggagcaaggacagccaggtccgtttttactggcactgtagtttccttgattatcaacaacaggaatagactcaggcaaacagaagcttcaaagaaatttactggaaaaatactggggttgctcccagaattgaagaatgggctgaacttacaggtctctgagaagggcaaacaactagggctttcccggtgtctctgcagaacttgtgggatgtctctatagagcagtgctctgagttgacttcctctaactgcagggtgttagtctctactcagatttctagtctttgagaaatagtatctgattaacttagttcaagtccatwgtccaaatggaccaggaccagtcattgtggccagaggataggaagaagcaccatgcctagtcaatcaaggtaggtgactgttaggtggtcaggacaactagatctgttacctgaaacagagagtggacgacatgggtacccatgtggatgacatgaccacccagaaggcagtgttacggtagctcagagaagaggtggtttgggaacagtgattaggaaagagggatgttcagaggccagttacaaggctgttgcattaatccacataggaggtgatggtgccagaagtagatgcagcctgtacagatataaagtagtaaatcgattcagaaacagttaagaggcagagaagaaaggactttgcagctggacattgggaggtgtgtgaggatgattaagttgttgaagatgactctcaggtttctcgcttggactagaaccattgtgttcatagtggtcccttgyatggaggagagagagtttcaggagggggatggggctttcattcagttatgaagtaataagttggagtatctaagcagaccacatttaatttaagaacacttgggtatgaacaacacttccccattaaattacttgtggggttccagctctgccatcagggccctctcactccagcatcgtggcctctgccaaggttgttactctctttttgtgtccctgggctgctgaaatcttctcaccgtattgccatggaatttgtaacgtgcttccttctgcttccctaccttaggcaggtttgggtctgagtgggttttggaatgagtattgttaaaggaagttaaaatgaagaccaggcctgtgaaatctctgagcgcacaaaaccagttaggccttatatgttacctcagccttgcttaaattgcagacataagcagaacaagtagagtcattttgataaatgtttatgttagaagtaaaacttaacccccgccagtcgtaagytgccaactaacatatgactaagtgactaggggctttccaacaaggtacctaaaaaaaggcaattctgtaatttcaaatcaatcaaataatttctttattttgcttctrcgtttcccagtaaatacttgtctctgactttttgtcattgggacactaaaacttttttcgtctggtgttccccaattcaygaattgcttcttaytcaaataaactctttaaaattgtattgttcctcagatttttcttttatagtaactttcccaaactcagaaaggcccccagagcttaggggcttttaggactaagtgctgctatttagggctctttcttagatgttattatgtttagaagaggcttgctataggctgggcacggtggctcatgcctgtaatcctagcactttgggaggccgaggcaggcagatcacctgaggtcaggagttcaagaccagcctgaccaacgtggtgaaaccccatckctactaaaaatacaaaattactcgggagtggtggcgcatgcctgtaatcccagctactagggaggctgaggcaagagaattgcttgaacccaggaggcagaggttgcagtgagccaagattgtgccattggactccagcctgggcaacaagagtgaaactccatctcaaaaaaaaaaaaaacaaacaaaaaatacttgctatatgatgacactgttttcttgatatagtcagagtttgaaaatatttcaagttggggacttctttgattaaaatgtaaagttgataaatgaatttagttacagtgctttagttttactagtattcaatgttgtgtgatattgatgagttaagtcaaaccctgacaagcggttcccttaggtacttcagtgagtacttctagcattaatgcttaatggcctcagaaatcctctgggtctgtcgtcctcagcagatctgaaactgttccctaaggagcaagtgggaacttgtggagcatttttagtttatctcgatggtttcaggaaaggggtaccataggcactaaatggcctgaggccagagatgctgaatgtcatgaagtatgcatccacaggactttgatgctggttaaaaacgtargaaagaaaaacacctttgtataatgatgaacatagaacctaactgtgtttaggttgacatcatcaggtttaggttgatatctgtttcagatatcatcggctgggcgcagtggctcacacatgtaatcccagcactttgggaggccaaggtcggtggatcacttgagtccaggagttcgagaccagcctggccacatgttgaaaccccatttctactaaaaatatgaaaatttgctaggtgtggtggcatgtgcctgcagtcccagctacttgggaggctaaggtggaaggattgtttgaatccaggaggcagaggttgcagtgagccaagatcataccactgcctgggcactcaagcctgggcaacagaacaagatgttgtctcaaaataaaaataaaaaagataccatcatgaagtacttttcaacagtttcaataagcactaagttttctgggaatgccatgaaattataaattgagtgaaggatgaaatttgcttggactttatgctttattttcataggtggtactaacattaccacctatgaacattttgcccttaattgttcctttatattctatttagaaactcaaatcctttaagacaatggttagaatatattaaaaaggggtgttttttgttgtttttttgttttgttttgttttttagatggagtttcattcttattgcccaggctggagtgcagtggcgtgatctcagctcactccaacctctgcctcccgagttcaagcaatgcctcagcctcatgagtagctgggattacaggcgcgcaccaccacgcctggctaatgtttgtattttttttttttttttagtagagaggggtctcaccatgttaggcaggctggtctcgaactcctgacctcagatgatctgcccgcctaggcctcccaaagtgctgggaccacaggcgtaarycaccacgcctggcccaaagggttttgtttttaaatgagagatggttagtaaactaatgttttcctgagtgacatagggcatatacatagagatgagcatatacatagagatgagtatgatgaacatttggggttataaatgactttcataacaaggacctatgaagagtatataaaggtggagacactgattagcacttgatagattgggtaaatcaagttaggtgaaattatcccagatttttttaaagtcccgggaggaaaagatacgcaagtgtattgggcattgaacaaattttttaaataaagatctatgtccattcagaatagtctgtggaaagcatttatcctgttattttgttgttgctgtttcttttttttttttttgagatggagtcttactctcgctcaggctggagtgcagtggtgtgatctcagcttactgcaacctctgcctcctgggttcaagcgattgtcctgcctcagcctcccgggtaactgggaccacaggcgcccaccaccacgcctggctaacttgtattttttagtagagatgaggtttcaccatgttggccaggctgattttgaactcctgacctcaagtgatctgaccgcctcggcctcccaaagtgctgagattacaggcgtgaaccactgcacctggctgttgttgctgtttctatgtgagactgataaaggacaaaaagaagatggcaagggatggatggaaaaggctggttcttctctcagggttcccagaccatagctggagataacccagggttgtagctccatctgctggagagaagcaaacccactcttacatagtctataaatgaaagtgatctctccacaatcacagtgagccagccygtgtttgctaagcacttgctgtgcactgtgtaacactttgtcaggcttagggtaacagaggaaaaacatagacatgttccctgttcccaccatgcttagctctgagaggccttctgctgtcaagaagacttattttagctggtgtgcttttgcattctaggtttccccctagacttttccttgggtgacttttaaagccacgtaacctcattctgagcttcctgttccttattagaggtaaggaataacagtgcccctcctataggcctcagtttagctaaactttattaagtatctagtgtgtctgctaggcagaggcccaaggagcataaagatgagtaggaatctagtccctgccctccacaaggttagaaacaggagctcataaaatgatcctcgcggagtaaatgagaatgtataacgggatccctgaggaggagtgcgggatccaggcaggagagtcgactaggaaggtatggacaggttttctgagttgtttgaggatgtgagcattagcgaagggaagcccttcccagccgaggtcagcgtgagcagcagcatggagatgagggcctgtgtggtatgtgtatgtccctcttaggctgtgtaaagtgagcggcaggaagtgtccagggatgagggtttggggacatagatggagccaggtagggcctggagcagtagctcacgcttgtaatcccagcacttcgggaggccaagatgggcagatcatttgaggtcaggagttcgacaccagcctggcaacatggtgaaaccctgtctctaccaaaaatacaaaaattagccgagcktggtggcacgtgcctgttgacccagctacttgggaggctgaggcaggaaaatgacttgaacgtaggaagtggaggctgcaacgagctgagatcactccattgcccaccagcctgggcaacagagcatgactccgtctcaaaaaaaaaaaaaaaaaaaaaaggcggggccaggcgatayagggttttgtgtgttaccttaagggatgctgactgtcctcagtgcagtagagaatttaagcagggtagtgatagcaggttccttagaccgcttgctggctgtgtctgttggatttgattgaaggggaccaggctggagacagggactccatctaggaggctgcggcatgcctgcttggataacgtcgccatgcctgagagagggcacattaagatgaagaattggatttaggcatggtggggaggggagtttattttaggcatcatgagtttgagttgcctgtgacgatatctgtatggagacatcagcagacaatttgatgtatgattgcgaagtttaagaaggtccagccagtgccactaacagggaggaagtagttgagccatgagatttgttgaagtcatcagggagaatgtgcgcaatgagaggagcagaaagccaaggtcaggctggggagtagccatacctacagccaggcagaggctcttgcaaaagagatggtgatgggatgacaagagggataaaagtacggtggtctggaagccaagggaatagaaaattcccaggaaagcatcatttaaaaatgtcaaatgtaagataaggactgaaaaatgccttctggatttggcttttaagagctgtgactgtaagaggtgtttccagattgcagtaggttgatgagtaaataggagttgagataacttttagaaaatggtgtctgaggccgggcgtggtggctcatgcctgtaatcccagcactttgggaggccgaggcaggcgaatcatgaggtcaggagatcgagaccatcctggctaacacggtgaaaccccatcttactaaaaatacaaaaaattagccgggtgttgtggagggtgcctgtagtcccagctactccgggggctgaggcaggagaatggcgtgaacccaggaggcggagcttgcagtgagctgagattgcgccactgcactccagcctggacgacagagcgagactccgtctcaaaacacaaaaaaaaacaaaaaaacaaacaaaaaaagaaaatggtgtctgaaaagagagagctgtgatggtagctggagagtgactcaagatagactcattttaacgtagcagaaactggagcctatttacaaactcttcgggggaaagagcccaaaaagaaggaaagtggctgtctggatgtgagtttatggactgacatcaaacagaccttgttgggactgaaggcctgaagagtaagcatataggtgggaggtagttgaaagagaactttccagataaactgttttcttcatgaataagtaataaagtaatatctgctgagagaagaaagggatgaggtcgattacgagaagaccttcaagcatkgtacgtccttatgcgagtggcgcatggcttcaagaggagggttgatgggacccatccatgagtagagaagttaacaacaatgccagtctkcccaggatgttctgctgggactcagaaaaacatccagtttccttcctttagattttaactgcagcatcacgagctgccttcctagagggaattttgtattttggggctgtagctcagaagacttccattctcttttccctctcccaagagagatcgcagctgcttcccggggtttatgtccatgacataggactgtccctgctgggaatgggggagggaactgcttcccactcgaaagcagccttttcacttccagcttccatctgccttccactcccacctcccaaaataaagtaaataaatcaaagccagaaaaacattctggctggaattttattacattcagtattgtgtgagagctcccaaactagctgggaccgttggatttcagagtacgtgaaggtgaagcctgtgaggttcccccaggagtgctgggcagaaccctgagttttagaactccctctgcctttagcttgtcttggatgtgctyttccactctttcaagcactaaacccttccctgtaaatagtcacctgccagggtgccctcaggttatagcttgtcaccagctctaagagtggctagtacccagtctcagtgttggataacaagcaaaagtgatgagttgttttcttggggtttgtgtgtgtgtgtgtgtgtgtgtgtgtgtgtgtgtgtgtgtgtgtgtgtgtttggtttgttgtggtggtatgtttttgtttttgttttttcagagacatggtctccctatgttgcctagtctgggcctgaactcctgggctcaagtgatctcctatgtcggcctcccagagcactgagattacaggcaagtgtaagccactgcacctggccgttttcttgtttttaaagattaacctcaggccctagttatgttaccatcctagaaatgcagttatcctaaaaatgattcctctataataaaggaattgggtaaaggagctttcttgctgtattttcagtgaattcaggcaaggacaccctcattcatggaaggggaaggctgaattaattgctctcaagttctttcttaccttcaactaaattagatccctttattctccagtggaaacttggcactgaggagtcccaggaggtgactcagtcggatatgtgaggccttagcaccactggccttgctgcttctgcactgtgtctgtcagggatatctgggacagaaagaataatttccgctgctggggcagccagascctggcgtgcccgtccctaagctggcctgcaccttgccaccggaagatgtagtgtagagtagctgcttgaccccagagtagcattcagagggcacataaagaagctccgttaattcaaacatgtagttattatagagatccagagggccagaggctatcatttttttaaagttacctctttctatgatgatcagttattcatttttctaaatatttgtctgcatgttatatgtgctttcagtaagtttttgggtgaatttcttaacttcataaagtatataaaacaacttagcaggatatgagttatgacatttaggggtgttgtcctattgcttcagaacagtggggttatcgtgtaacacaccatgtcacatgatttgactaaatacaggaaaaaaaaaaaccctgaacttggtttcattggctcaaatatagttcaagacaacagagacaaagctaagatgaggaagttctgtacagtttaggaaatagaggctttcaaagataattcgcagtgatgtgaaactggcctcccaagccctgataagtaagttaaataagagtaggagccaggagggaggttctttactcttgaattaagagaaggggagctggaggtggctcaggtagagtgcgtaggtttgcagaactgggcctgtgtgtgtaaagtgactaaggcaaaggagtggaagtttgagagaagtttaagagaagaaatggacatgattgcctaaatcagccaaacacagggtattgttgtatttctggatttgttttccttatgacctacctttctcagttatttaagaagcaaatctaaaggatatttgttgaaactctctatgcagaaagggtcttgggtgagttgtagtaaccttcagccatgctgattaaaattttctccctgctgcagaggttatgattgtggttcttatatcttgtagatgtgtatttaattattgaaatatgtgaaaactttgttttattggtttcaaagtagggtgggtgtggaagggaaactatgccttttgtttgcaaagaaaaatttaaaaacaattgataaacagtatttagtgtcatatggtttatatcctgcagagccttctataaaagaccttagtaatgcttttggcattttattacattaattttttaaaacattatttctgctgcctagggtctttggtggggaaatgtactatttagcaatatgtttagtgaacttttgtcctgtcatggtaagaagaaagcagctataactaagtaaggagttactcttattcattaacrtgtaaaacgctgtttaaaaaaaaaaaactggtcatttttttaagttttatttttaattggcacatttatttatggagtacaatgtgatattttggttcatatgtacattgtacaatgaccaaatcagggtaattagcctatcaatcatctcaaatatcactttttcgtggtaacaacacttaaaatcctcttgaggtattttgagatatacaatacagtattattaattataatcactttgctgtacaatagatcaccagaacttactcttcctaattttgtacctgttgacaaactcttagtttcattgattctgttgtttttctagtctctttttcatttacttctgttctgatctttgttatttccttcctcctgctaacattgggcctagtttgttatttttctagttccatgaggtgtaatattaggctgttatttgagatctttcttttttgaagtaggtgtctattgctgtaaacttccctgttagcactaacttttgctgcatcccrtaagttttagtatgttgtatttccatcttcatttgtcacaagatttttttatatatctcctttattttcttctttaatttcccctttaattttttctttatctcgatagttgtttaggagcatattgtttaatttccacatatttgttaattttccatgtcctcctgttactttagaaactattctagtttcataccattgtgatcagaaaagatacgtgatgtaatttcagccttcttgacctgtcctggagaatgttccatgtgcacttgagaagaatatgtattctgttgctgttgggtggaatttcccccagcaggccactcttaaaggaactgtaatgcctcagacctacatttggaaaacatttattaaggggtgattatttacccacagaagaatcttttgctttactacatgacttgccttatacagtggacttcctagagatttaaatgtatttgcaaaagcattgattttacagttaaccttcaagaacattaagagtgataccgattgcatgtgtaaggcagtctcttatatagatgtatgttgtgtgtatgtacacgtgtgtatatatgtacattcacatacataatcaggaaataaggaatagttataatgaacaggagaacacaagtatttttcatggataagaaagaaaacattaaaaagaggatgatcattttaatttggtcttttagttgataaaaagggtacatgctttttagtttgcaaacaacaaggcactttgcatagctgatagaatgaaaatagaataaaatattctgaatgaacataaacacttggtggtagtttaaaaaatatacaaaaataactaaacatcaggccatcacaggtagtgtcaagtttttgaggctaaccaaaaagagcggggaacccccttcaattctaagagacggcaccatggaggtagtgacttttgagttgggctttgaagaatttgacaaatgatggaaaagagtgttgttctaggcacagttggcaacagctcgagcaaaggtttgcaggtcagtgttacttctctcttcagagtcctccattgcctttccatctcacctagaataacatccagtttttatkctgggctgcaagtgctttctggatctaccccctgccctattcctttctgtgctgtgttttccgctttagcctggaagatttgttaaacaggggctttgtttcctcttgttcacctctgtattcccagtgcccagagcagtaagtgctcagtaaataaatgttgaatgaatgaaagaaattcaaaaattatctactgtgctggaatgtttgaaggataagaatggcagggagggagggtgtatgtggagtattggtcttgagggcagtgtaaagtttggggacattagggaagcatctgtgatgttgcagtgaagtgtttgctaatattacagtgtagagaatggattagaaggactaaagagcaagatagcaataccatacgaaaggatgtgtcagtgggtctttcattcagttgacatttgagtggttgccccatgctaagcactgtgttaggttctggggacacaaaggtgactgagaaatggtttccatgggtaatgccagatgtgtgaacatcctgtagcaaaggactgagcaaatgatgcggtggggcctgaacctgggcgttgtcagaggcgtgggaaggagtctgaagtctcattgatagtttcttgatgtcagtagttccgcaagttcccagaaaaaagaggaagccttcagtgaaactttttttaaaaaaaaattgattgattgacaaggtcttgctctgtcacccaggctacagtacagtggcacgatcatggctcactgcagccttgacctcctgggctcaagaaattctcctgctcccgcctcccaaatagctgtgactacaggcacacaccaccatgcctggctaatttttwaaatttttataaaaacagagtctcactgtgttgcccaggcttgtcttgaactcctggcctcaagagatcttcctgccttggcctctcaacatgctgagattacagacttgagccaccatgcttggccttttaagggaacttttaaaaatgtttttagtttttttttttgtttttttttttgagacagagtctcgccctgtcatccaggctggagtgcagtggcatgatcacagctcactgcaacctccgcctcccaggttcaagtgattcttctgtctcagcctcccaagtagctggaattacaggcacgcaccaccatgcccggctaatttttgtatctttggtrgagacgaagtttcaccatattggccaggctggtctcgaactcctgacctcaggtgatccacgtgcctcggcctcccaaagtgcttggattacaggtgtgagccaccacgcccagcctagttttgtttttttcatgcggggacttacagtgattttaaattgggtcttgcccaaaagttagccatatgttgattgacccattagttccaggagaaggaggtatacaggagcagtgttttagctctgagtcggtgtgtcacttctgaggcgcagtttgtcagaayagttacaggatgaaatgttgatgtcctgtagagtgcttgattaaaataagtgaagtggcaggtggggaggtattttataccccaaatgttgccacaaatgtatgataatattgttgggagaaaaggatactttatcagcccagatgggacatayaatacagaatctaaaaaaattgaaaaataacttataccaatttttgtgtgtgggaggggggtgtgtggagaacaggcagagattcccttatagggctttaaaatgtgctatgctgaaagaaagtttgtttgcagcctgggaagacatttagactaccaagttcttcgggttcagctgtttatggtctttcttgtcacttatttaacagtttcagaccataaggagcgtatacttttctcacttgttctttattcattgagcctatttatccttgaaatactgtggtgtaagttgaaagaccttgggtttaaattttacttctgccatttgtgtgattttgaacaaattatttaatatctgagttgcagattcctcatctgtaaatggcaatagtatttaatctgtgagtagtgtatgtaaaaggatcctagcttgatatttggtgggatctaggtgaacaacaaatgttcccctttttattgtattaatagtaaaatgtatataacattcagttgtggaggacacttgggttgtttccataccttggatattgtgaataatgctgctgtaaacatgggtgtacacatacctgtttgcatccttgttttcaattcttttggatatatacccagaactggaattgctgggtcatgtggtaattctatgtttagctttttgagggacttccaatcattctctgcttttgttttttagtttactctgcatcatttatgcatatctcctttaagatccagaattactagagttcagggtttgaaagcaactaaattcactttagtgcctgatagtctcatggtttttctctacttccaaacatatctaaaccttatccaagcctcccactgtgtgacttctactgtgaaaaaagccattcttctctttcttttgcttttttctttcttaaatcttctccccttcgattgccttttctttccctcactaattctttccttctcaccgcctgccttctataaaggaatgctggggaaaaggtcttgccggagttacttctccatccccactctcaagcctacccagacctggagttgctgtctttgtgaaaagggacatagacacagaatgatatccagatgctagattacgtcaatttacaataaactttaatttaagccagactttcagaacaattagcacctgtataatactaaaaaatgccaagtatctgggaaaggttgggtggggaaggagaaaatagtatcatccatggggatgattcaactcttagggctgccagcctagcacactgctagcaacagctgggaagaaatcataaagtgaattttccacagataaaccagccagaaataacaccagactgccaagtcagatgtgatttcttagtcataaaaggtacttttcattcctgtaatcctgattggcctggtcagtaattaaaagtcaacattcagttttattttacttatttctaggaccattgtagaatccttcagtcattacatatctggtgagaccctagtggtaagtaaaggatatccatgcacttgaggggaaggaagtgttcacacatgaaatagctagaatagtaacaaagctccctttaaattcagacaatagcagtgagctactggtaacagcccaaaggagaaaatgagcagcagccagaattttgagattaattttaataatttattaatgaatgcaccagcagagaagaggtgggaaggatatggtcgacaagtggtaggagtaaaaaattcagctgtggggaaggggtagcttttgcttagaaagttcaccacagacccctgccctctaagttatggtgaattctgtggaagtgattagagtggagaaaaaggaacaaagagggttggaatccagacgttccatgactaaccccaagatgactaaaccagctactgaatgcacccacagaaagggaagtgacatttactgagaacacatttagtgttgctgaaygcttaaaatgctttctttgtgttctcagtccttaccagtctgtgaggggggtttattttgtctacattacagatgaagaatctcacctgcaaatgaagaaagttgsctggccgacaggagatcgtttgaaatgaaaggattccagggtttctttctactgagcgtattcaataagcagggcttattatactatctagaatggtgctatcctgtagaaatacaatgtaagcagcatgtgtagttttaagattttctagtagccatttaaaacaggaaaaaagagatagggaagattaattttaataatatgtttaatttaacccagtatatcaaactgtcatcatgtccaagctatatacatatcatgtcatcagcattttaaagttaccaggagaattcagtgggtactttaaagtccatctgaattcagactagccacatttcaagttgctacatgtgactactggctaccaaagtagacagcatagctctaaaaaaaaggtagacagactcatcctaaaaaaaaatcgaatgtagaggccctgctttgaagtcattgagaggaattatggtggggcaagaaagcagcttcacctgagatggaaagctctgtggaaggaaggtaccatacataaaagcagggctgctcttgaaagaatgtgaccatatcatgcaaggacattactgactgaagggctatttatggagagcagtaaggtcataccgacctttatcaccactgccagtcgtgaccacaggaaggccctgtggtgttgactgctagatgctgaaccgtatttgggtgggggttgcgaggatgctgtgtcttggcaaatctactaaccattaggagtggaaaccacagcctttaatgtatgtgtggatgtcattcccaaagaatcttttcttccagtgcctttttcagatgaggaggtgtaatgtgtgcttgaggaagtaagcatgaacaaactaccttatatgggaattcccagacctcagctccacccagaccaagataaatgatggtttcagactgctattccagcaaaacagggaccatcctatatttataatattcagtcatttcttccatgctttcttactttaaaaaatgttcttgaaattttcccttggtcttctttcttcttgtgattctgcctactttgttgcctttgtcccacttaactattttcttcagtttttcccattgtacttggtttattttgttgttgttgttgttgttctgtagtcaactgtgtactaggaatcagtgtaccccccaggtcctgttcttggctctcaactgtgggactttcattctgttccttcatctgaaaaatgaaaaacattagaattagagtcctttataatcttttagggccctcattttgcagctcgtttggagcctcttttttttattgtggtaaaaaacacataaaatctaccaccttaatcatttttaaactcaacagttcaacagtgttaagtacacaagaagttgcacctatgataaaatgtgaaataagatctagaggcttgaggagaacctgaggttatctgtggagggtggaaggcttatgctgaagtggccccctgagagcaaagatcaggagtaagggacgatctcctagtattcacttgcagaagtgacttaaagctgctaaaaggatgtgtgtcagggctttggcattctgccgcagacatagaaagacctgatactgttttgacttcmtgtgtccctgtagscattcagcggccaacatttgtatagtactttatctttctcagcttatttctaattagcrataattaatactcttagtattaatacgagttaatttgtaattcttacaaaagagtgtgagataaatgagcatgtgctgtctttaatttccaaaggaggaaatgaaagggtccrtggaagatgagctgtagctgtggaaggrgcagaaaagccagagggtggctcaggagtctggtgttatatatgataacattttaaaaataagaggtgaggaaaatgggagcacactttttggaagattaacataaatgtaaaatgatttacagaacagatcaatggaattcagttaggtctcagattttactttccccattagggatgtatgtaaagaaagggcatgttggccgggcatggcacaygcctgtaatcctagcactttgggaggccaagatgggcagatcacctraggtcaggagtttgagaccagcctgatcaacatggagaaacctcatctcaactaaaaatacaaaattagccaggcgtggtggtgcatgcctgtaatcccagctactcaggaggctgaagcaggagaatcgcttgaacctgggaggcagaggttgctgtgaaccgagatcacgccattgcacagcctggacaacaagagcaaaactccgtctcaaaaaaaaataaaaataaaaaggaggggggcatgttgaggaaataggaacttgaagtacttgggatggttcattaatttccctacgaaacatctgtttttttttttttttttttttttgagtcttgctctgttgctgaggtgcagtggcatgatcttggctcactgcaacttctgcctcctgggttcaaacgattctcctgcctcagcctcccgagaagctgggattacaggcacgtaccaccacacccagctgatttttgtatttttagtagaagtggagtttccccttgttggccaggctgatctcgaactcctgacctcaggtgatctgcctgcctcagcctccaaaagtgctgagattacagatgtgagccaccgtgcttggtcaaaacatcttaatttgacctttttttttattcacagaccactttgagactcaacacttaacgacattcatagaagaaaatgcacaaaggcacatgcatagaaagtttttgtataacttccaggaattcatgcccccagtscagccacagcaacacgtgattgtaatgatgattgcatttctgaagactttttaaaagcatttttttggatagaagagttaaaatgttgtgaattcttgataaattgaataagcaacaaatacactagcagtcactagagggtgatgttttctagcatacaacatcaagttctttccggcaggttgycattgtargttcctgtgtatgtgcttgcttgtacgtatgtctgtgtgaaagagacagaggcacacacacagactgtctctacctgcataactaaaagaatttctttgtgcatgtttcttttttctccktttcacttatctataatacaagcaaaaatgcttttttttttttttttttgcgacagagtcttgcatgttgcccaggctggagtgcagtgatgcagtctcagctcactgcaacctctgcctcctaggttcaagtgattctcctgcctcagcctcccgaatagctgggattacaggcgcccgctgccacacccggctattttttgtattttttagtagagacggggtttcactatgttggcaaggctggtcttgaactcctgacctggtgatccgcccgcctcrgcctcccaaagtggtgggattacaggtgtgagccaccacacctggccagaaatgctatttttttaaagccttctcccacctgttctacagatgaattctgaatgttttctaatatatccttgtttctcatcatcctaggaatagctaccaattatgagcacccactgtggttggctgtgcactgggtggcttatgaactttacccctcatccctacaactgcagcgtgggctatttcatagattaggacatgatgtgtaagtagctggctcaaagccctccatctagtaagtttgccagtatatcatcagttcatagtaaactaaaaaaatgtctactttatccaaactttttcatttataaacgaatttgtgtcacctggtatgtcttagatgtgatttgagactttttgttgttgttgacatagctttaataaaattaacataaactgtgactttgtataggctaggaggaaggagagactgaggagtactatgtttggaaggaaagctgaaggtagggcagccggatggttagctttgcagataysaggccagtgagaagaaaacagctagttcgatattttgcttaggattragccctgatggttggatactagccatctggggggtggtgggtggggaatccttttgggagaacggacggagtgtgggaatgaggccctggccaggcagatgtgtgccartctgacactgttcatttcttctgttgtttatgccagttcaggcaacacggaagctgtgtctgtttctcctgtcattgtaaaygyagccctggtctttcaaaaagctgtggttgtgtgggtctttaaggtattccttcagtaattgtggtggccactatttcatttaaggagttagcatcttataaagaaaaatctgttttctcaaggctctatagtaatgatattttgtttaagtttgtccaatatggtatttagttcttcctattaaggaggagtctctaaacttcagtctgtgggccaaatctacctcctgtttctgtttaattattttattgggggggtgatatttatcccctcaagcatttattctttatgttacaaacaatccaattatattattttagttatttttaaatgtccaatctaattattattgactgtagtcaccctgttgtgctatcaaatactaggtcttattcattctttctaactaatgtttttgtacccattaaccattccyttcccattccccatctcaccactacccttcacagcctctggtaatcatctttctactctctgtgtccatgagttaaattgttttgatttttagatcccaaaaataagtgagaacaaatgatgtttgtctttctgtgcctggcttatttcacttgacataatgatctccagtcccatccatgttgttgcaaatggctggatctcattcttttttatggctgaataatactccattgtatataagtaccacattttttctttatccactcatctgttgatggacatttaggttccttccaaatcttggctattgtgatcagtgctgcagatatctctttgatatactgatttcctttctttagtttatatccccagcagtgggagtgctggatcctatggtagctctatttttagttttttgaagagcctccatactgttcttcacagtgattgtactcatttacatttccaccagcagggtacaagggttcccttttctctacatcctcaccagtatttgttattgcctgtcttttkgttataagccattttaactggggcgagatgagatctcattgtacttttgatttgcatttctctgatgatcagtggtattgagtaccttttcataggcctgtttgccatttgtacgttttcttttgagaaatatcttttcatatattttgcccattttctgatcagattattatatttgatttttttactatagagttgtttaagccccttatatattctggttattaaccccttgtcagatggttagtttgcagatatcttctcccattctgtggttgtcttttcwctttgttgactgttttcctttgctgtacagaagctgtatttgttgtttttgttgttgttgttgttgtcgtttgagatggagtctcactcactstgtcgccaaggctggagtgctgtgacgcaatctctgctcactgcaacctccgccttttgggctcaagcgattctcctgccccagcctaccgagtagctggggctacaggcacccgccaccacgcccggctgattttttgtatttttagtagagatggggtttcaccattttggccaggctggtcttgaactccttacctcaggtgatctgcccacctyggcctcccaaagtgttgggattacaggcatgrgccaccacrcctggccttgcagaagctttttaacttaatgtgatcccatttgtgcatttttgctttggttgcctgtgcttgtggggtattattcaataaatttttgcccagaccaatrtctttgagagtttgccagacatttccttatactagtttcatagtttaagatcttagatttaagtctttaattcattttgatttgatttttgtttatggtgagaggtaggggtctagtttcattcttctgcattatggatattcagttttcccagcaccatttgttgaagagactgtcttttcctcagtgtacgttcttggcacctttatggaaaatgacttcactgtaggtgtgtggattttgtttctgggttctctattccgttccattggtctatatgtgtgtttttatgccaataccatgctgttttggttactatagctctccagtataattggaaatccagtaatgtgattcccccagttttgttctttttgcttaagatagctttggctattcagctgttttgtgaatccacataaattttagaattgttcgttcttctcttctcttctcttctcttctcttctcttctcttctcttttttcttcacttttctttcacagagtcttactctgtcacccaggctggagtgcactgatgcagtctctgctcactgcaacttctgcctcctgggttcaagcgattctcctgcctcaagcctcctgagtagctgggattacaggcacccgccaccatgctgttctgtgcgggagatgcctgaggggggaagaaaaacacacacacaatacctttaagggtaaacaagctttatcccacgtaaatggcaatgcagatataataaacaaatgatataataaacaaattgcaatgaaaaggggagaagggaaaagatatatatatatattttcttacactcaccaaactatggaggattcatcaccagaccgggaagcaacagcctgggctccagagtcagacacttgtccgtgcacagcgagggaaggtctcatgaagtttcggtgcagtctgggactctagctgttttcgtaacaagttgtttggcatgagacccagtcacgagtgcccttcgtgactgggcttaaggaacacaaaaaggtcacaacttgtttttgcgattgtctattgttttttaataactaacgtgtaagaatagattgaaatagagatttctctgaaacagcgmtggatgaatgcctcaaggggctcactcaacctgtttcaggacttagtgaccattgtttgtgtccatgttcaattgagttcaaatttaatatttaacttttcctccacacacatgcctggctaatttttgtatttttggtagagacagggtttcgccatgttggccaggctggtctcgaactcctgaactcaggtgatccacccaccttggcctcccagagtgctgggattataggtgtgagccactgcacccagcctagaattgtttattctatttctgtgaagaatgtcattggtattttgataaggattttattgaatctataaattgctttgagtagtatggacatattaacaatattgattctttcaacccatggaatgtctttccattttttggtgttctattcaattttctttatcagtgttttatagttttcattgtagagatgtttcacttcttcggttaaattaattcctgggtattttattttatttgtgtctattgtaaatgggagtactttttaaatttctttttcaggtcattcactattggcatatagaaatggtactgacttttgtatgttgattttgtgtactccaactttactgaatttatcaactctaatagttttttggtgaagtccttaggtttttccaaatataaaatcatatcatctgcaaacaaggataatttgaagacttctttccaatttggatgccctttatttctcttctctgattgccctagctagcacttccagtactgtgttgataacagtggtgaaagtgggcatccttgtcgtgttccagattttagagcaaaggctttcagtttttccccgcagtatgatactagctgtaggtctgtcatacatggcttttattatgttgaggtatgcttttatacccagttttttgagggttttttaaaatcatgaagtgatgtcaaattttatcaaatgcttttttagcatcagttgaaatgatcataaggtttttatccttcattctgttgatatgatgtatcacattgattgatttatcacactgattgatttgcatgtgttgaaccatccttgcatcctagggataaatcccacttgattataatgaatgattgtgttgttgaattctgttttgtagtattttgttgaagaattttgcatcaaaattcatcagagatattgacctgtagttttcttttattattatttttgttattgagacagggtcttgctgtgtcacccaggctggagtgagtagtgcaatcatggttcactgaaacctcaacctactgagttcaagcaatcctcccatctcatcctcctgagcagctgggagtataggcatgtgccaccatgcctggctaattttttgtatttttttgcagggacttatttgtatttttagggtttcgtcatggtacccagccaggctggtctggaacacctgggttcaaatgatctgcctgcctyggcctcccaaaatgctgagatttacaggcacgagccactcgcctgaccaggttttctttttttcgatgtgtctttttctggttttgttatcagggtaacactggccttgtagaatgagtttggaagtattcccctctcctctatttttcagaatagtttcagtaggattagtagtagttcttctttaaatgtctggtataattcagcagtgaagccgtcaggtcctggccttttctttactgggagactttttattatggctttgatctcgttacttgttattggtctgttcaggttttggatttcttcatgattcaatcttggtaggttgtatgtatctaggaatttttccattccttctagattttccgatttattggcatatagttgctcatagtagccactaatgatcctttgaatttctgcagtatcagttgtaatgtctccttttcatcgcctttttttttttttttttttttccacttgagacagagtcttgctctgtcacctaggctggagttatcttggctcactacaacctccacctcctgggttcaagtgattctcctgcctcagcctcctggctagctgggattacatttgacagagttttagctcttggtcaggctggtcttgagctcctgacctcaaatgatctgcctgctttggcctcccaaagtactgtgagccaccatgcctggcctcsttttaatctctgattttatttatttaggtcctctatttttctcagtctgactaaaggtttatcaattttgtttaactttttaaaaaaactttttattgaactttattatttcttttcttctattattaattttggatttggtttgctcttgcctttctagttccttaagatgcattgttaggttatttatttgaagggttttttgttgttgatgtagacatttagagctataaacctccctattagtactgctttccctatatctcataggttttagtatgttatgtttccattatcatgtgtttcaagaaatttttcattttccttaatttcttcactggcccactagtcattcaggagcatattgtttcctttccatgtatttatatagtttccaaaattcctcttgttatttatttctagttttattctggcctcctattttttttacagcgtgtgagctaagaatattttgaccttttttaatggttgagaaaaaaataaaaggatgatatgaaaattatatgaaattcaaatttcagtgttcataactaaagttttcttgggacacagccacatttacttctttactattgtttgtggctgcttttgaaccacgagggcagggttgactagtcaccacaaagactttatagcctgcaaggcctaaaatatttactatctggccttttacagaagtttgatgattcgtgccatagaggagttgtagcaatttttgaaaacttaacattttcaaattttagacggttactgcattcagatcttttatccttagcctctcaaattaaattttgttctaatagaaatgactggatattaacatattttaattaccttaaaacaagtcttgctcctcatcccccttcctcaagatgggtttcttgtaactagcattagttagcttccgttctttctgtcctggaagagcactagagagttgtctaagaccacccccactgcccctgctcctctgagttggatgaaggatgaaacaggggaccagcaggagtagagtctgttggacagacagtaaggcagcatctcaactgtacagagcacttggtagtctgaaatttgatctccgccaggtaagagcaatttacctgcaggaaggattgatgggtcagggattaatgccacatagttcctttttcactggaatccagttgtctgatgattccccaccttgtgagtctgaacaggatactgaagcttgctccctcttgagaatctggaagggccagatgactgccttcctagcctcacctgcagctgcagctgaggcacaggaatgtgtcttgggctctggccattaggtacacctgtattggactgtgacctgagagctagagatgcaaagaaatagggattgcctrgaatcatttctggagagcacggttgtaacagcactcatgacacccattgtttaggggcagcaatagaacctggtgtgagcagcacagcccagtacccagcattggtccatgtggtacactgtgtccaaaggtgtagggctggggacagacttcccctgctgggcaaggtgttgttataagctcggttctttgttaatcctgcagagtctgtgagcattcaaatatcatttattaaatatctcttctacttaaaattaacccaaggtggtttctgttgcttgcatcttagaaacctacatgtgtcaagctaaagagctcactcaaaatacctaattttttataaaattttttaaaattttccatattttgaaacttactgaaatttattcctttcagcatcttatgctgtccccattttcctctttattcattccaaaaatgtctgcccagtacctactacatgcccagcacatggcttcacataagcagaaacacaagcagaagaatgtgtcagtgtttggacttagtgatgccccacttagagaatgccatccagtgtagtcttcatccttataaccaagttcattttatctgtgtattgtgggccatattagactacagtgagggacccaagagcaacttggaaagaaaagaagtcagattatcctctgagagtgaaacttcaaacttgacacaggagtagagctctgtagtctcctaaaggggatggagtggctctggatgtgtatgtaaagaaaggacatgaccatctgaaaggcccggtgagcatggaagcagcagttgtatgggcagtcacagaggtgaagctggcaaccaggcctgggggccaggcagcgtggccctcgggcccaagtaccaggttcctgctgccagctctgcccccagtttgggggaggtgaatctggctgttgtagtcactgagtattcagactgtataactatttttatgaattcaggcacaccagacaaccttctaattataacttaggttttcatttgacctgtgtctaggagagaacacattacttatgaaagctagatattttagtttgcaagttggagttgtggttttacacgtcagttctaaaagttggtgaatgaggatgcttgagtggcagrtctaccttagggtgctgacaacattcattgctcagcttcagaagctgaaggtcagactttacatttttaaaaattcaccaaggtgggattcttcaccaaggtgaagccagctggattcaccagcaaactctgtcactgaaccgaggactttttttggaaggggggcggatttcagtatatgtgcatgtgtgtatacgttagtaagaaaaaatcacaatttgtaaggtacttttacaattttattagcactatcatgtttgtatgaagcttctgaactgaattcaaccattcaagaagcatttcttaggtacctactgttgccaggcttgaagagctcacatttcagtgaggaagagcaaccaacgtataaacaacacacaatacagcaagtgcaacaaaatagatttgtctaaagttcagtaggatcccagaggagaaaacagcttccactgcctccctgggggagctctggaaggctccaccaaatgggaatattgtgggagtcctatgtgaggagagaggctggaggttcatccacatagagaaatggtagatcctggaaacacaagagtgtgctgagtctagggaagtggttgggaaattaaaatatagcacaattagttgttagaaggggaaaagtgattggaatgaggccacacaggtgagtatgcagtaaagggtatgtctcatgtaccatgctgctgtggtctgaatgtgtctccccaaaattcatatgttgaacttctaaccccaaagtaagagtattaggaggtggagcctttggagagatgattaggtcacgagaacagagctttcatgaatgagattactgcccttataaaataggcccaagggagcctgcttgccccttcctgcatgtgaggacacagtgagagggtgccatctatgagcatggagagcttagcttggacagccagctgatgagggacacatcgaatcaagatacatgacatggtgagtgctgctgcacaatattgagctgttccccctccaaatgaaacacaaatagaacataattgagcacaccagttgtctggtatcttcatcacataaatagtacatgtgtgcacatatagaagtgatttttacacaagggtgtatttttgtgcatctagtaggattcactatggtttcatttttaggtatttctctctaacctggatataaccagaaaagaggtattgatcyctctaataaatttgcctattaaaagtactaagttttacaagtgaaattattaataccatgggcggagttccattttactgtattctttttgcttatttacttctgggtcttaaagtcaattcacaggtcctcatttacctgttaattgtgcctgaaacccagtctttcccatctgtttttactagtcttatagtttatatcccttaacttttctcgtcttcctttgagtgggctcctagcataatgttttatgtcttctgttttattaagcattatttggaaatggatatgattttaatattggttatgtatcaagtaggggctccttgggctttcactgtgggtaacattcatgtgatattggtctcagagttaatgccccttttgtcctctgaaaattgtgtgcctgtaacatcttcaggagccacatggtggcaggcgcagtgctttgaaactttgtggacttacatactcagagtgtttgctttgcatcttcatctttccttcttttaaaaataatgaagatattgaaattaataaaaggaacctccaaatatctaccacccacctcaagaaataacaccttacagagttgaggtctcttggttcagtttcctcttccaatcacattccctcctcctgttttcctccacgaagaagccctttccttaatggagtttggctcacttttgtgcatatctttatactttcattacacatttatgtattcttaacagtgcatgggattccgtctttcctttaggttttccttggtgtatactgtttgtgtcactgtgcaagttgcctttttcactcacttttttttttttttttgagacggtgtctcgctctgtcactcaggctggagtgcaatggcgtgatctcggctcactgaaacctccgcctcccgggttcaagctattctcctgcctcagcctcccgagtagctgggactataggcgcccgccaccacacccagctaatttttatatttttaatagagacgaggtttcaccatgttggccatgatggtctctatctcttgacctcatgatctgccctcctcggcctcccaaagtgctggaattacaggcgtgagccaccgcgcccggcccactcacatttttaaaacatttatttgtgtagatgtgtgcttcagtgaattttcttttacagctatacagcatttcattgaagacatcactattttagaaatctgttttcttgatcttgagagaagcagggtagtagagtgatcatagatggggcccctgatgcccattccagtccccattctgtcactcaccagttgggagcccagtttctacttccgagaaatagggataccgctcatttcacagggtgttagggggatcaaatgaaatagtatgtgaagcattaacaccatgattattaccgtcattactgccactagaacgagatgacagtaatgcagactcagggcaggactaattttgtgctatattttaacttgcagttggacggagggcactctgaaagaagtagggacaatagcttggagacagctgaggtggcgtctttctgaagacttctgttttctctaacataggtggggttatctcccaagagtaatagaaaaagagggtgggatcggtgattcgagagtactgagggtttgaagtgttctcatttggggcatgatctggctaaatacatgcaaaataatttcctgtgttggtgtgtgtgctaatcttgtttgatttttttcttagcaacctgtttacctggcaaagcataaaggcttctcctctggagtcttctcttccctcccccatggcaggtgttgctgcctggagctgcttccacaactggttgtctccaggattgcacccctccccacccggaattctaaccttgtgtggcttatcacctgtcacataaacccatcagcctggctctcactcttcaaaagctgactctaaactgcccggctccccgcagtcattgctcctactgtttccagagtgaggcgcccactgttccctggctcacttctccaccttcccatgcctttgcattctcctctccatctagaatattctctcctcccttttcctggtgccattctttcacaatgtaacatatcccttaatgtatttcatatgatcttgggcaatctatttaacatcctcagatatgatacttcagatctctcattagaggaagcacccagaaaacccaggagtcctgacctgatgccttctgctgtgctgtcggtgcatcacactgcacacatatacagcagtgtatgaccttctggctttaaggaagttatgcttgttttcatccccacggttgaagtttttttttaacttaaaaatattttattggccgggcgcggtggctcatgcctgtaatcccagcactttgggaggccgaggtgggcggatcacgaggtcaggaggtcaagactatcctggctaacatggtgaaaccctgtctctactaaaaatacaaaaaaatttgccaggtgtggtggcaggcgcctgtagtcccagctacttgggaggctgaggcaggagaatggcgtgaacctgggaggtggagcttgcagtgagcccagatcgtgccactgcactccagactgggcgacaaagtgagactctgttacaaaaaatgtgtgtgtgtgtgtgtgtgtgtgtgtgtgtgtgtgtgtgtgkgtgtattattataaaactattcttttttattttctaaaaatagagatggggtctcactatgttggtcagggtggtctcaactcctggcctcaagcagttcttctgccttggcctcccaaagtgctggaattacaggtgtgagccactgcacctagcctgaaaattttcattctaatataaaaatagaagaaacaatccttatactcatcacccacacttcttgccatatttgcttcacatattcttttttcttttcttttctttcttaattatttaaaagcaaatcccagacatcaggtcatttcatcccaaaatacctcagggctggtccctgaggagatggacattttcttttataagctggtctctgagaagatggacatgctattaccatatctaacaaacgagtgataattctttatcaccatccagtaccccacccataatcaaatgtcctcacttgtcccaagagtagcattctacatttgttttmtttaaaccaagatctaaacaaaggccatagtttaataatacatttgattgatatgtctgttaagtctctcttaatctgcaggaaaaccccttctctgtttttcctccagtcattgacagagataccagctctgttgtcatgtagaattaaagttttgaatttttaaaataaaccttattttggaataattttagatttatagaaaagttgcagaggtcaggagctcagataatcctcacatagtcctcacctagcttcccctcttgtcagcaccttccattatcttcatcatgtcttttttctatgccatcaatcagtcgaggataccacattgtgtttagccgtggttgaatttttaaatgatttctgattataagttctcatctactgctgagaaaaataaccattttctgactagcaggcagtacaccgttatggtttaaaaccaggctgaggccaggtttcagtttttcactcaattacgtaataactgtatagtaagttacactttctatgtcttgtctcatcacctttgaaatgggaataataatagtactgtttcattrgattattgtaaaaactaaatttggtaagtgtatgcaaagtgcttatcacagttctgggcgcataagaagcactcaatacatctagctcttgaccaaggtgctatttcctaaattatattgagccccggggaaggaataatcagagcctttatttcttccccaaggctctgatttaaaaaataacctatcaatgttttttttcactttccttagaaatagtgcacttgctttggttctatatagtggtctcattacattttgaggtatttcacttctattttgggaatttttgttcagtagaacatagttccctagagtgttttgatcaatcaaaaatattggctctaggctgggtgcagtagctcacgcctgtaatcccagctctgtgggaggccggggcgtggggatcgcttgagctcaggagttcgagaccagcctgggcaatgtggcaaaaccctgtctctacaaaaatacagaaattagctgggcgtggtggcatgagcctgtagtctcagctactaggaggctgaggtgggaggattgcttgagccagggaggcagaagttgctgtgaaccatgatctaaaatatatatatatatatatacacacatatatatacacatatatataaaatatatacacacatatataaaatatacacacatataaaatatatatatacatatataaaatatatatacatatattatatatacacatatataaaatatatatacatatattatatatacacacatatatatatacacacacatatacacacacacacacacacacacacmtatatatatatatatacatatatatatgccctaagagtgagttttttctcttggcaggggttcttgagatcaggattggaggattaaaacttcaggcctttcttttattagtctcacagagtgactggtttgatttgtgttttagaattagaatcaccttcttcaccagacttcctttgcatgaagcagtaggagcaagtggctgcttgaccrgcttgagctctaaagtgtgtttgtggtatgaagtgttctcagaggaaccgaaatcggtgtggtcacacatcatcagtgcctcttcatacacccacgctctcctgaagtttgctgtttgtattgcttccagtgcgtgttgctgttcaacagtacccttggtttcagcgtagttgctatgatgaagaaaacctgttagaatctgccttttttttttytccagaactgttggaaacattgaataattccatgtactctaaaaggaaataaagtcttttgggtaatttggacccaaagactcctaaggaatctaggaattcagttacatagaaggtcacttctttcactagcttttgcctccaaacctgcaggagaaaaccagctgaagaggaatactcatatgagtggggactgcacctgagcacctcacgaggctcctttcagaaccctcaaaccgaccattcacaatattcacgtggactaggtctgggtcatttggagagagagaaggtgtgggctggctgaggtgtctgggtggtttctagtcagtgtttacactccggggcttgcgctgcggctcctgcgcctgtcatgcacccagtttcccagaagcttccggggttaggttgtcagtgttgagaggcagtgctagttcagacttgaccttgtgatggtctgtgggggagaatgttttaggccctgggacagtgcagtttaatgactgaaacaggaatctttgagtcaaatcaacttgggttggatccacacactcttattggttgtattgtttggtcaagtcgtttaactgctttaagactcagtttccccatctgtaaatgggtataatcacaatacatgcctcatagggttgagatggaggttaataacacataatgtgctgggtaggtactccaacgtcagttgttagtaataattatattacataaatagttgagagactgagctttacaatacaagcaaacatttttatgtcctagcttttttcttttgtaaactcgtaaaagtctttattattagagtcaaagtaggtttaaaacgcttacgtttctgtggacaagattaaggcaacatgaagtacatctggctcatgctgtagttcaccaggtctgtttgttgctatgtccacaaaagaatgtggggagaaacgttagcagtgtgggtgcttcctgcctccctccctggccctctgtgtccagtctgcccttctgccctccctccctacacatctctgtgtccactctccttgctgttctctctgtcaccaccctggctagctcaagctgctgtctgttccatggactgccatgtggctctgcacagctgtgctggtccttaccctggggcctttgctgcctcagagagaggggtcctcagcaaacaggtgggatcttgtcagtaccctgcttaagacacgggcggcccttggctctcagggtgaagaacaccaggtccttcgaaacatgccaccacccatgtctcttgtctcatttcacctcctagccctcccctcagccacagggtcaggccctcttgcttttgagcctggtttcttggatcagatccagtgtttctgtctcaggaagcttgcccctgctgtcctgctcccctccctgctgtcrgcatccactctgcaccctactttctactrcttgacatgttttaaattgtgattatatggttgataccagtgtcccctactcgactgcaggctccacgaggccactgagtctctgctgctaagagcagaccccagcctaggttagacgctcactaaaggtgtgtgaggtgcacagctgggttgggggcacaccaggcacccttctgtgttgtttcttatacttggctgatgacagactctccgcatgtgacttttgcttttttctcatccgctttaaacctgtgttcccggtttggaaggcccatgcctctggcagtctcatccccttgacaggtcctcaccatgctcgggcgcctcctccacgcgaactgccctgaacttgctctctcaccacccagaccctgcctaggcttccagtctctgccaaccagagatgtcctggtagacactcttccagatgctggggagggtgtggacacatacaatgtatgtacatatgtggtctttgcatgtgaaatagaatctcttagcttgtatcctatggtctttttttcattcagtggtagatcatgaacacacatttttatgccaaatacatgtttacattatcattttcagttgccatcagtcactctggcatagtaacactacataggaaataaaagtttttggaaaacttttgtctttagggctagatacccttaaatttctaaattagatttgtgtcattgaattgaacttttatatcggagttaggaaaaaataataaataaagggataatacagatatcagaaacgtggccacacagcttgttatgtgtgttgttgcctttaagattagactgcacacaaaacctggggagtattttgataacctggtaaaaacaattttgaagtgaaagttgatgtgttgacaatattggctatagtcatgaacctatactggggtggggcaggaattgtggtttattttttaagacacaccccttgaattccagggcagggagaagaaccgtttttgttctttctggtcttcagaatatcggaactgttagcttgcaagtaactgttacatktctcctctcacacagaagtatttaacctattggatttttttgtaatgacgatttagtttagaaatatgctgagcagatatagatacgctagaatctatagcgtatagttgtatgtatagttggtggtcaggcagaacggatagaaacaatatctaaaaagtgatttcaatacatatatrtgtatctagttttaagtcaaattatgggaaaatctggatttgtggaaagctctcatttgtgaagagtaccactagaattccttttaaaaataagttcatttagggaaagaaaaattattctatgtgctaaagttttagctttatatgtagttttccagaagcaagtttactacattgagtgagataccctctattttgccctcagggaggaaaagtgcagtcctgctgcaagcttctgtctgtgttccttccctgaaaggtcagcgctctgttgaggaggaccctctgttctctttgggtcgggtggggggtatggtggggctagggtgatcagcatgcctttttgtggtccttatctacyctagagctcttatcctcaagcagctttgtgaccaaagaaaaggtgttcatggagaaggatctggggagcccagaggctgttcagggttctcctccacacyccaaaggcctggcacactgatgcctttgggaaattgctgaatgtgcagagcctgcccatgtgtacctgctttattcaggaatgagatttctgactatatgaagaaggagaaaagtgtgcttagtcagggagtcatgttgcacaggtcctgtctgaaaaccaagtaatgttagcctgcagagaagaccatggaggtcacctaattcagccacttctgattcaagtggaacaatggaggactgtgatagttaaatgacttcctgtgtacttataaggtagtcacagcaagggagtttccaaacgtggaactgtcmgctaaatgtctactggtcacctcttgtatccttccactaacctaccttgtactctcccttggccccttgaaaacgtgggattggataggttacttagaatttcattctaaattatttggaaatatacctggaaaatttgcatattgtatcagtggcttttgagaacatttgataatggtctaaattgaagactgttgatggccccatgttgctggttgtggaagaggctgctgtatgagaatgacacaggcaagtttgcatgggcttttttttttttttttttttttttggatataggggtcttactctgtcacccaggctggagtgcagtggtgtgaccatagctcactgcagcctcgaccttccaggctcaagtgatcatgatccccccatctcagtctccctcgtagttgggactacaggcactcgccaccacgcccagctaattttgtattacttgcaaagataaggtctcactgtgttgcccaggctggtctcaaactcctgggctcaagctgtctgttcacctcggcctcccacattgctgggatcccaggcgtgagccaccacactggcctcacatgagctttaatgacagctcagcctgtccagtcagatgtgtcagaggtccaggaagcctgattaaggagaaagttcagaggggcttgtagacagttgcaatattatctgcttgtgagtgggaccatattttcatgattttttttttccacacagtgaacagtttttgtggacagatgcttctgccttctcatactctctgctccagttagcttgaccttgagcctactcgcaatggtacatcgttgaacccttttctgcagcagatatatagccctgttcttccttcaaatttatagcctagagcagtcttgagaggcctcacttaggaagacagcttggctggcaaataaatgtttgccagatgaatgtgtgttggacatagtatggagggatattcttgctttattagataaaatttgattttccctgtaaatgattatttatgagataaaacataaactaaaaatgattcatttccatcaagtgcaaagttagctgcaaaacataacattcttcctttatgtcacacagggaaattaatggcctggaaatgtacagctgctcaaccagtttacgagccattagtacctagtgtactggcagtgagccccagttagccatggaaaccagcttgcagctttcttaactctgtataggagaaataattgatgattcagtaacattaatgatcatatttacagcttgatgtttaattaggtttctttaccctcttatatctgaaggggttaattgcaacaggatgctaaaagctggactatgacaagtttaggcaaaaatccaggctaattttttattcttatcacaaatggaaaatgtttatacttgtggaaggtactgttcaactccacaaatatgaaagcttcagagttttagtctcaccaagaaagtaaatttttccaatactgtagaagaagtgtgtcttttaaaatctcatttaggtaacattgagtgttacatgcagaaatgaaaaagcttcaaaactctggagatttcttctcaaacatgacattgtaaaatgattaggctctcaaaattaattggttgaacaactaaaacataaagcttgtttaacaaacgtgactgtcttccatgtccctggccctatagatgcagcggtaagtgggatatggggtttagaaaggtttctcggaagagatgatccttgtagtgagtcttaktgggatgatcaggagctagtcctgccagtgatccttcttccagtcttaccaagccatatgtgcaaaggctagaaagtgagaggaagcacagtctgtctgggaaactcctggagtccagtcctctcagctgggatgggggtgtgagatctgctggagtcaaagtacagattcaaggagaacccagcagtttggaaaaaaggacagaaagttgtaattagggccagaccaattgttaaggcaaatgtcttattcccagtttttgtgaactgttgttcctcaagaaccactgggcatgtgggggaaagccccaggagttttatgaggtagtaatttccccatcactgcaagtgtccatgaagagacaaactcccaggtcatagatattgtatagggatgargccatggggaaaatgacggtggggaattctgcattgaatgagagtctggactgaccttcaaagatttttttagagtgctaaaatgaaaaatatctctatttggaaacccgcagaaaatgcatttatacaggcctccctctgtactgtcaaaatcatgctaagacagttatttgaaatttgaaacccttttaaatagggcctgatctgagaattcaggcataattaataattccatctccatgggaaagtacatttgaaaggaaaaatagatggggactcctccctgtctttgtcatggccctgctgtgtgtcctgggtgtttgcccatctgacccccttccctgtgctgatgtgctgctgtctgaagggtgctggggagggaaagcagtcctctctctctctctctctatcttcagtgaaaagatcctggttaggcggggcacggtggctcacgcctgtaatcccagcccgttgggaggctgaggcgggcagatcacaaggtcaggagatcaagaccatcttggccaacatggtgaaaccccatctctactaaaatacaaaaaattagccaggcgtggttgcgcgtgcctataatcccagctacttgggaggctgaggcaggggaatcgcttgaactcgggaggtggaggttgcagtgagctgagatcgtgccactgcactccagcctggcgacagagcaagactccgtctcaaaaaaaaaaaaaaaaaaaagatcctggttaaaaaggccttccccaaaggcccagaatttaattttactcagctgtggcagtttcatcagaacataagcattgatttgctgaagttcctgtttgtcagtacagcctttttaaaagtcagagggcaagaattgtttcagctcgtttgttttatggcttggtaactgtccctgttactgctctcccccgccccgtctaaccccctgcacatccttttaacactagtctcatcaaatgcaggattcatcctacacagttaggtgtttcctgtctggttaacctttagtagtcaccaagttgttttcccttgtcagcaagctgcattaatttttaaaaactcttttaaaaataagcaattatttacatttcctatggagacaggtcatatttaatgttgggatttctgtatttacaatgaatatacaattgatttgtgttttattcattaggcgtctattctgtgttgatggtgggggaaaacaaggaagattagtggttgtttctgttctttttttttttttttaacttgtcttgattttaaaaaacgaaggctgggcacggtggcacacgcctgtaatcccagcaatttgggaggccgaggcagttcgatcacttgaggcttggagttcgagaccagcctggccaacatggcaaaaccccatctctactaaaaattcaaaaattagctgggcgtggtggcgcaaacctgtaatcccagctactggggaggctgaggcacgagaatcacttgaacccgggaggcggaggttacagtgagccgagattatgccactgcactctagcctgggtgacagagggagactctgtctcaaaaaacaaaacaaaacaaaacaaaaagaattggatacttcaggagttctaaattgaaatgtttctattactgtaaactaaattgtttggtatttaaatcttctacattctatttgtttttgagtggcaatatattcaaagttcagaaggtgtagagtggtgtgtgtagtggaaatgcttccttctgcttctgtctccccaggtccctcagaagcagccagtattaccggttttttgtataccctcccggagacagatgtaactgtcaactgattttttaaaacgtgtttcatcactcattaaatctagtgtagtgacaaaaatggtaaattttttccctgcatctttaaaaacatatgctgtgtttgaatggcaattatgaaaagtcatttgtttttcctggggccgtggacctagcgtaacaaatggtagccctcaggggaactagcatctgtgtcctaagtgaaggaataagatgtagacttccctttcctatgggttgccttaatttttgtatatatagagcagattctctcagagatgggaataactctctagctcttagtgtaaaaatattatcagacccatttctctgtgttcttgtcgagaaggttctaaaaggaaaagaggctggtataaattgcccagagaaaaattcctagaaccatttagtcaaactactggctaagatcttgctgggaggtagcctgtatttgtggtgtggtcctgtgttcccagtgggactgaagtggattggagggccgtgctgtgcctgctgttgggtagcatcactttgagctggatgacgaaggactttccccaaacctgtcctctgttgtacacatccccacacccaaaaccttcctaacattgtcactttccgaggtcaaatgtacagataaatacagggtatataggacccattccaccttaaagccaayagcattgtgtcagccggggtggcctttcctacgagagggcattattcacagccagtaattacaatgaatgaaggaagaaaccatcttcctttcagttatgaattcttcagtaatatttaatgaggggtgggtggaccaaagacacttccttcccttctgaagaggatttagagtggagtggtaagggggaggaattggactgcttccckttagaattctgcccctcctctcctttttaaggaaaatgtccctaaggagctcactataaccaggcggttctttaaactgacaactgcctgtgaagtgttgatggatttcctggcaaataaaacagcaggacccttctttagcgactaccttactggagctttttagcccaattttagttcagagtggtcctggcaaggtttttaaaggaattggtgtgattattcataacaattaaattttgcttattaataaacaagtaagtaacctgccttcttggtcaccgcttcccccctccccaaggtgcgaggcccagagataaggcaagttgtgccttgctgaggagggtgtgtaccagtgagaaacaggaagctgtgcttcagcagcttggtctgcctggaggtttctaaggctgagtcaggtgtgctgaggtccctcggcaagggacgctgctttcccctggcagccacactgctgagcataaatgctttaaagtgtcagcaattgatgtgtggagagaagtatgactgcattacagcttaaagagctttcacattcaggtctctacaggagaagacgagatcgccccgatagtttgagagtaaatgggttaccagaggaagagctaaggtgagtgcaaagtcatggttggctaaaggtcaagacatctaatctagtaagtgcagtggggattcatgcctaagtggatgcagcgttgggaagtactcattgaaaagtagcctcttagtctgtaattaaaaactgaacacaatatcaagattgtactgattggaactgtgcaaaaccagaatacttttgcccatttcttcacaaatcctttaagttgttttaccccttctccaaacctacagtgttgttatgtctttaaaaattatataatcaccagaaatattttaaattgaaaacaactgatttttccacttagtttaaagagagttttctttggctgattggaacatgtttttgtctgtgttttgatgaaggtgggtagtttgtggtggtttggggttgggggaggggtgccatggagattgttactgaaatggtgtaacaaaggaatgcagtggaactattcaatgtagcctaggaaggaaggacatcaaaaacctggaaacctttttaactaaaaaggttagagttcttggctttcaaagtgaatttccctaaaacaacacaattttatttttttgttgcaactactgaaaatttcttagatttgaggttctgaaagcctctacaacattaagcctatgtgttaaaatactgcattaactgaagggtttagattttccctgttcctgggatgttcctgttttactgatgacagaaggctgcagtaaagagagacttcctttttttaaattacatttactgtttagtactttaatttggaggtcttgatttaagtgtttgaatattctgattagatggcgggaaggctatctatactttgtgtactattgttctttttcctacaaactaacttccagagtttattttaaattctctatttaaatgtaacaaggacaaattgacaagcttcaacttctctattaaatttgtatttgtcacagacagctatactacagtaactgtaatttgctaaagaaacatttattttaaaattgttgactcaccaatttttgaagagggtagcattaaaggactattattgacactaacattattagaacttatcgcttactatgtcaggtgtctcttagctacatttaatgtattaactttgaattgactggattaaacaatttaaaagtctcagagtttaaattgttaagaagtttgtatgtgaggttagtgaaaatattgagctctatattgctaaccagatagacaattggaagtgacctctgaaaccaacatttattggtagactccagtctacaatggatccaagagtgaagttaccaaaaacagttttaatttcagatttcggggtttggaggaatttccttttttaaaaaaattaagttatataaaaaaaattctaaaccaaccttttctttattttcagacaatagccaaagtactcatgagtaaaataacgtatatgccaaggaagtagttatttacatagttayaatgctctttcaaacaactagattttttttttttttttttgcttagaatttaattaaaagaggaagaataattcttaagtattgcctgttctagttgtttaaagagaaatattttgtcacccattctggtgatgtagttatctggtcatagaagggacttgtatttctgccacttttgtctcctaatgtagagaaaatgatcattttccttattcagaagtataggttagccaagaaaggtaaaccattgtctgtttatgcctggmtttttttttaatcagcttaggtgtatttttttttaccctagttatactaagcctattttcaggattaaatgaggtttctgagctaataggaatcaaagagagtaaggactttgaagttaggtacaccagagtttcagtaccactcagttggacaagttatataatttttttaagtcttggtttattcttttttwaaaaaaataaggataaaaataactactattattgaacattatttactctctcacagaactcaaaccaccaattcagtgaggcaggtggcattgttatcttgcgaatagtgccatacagttaattcattgtttaattgttattgagtgcctactatttgcaaagtaaagatacagtgaggaataagacacaggcctcgccacaggaacacccacctaggtttgggcatatttaatatgaccacagattttctctccatgaacaattatttgattttgaatacctgtgctatcaaacatctttcatactgtctcaagtattgcataagacccattccagctctcattccttcttactcaagtgttcatttcttacgtttgtggactcttaacagaaaaactttcagagactaaaattggccatggccactgccagaaaacattttttgctcttaaagtttaaataaaaggctgtgctctgaaacacgagatgcacgtgcttaaagagcactgtaatacacatgaaaatagttcyggcgtcaaacttgaaattgttcaaaaccgaagcaggtaaaaggtggcatgacaaacactgggcttcctagacttttgttttaaagtattaaatatgacttgaaactgactttattcacatactttgtacagtggagcattacccactgtgtttgtggttacagttagagtgaagtgacacaagtgacatgcttgttccagtgggtcggaagccccagaccttcacaaggcattgacccttttttccctgaagtttttggtgtcccaaaataacatctaagatatacccatgtacctacacttactcctttagctattctatcttttaaattatgttgcattcaaacatagttgttttttgacaatacctgaatgacaaacacacctgagaaattcctgccctttaaaaattctcaaagttactttttctctgcctcagatagaagggatctataaataactgattagaaacagtacaaaattgaagtttctcctggttgggttcaaaacagcttaatataggggctggtggctggatgcagtggctgacgcctataatcccagtactttgggaggccgaggcaggcggatcacttgaggtcagaagttcaagaccagtctggccaacgtggtgaaaccccatctctactaaaaatacaaagattagctggacgtggtggcaagcgcctgtagtcccagctactgtggaggctgaggcaggagaatcgtttgaacccaggagacagaggttgcagtgagccgagatcgcgccactgcactctagcctgggtgaccaagcaagactatgtctctaaataaataaataaataaataacaatataggggctggtaggccgggtgcggtggctcacgcctataatcccagcactttgggaggccgaggcaggcagatcacctgagctcaggagttcaagaccactctgggcaacatggggaaacccagcctctactaaaatataaaaaattagccaggtgtggtggcgcacacctatggtcccagctagtgaggatgctgaggcacgagaattgtttgagcctggaaggcggaggttgcagtgagccgagatcacgccgttgcactgcagcttgggctacagagtgagactctctcaaacaaacaaacaaaaaatatatataggggcaggtgaacttatgaccctcaggccaaatctggcctgctgcctttttgtgtatggcccatgagcttgggatgggttttacatttttgaatggttgaaaaaataataaaaatatttttcacatgtgaaatatatgaaattcaaatttcagtgtccacaaatgaagttttactggaacacagccatgcttatttgtatgtgttgcctgtggtggttttctgctacgctggcaaagttgagttgtgacacagaccartgtggcccacaaagacaaaaattatttaccttcaggcccttcacagaaaacctgggctgacccctggtctagtgctgagataagaactcctagagctttcccttttccctgttccttcggccatgcttctgccctcctcactctctcacctcccagttaggtttatcttgcctggataaaatcagggctacgtcagccatttgaaaagaatatgaatccccccccccaaaaaaatgcagtttgaaatttgtatccctaatagtttaggagtaaagtgaaaatgggaagttgccacacagcagcagtgagctcttcgcttcttagacctcctttcctcctttcctgcagcgttgaccttgaagtagtacccttctcctgattcctggatggatcaggttaaccaagaatggaagtgcaaagaaatgtaacctttactttctggttatagaataaaccttccaagctcatatttttatagatatagcatataaaatcatttttaagtggtgggaatgtccttgctttggtttgagagtgaaaactcagatcatgtgttcctgactagtacataaccattaattgaacccctgttataggccaggcactgcattaagtaagggcttttgtgtgtgtgggcccaccatgtctcatgatcccgtaagagagaaagaactgaaggctataaaggtggtcattgttatgaaaccagtttctgtccttgattcaaataagttagtgcttagaattcagtcaacgttggagtagctcagcctaggctgtgtgtttcttgcatacctcttttgcagtttgctgatcactttttggcccaacttttaactgaaaaattatgtttgtattttagttttagaaatgtagtctgttagacaatagggataaaattgcagttttgccattatcttattatctgatattatctgttcttattatttggtggttcagtgagggtacatttagtcttcccaacaatgagcaaacacatgggacaattaataagaaatatttttctctttgctataggaaagagaaaaaccacttgctagtgttgctttttaaaagttcatagtgcttactcctatatgtttgattgtaacctacaagtacttatattgtaataactggttttacagaccccctcttcacccactctcacctcccacccccatataatagagaggggattcttcaaggcaagagactttaccatatttcctgtgcatctagcacgtactgcagttcagaatctgtttctcattgaatgagtaaaggaatgagaaactaaactggcctaaaggtacctcttttattctagattaaactctttacactctactttttaagtcttaattattaactttttatttatgtacagtatcacactgagagaagcctaagagacggatgtatctatcagagtatagatcatgattattttgcttttctctttcagtagttttggaaagcttagtttccaaagggaaatgtatttttcagtcatctaaaatatttctgcatatagtcatgtgctgcataaaacgtttcagtcaacgagagactacaaacatgacagtggtctcttaagattacaaggaagttgccctatgcagatgtaccattttaatcttttaaaccgtatttttactatactataatatttttagctattttatatatacacttaactgttgtgttacagttgcctacagtattcaatacagtcctgtgctgtacaggtttgtggccttggagcaacaggctataccacgtagcctaggcatgtaataggctgtactgtctaggtttgtgtatgtttatgtgaacatttgtatatttatgatgttcacacatgactaaatcacctgatgatgcatttctcagatcatatccttgtcattaagcaatgtatgactagtagagggagtttatgctgaaattaaaaatagcagtgttgatgcttaaaaatcaggtctgttaaaggaatgataagaagtaaaaagttattgaataatgatccctttctggtttttttttttttttttttgcactgctataggagacatttaggaacgaaccgtcaactttaacagaatcaatctgtaattttgttgtcagtacgcatcatattatctaaattatttattgtgacaattaaatcccaaaatttcaataatttggttgctttcctgttggtttttaaaaaagcaaacaaaatcttgaagtctcaggtataaattacttataaaagtcagaaaagatagttgtccaaaacttgtgctttacctacctgactttggatagatgttattaaaaggaaacagtactatttattctacatgtatgtatcttagagacacagcaactgattatatgtctgtgctactcattggctattctgtgactaaaacaaactttggacgtgaatattttcttatttaaaaaaatcttcttttagaagtaattattaaatatgtttcacataaatatgaacctccttaagtttttttaaatggttatatctgtttcctagggctgccatcaccaagtaccataaactgtgtagcttcaaactacagaaatttgttgtcgtagatttctggacaccagaagtcagaaaccagcgtgtcagcagggccatgccccctctgacccctgaagggagatgcttcctttcctctccaagcaccaggctttgcctgcagtgctgagtgttcttgnnnnnnnnnnnnnnnnnnnngctttgcctgcagtgctgagtgttcttgacttgcaggtgccttgctcctgtttctgcccttgtggtcataaggccatcttctcagtgtgtctgtcttcaccacagctctggtcactttcccttgacttcttgaagtttgacagcagtaatactttcttcttaaaattgtctcctccattgtctcctcagccctgccttttcctagttttcctactggttacttcttttcagtttttcctttgtctttcagtgtctcccatggctcttgagtatgtatggctcagataccatccatgtgcagtcactgtcaaatcaggccaagagtcatttctagctctcacttaatgactagcaccagtttaaactagggatttccagttaatatttgtgaatcgataaatgaatgaaatgagctatgaaagcagtttattggatcatttattgaagaggcagtgaaatcaatgttgcctaggctgcagtgagccttcgcctcccaggctcaagcaattctcccacctcagcctcccgagtagctggaattacaggcgcaccaccacgcccagctaatttttgtatttttagtagagacggggtttcaccatgttggccaggctggtctcgaactcctgacctcaggtgatccaccctccttggctcccaaatcgctgggattacaggcgtgagccaccgcacccagcctcagtgcattaatttttgaagagaaatatgacagtaatgagttttatgaaggttcttgttttttctgagacagggtcttgctctatcacccaggctggagtgcagtggcacaatctttgctccctggctaaagtgatcctcagccttccgagtagctgagactgcattgaaatatttttttaaaaagcagaatacttatttgaccatctatgcttaaagcaatatcagtaggtttggtgtccatcataagcagctgtgcaattcaacagaaacgtattgccatcacctttgtctatctatgttgccatctgctattatagctgtttaaaggaagactgttgtgtggtattgggaggaaatggtacattttattgtcagaattctaattgatcggggtaatgagaatgaaaaaatggcagtgttatagggaagaagtattcgtatgcgtggaactagaaacggatcacaacttacatgttggcttctaatttgtaatgtttcaaccatgttcggatggaaagaagatgtataggattgtttccaaaaaagtttcttctctatgaatgaacttaggatggtcttcagagatatatataaagaaagagaggagacagagactgaaattgactgcttcaactgtagtgagttaactttcactcataatagaaatagctagaggttggattatttcaaaaagccagtcagtgtttttagagcttctgattctcacaagaacagatgaaaaaatgcaagtatcagttatagagaagactttccatttgagactctcagaaaaggtgtgggtggttactgtgtttgtttgacattgcatcctttaatgagcttgtttagtacgtgaggaagtggaactttaccttgggcctctctgaagcccagtttcctccaaatataaaaagaaaggcttggtccattcagaagctttaaagagtcatttttttnnnnnnnnnnnnnnnnnnnnnnnnnnnnnnnnnnnnnnnnnnnnnnnnnnnnnnnnnnnnnnnnnnnnnnnnnnnnnnnnnnnnnnnnnnnnnnnnnnnnnnnnnnnnnnnnnnnnnnnnnnnnnnnnnnnnnnnaaggccggcactgtcgctcatgcctgtaatcccagcactttgggaggccaagccgggtggatcacttgagtccaggagttcaagaccagactgggcaacatggtgaaaccatatttccacaaagaaatacaaaaattagccaagcgtggtggcgtgcacctgtagtcctggcaacttgggaggctgaggctggaggattgcttgagcctgggaggttaggctatagtgaggtgagatcataccattgtactccagcctgggcaacagagtgagaccctgtctcaaaaaaaaaaaaaaaaaaaaagaaagaaaagaaaaccagaagacagcctgcctcacttaaaattgtgattttaaaaacagtgaaattcaggcatccctgtagtgagcctccttcgaaattcactgcactgctataggaaatcagagcttaattatgtcacacttacatgctgaagaactcagggatccaatgatacaatgtagggaatttgtttcaaaatattttatggttgatgagtagataaattgatcacgacttgatgactgttggagttggataatggttcagagggattcgttatactcactygtttaatatatgtttgaaatcttcagtaatcaaaggttttaaattttttgaaatacgtatcatgacgaatggcacagttttaacgtttcccttatgtgtaactaacacattatactttttcatttatttagggcttatctgatgagtggttgtgtcccatccaaacatctatcccagtagtcaggaatataacaaagcccctgagattccctctgctgtcagctacctgtgtgtctgttgggatataagccacaccaggatttcaccacccatggctctagcatgagtaatttggaggttgagtgggacgaggaggaaaaatgtaggattctttaccttaatctaggctgtcgttctatggtaatcattaagctttcgtattttgtgttggaaaaaaacagtatttcttaatgttagaaagtgaaaatgataatgtaggggtaaaagattagattcagaaaaatgaacatctcaagttactgcttttacatctgtggagcagggatggaattgtttgatttttcagacaattaaaatttattatgacaggatgaagttggcttacagagtgtgggacacttaatgagtcagcttctagcctctggcttaagaatggggtagactagcctctggcttaaagaatggggtagactgacttggactctcatttaactgaagattttattttctatacctttacttgataatatatacctccgcccttcccttcctagttttgagtgtaaatacacttgttttaagttgctgagtgagagtgggtgaggagtctgggtatagcccactggcctgggtccagtgtcttgaataactacttagtaattgacttctgcaagtcagttatttttaggagctttgagtttctccctttgctagttgaatatgatctgtaaaagaagtgaatgttcttatattaacagatttagacctactcaaggaggatttattgtgtttcattttaaatatcaaatgattgtatgctgtggaacaaaagggactctgtcttggatgctaatctaccgtgttgccttttttttttttttctaagacatctgttatagcatgccatgttgacttctgattagcctcctttgagacctttgaatggctcctgattactactttacttactgtccctagtggaagaacatgtcaacctggatgttgtcacacagactccaggctgtgatgcgtacggcatccatgttctggagggttgtctgcacacgtgccctttcttcatggtctgtaagccctgggtctgggagcagtggtgcagagatctgcctgttttgtggctgaccaagaccacacttctgtctgtaagttccctcagtaaatcacccaataccaacaaaatagatttgtctttctccttctttagtttctcagctccttcacatttggaaccgctttgcatatatgcctccttcacagaataggtactttcgtgtttgtttgtttgttgagatgcagtttccctcttgtcacccaggctggagtgcagtggtgcaatcttggctcactgtaacctccacctcctgggtccaagcagttctcctgccttagcctcctgagtagctgggagtacaggcgcctgccaccatgcttggctaatgtttgcatttttagtagtgacgaggtttcccattttggccaggctggtctcgaactcctgacctcaggtgatccacctgccttggcctcccaaagtgctggaattacaggcttgagtcaccgtgcccagctgatactttccctttttactctttgggaagccacacatgtttgaaaagcagaaagttaattgctttttacttcctaagtaccttgtgtcagtgatttcatctgctaaattcagccatcttctctgccttgaaagacaccatgttaaaagttaagtgctgatgctgcataggatgtagggtccaggtgtctcaaggtcaggcaacgcgcattctcagagtgtgatgaacagtgaaggaaaactcaagggaggatatgcccagagtcctgatgttctggacaccttgttctttatcaggcagtgctagatcttattgcacaaaatggtatttggggccaaatgaatggtaagcgagccaaagagaagcctctctgcctcctcagctttgaaaatgtaagagggaatgcagatactgctatagaatcaacatgtgagtagtggcacttcagcaacttctacagagctgtacatgagtgcctgggattgtggcctcagagaactggaatactggctcaggctacttaaatgtagatgaaaatattaaaccaaaaggaaggtaaattgaccttgaaaagtctgtttatataagcagtttacttacaggcaatctgtacctgcatagcaagtgtacacattgatttctgaatgagaaagcactgacattgccttatgagccattatgatattgttcttctgattatgtttgtgctcaggttaataaagtgtaccaggtgactcccttgtccccttccccctccactccaggaagcatccrtgtatcccctgctctgctctgaaatagaacatttaatgttcatcatgacggcagtggaagatttggttttgccttttgaattattcctgctcttctgtccctttgtttttgccagcatcttaattcttactaattgatttggtgaggttatttttatgtattcttttaacacagaattattttttgtgtttcagagcagttttatttcaaaggataaaactgtctcttgaaatagtcatgtggtgctttgtctgtaataggttagaatattgccatccatagaagagtaaaaatgactgctgcttttaaataggcttaaattattgactttttatacaaccagcataggcgctgtcattagagcgtcagacctcttatattcagtcygaacatagtccaaatagtcaccrtatttattagtttatttgaaccactctcaatttcaccatttgatttgctttcctaataggttctaaactctttgaagctcagttattttgttctgttttctcagcctatgaatttggcctcttgccaagttagttttgattacatttttgctttttcatttatgagctgccataaaagagattgttctgtcttatgctttactaatagttggttaaaggtttgacttaaaagacttggttggcccagagtcatacaagtgcatgtttgccattctgaactgaaatccctggcgacagtgctgtttataaaaggattagagcagggagttttgttgccctaaaatcaggaaaattaagttttattttatattatttaagtaattaaatgataagaaatttacacacaggtgtgtgtgtgtgtccatccttgtgcctcaattrcaaaatttcctgaaataatctccctgagctccatcgtggtgtttctcccaccaagcttttcttgtgattctgtcttgcacaccaccgttctttagaagtagtatttcttggaggtttgtgtttgagatggggactggatgctggctgtagcctctttgtggctccaaaggaaagaggagggaggattgtcctcaaagactcttacaagggtagagagggaggaagcaggctgggcaaagctcaaggaagtccatgcaataactgacctgtgtcaggttggggtctccttctagcaggatgtctgtagggggagggaagaaggactgcagggctctctggtgtgccagctgccagctctcatgcagcactcagttttcagtgactctcatgttaattcagcatgccagctgttcaatttaatgtctrtaccaatggggaatgggagagaggtagataatgaggaaagagaagaaataatgaggtaatatgtcatctcctaaaagctcattttgtaacagaaattgtccagactgttactgcattacattttaggtttttctcaatcccctcagaaaacaaagaagctcatacagaacattgcccctaccactagcaagaggcaaatctttcagccctcccaaggctggctttcaggctcctgaagctgtgccttctgaatgtgacaccttgtcctggcsacatctctggagagacgccacacacatcagtgttaagtggtacacatggtccttttcaccacaaatgtcctgaaatcgagggactatttagaaaacaggcggctgcttcattctattgtgggagtgatgtgacaggaagggaggctcaggaatgaccatgacaggaaagcatgtggagcactcacagtaaagcttcacagaagccctcacggccaggcgcagcagagcacagcgactgcccaaggagctgctgtcctagccaccctcccagtcatcttcaagaagaacaaaagttcactgatcgcctcagttcctttattctcctcttgttcttgaggactgaccaatgggtgtgtgtccctgtttgcctctttgctggggtcacagaggaacccaggagctcacattgagtggcccccagacatgtcactggggccagaaagtgccatgaggatgggggtctacactggggtgtggggtggccatatcttctggccctgacttgaacaatgagtccatgtgtggcctctagtttacataaataaagaatggctgtggctgggcgcggtgactcacgcctgtaaccccagcactttgggaggyccaggcgggtggatcacctgaggtcaggagttcgagaccagcctagccaacatggtgaaaccccatctctaaaaatacaaaaattagctgggtgtggtggcaggtgcctgtaatcccagctactcagggggccaaagcaggagaatcgcttgaactcggaaggcagaagtggcagtgagctgagattgcaccatcacactccagcctggggggaaagagcaagacttcatctctaaaaaaaaaaaaaaaaaaaaaagaatggttgtaatcccagcacttcaggaggccaaggcgggtggaattcaagaccagcctggtcaagatggtgaaaccccgtctctactaaaaatacaaaaattagtcaggcgtggtggtgggtgcctgtaatcccagctacttgggaggctgaggcagagaattgcttgaacccaggagggggaggtttcggtgactgagaccgcaccactacactccagcctgggtgacagagcaagactccatctcaaaaaaaagaatgaggtagacagacttggactcccgtttaactgacaggtttattattctgtacctttacgtgataacacactcctcccccccgtctgttcctagttttgaatgtaaatacagttgtttaaatcgtctgttcctagttttgaatgtaaatacaattgtttaaattcctaagtgacatcttggagaaagagcccaaaaggtctaagtaccatcagctgcagagtcctcacataggctgcctctgtcggcctgggtccaaccaggagagaaaacccacacgctaatttgaacaggaaaggtttaatataaagatagaattactaactctaacaaggttttggagtaataaggaattggctagtaagaggagagaaagcaaaagagtataggaatagccgctgtaaggagcagccacggaccctagagctgagttagagtgccaagggaggagccctactccgtgcccggggtcacactaccagggcatgctgcatgcagaaaagtcgctggcacagattgctggaaatcctcctttccaataccagagaaggctgttcccagtgagttccctcacccaaggtaccccctacatagctgactgccaagggatgggtgctgctggctgcatgcaccatcagggtccaaggcactctgctgtaaaacttttgaggggccagtgccactgaagctggtgctagccaccatgccctgcaggagctagacaccgaagaagccagagtgctgcaggagctttgcccagggagcaggcaggactgggaagcaaacctcttcctcctgcagtgtctctccagcaccctctactgacaaggtctcagtgctgctcatagaggacaaagattcacagaggtagcagtaactgcatcaccagcacctagcaatatcccagtgatgcctcctacaggacacaagggggtctgtctaagtgggtaattgccatatttttatatattattgctagatgtatagaataccactttttgagaagaggtaaggaatggaataaagagcttcctacttagccctgtgaactgctttcaaaaaccatagcttcattccgtgacagagaatggagagctctgtgtggggagagaggaaggttgagcacaggagcctgcagaacaagaggagtgactgaggcccctgggagatgctgctagcctggttgtagctgggcagtgttacatgagcaccagcttacagtggttgacctcctgaccttatactatttccacatcttttttcattgtacttatggcaaaatctaagttatggtagctgaaataatcccttgcctttctgtgtacatttcacaaaatttaaagttaatgaaagaaaagaaacctttttaaattcagcaaaatatacatatatgtgtgtgtgtgtgtgtgtgtgtgtgtgtgtgtgtgtgtgtgtgtgtgtgtattttagttcctctgcttcatcctggtcagtattttcaaatgctgtttaatgcagtaaaatctacacaaaacatgttctgtgtcaaaaagaaaataacgggcagtgaaagatatgtacatttgaatttgaaaaggttcattgttttcacttgactcaagtgaaatgttttttattctgttctattctgaaattctcatggttttcttttaccttatcattgagggaagtaaaccccgtgttaagcttagtcacaaaataaaaactcccacggacttccctcccagtgtagctgaaggttaatgtccagggagatagccttgactgagtcagaactaaaataagggtgttatttagagccagatactctggtgctacagccactacagccgtgtcaagagctcctgacacactggaggctgtcactggtgatctgggcgttctcctaagtcagcattcctagctaaaaatactgccattctgtattggaaacacagcttcctctaatttgtctgttttgaccagaacacaatgttatctttttaaaaagctgtttaggtgtgagaatgtatgttaatggatcacaatacgaataaaaataaaagaatgaaaagataagtgatttgaaatataaaggaactagtacagagacattttctagttaaagtttctaaatggtcagagaaaaatcacctaacctatgagagaaaattttaagatttttttttttttttgagacagtatctcgctgtgtctcccaggccggaatgcagtggcatgatcacagctcagtcatagctcacaggctcaagcgatcctcctacctcagcctccttagtagcgcctacaggtgcatgccaccgtgcccggctaatttttctatagagatggtgtgtcaccacgttgcccaggctggtctccagctcctgagctcaagtgatcctcctgcctcagcctcccaaagtgctgggattacaggcatgaggcaccatgcccagcccaagaatgtttttaaattgactaaacactgcttatttgagggaccatgggagaaaaaaaaattgtgaggtggcttatagatttcaaactatagtgattctgattgatcgagctgtctttcttgaggaaagttacgccaaaggcaacgagctagactgagctgtctgggtgtctgggtagggacgcagctcaccagggcttgccctctttagatgccctctgcaggcagtctagggacttctctcaagatgtccagtttgattaattgcatgatgacagtgtgcttggtgccatgaggggtataaagattcaacagaggctgggcgtggtggttcacgcctgtaaccccagcactttgggaggccagggcgagcggatcacctgaggtcaggagttcgagaccagcctgtccaacatggtgaaaccccgtctctaccactaaaaatacaaaaattagcctggtgtggtagcacatgcctgtaattccagctactcaggaggctgaggcacgagaatcacttgaacccaggagatcgaggttgcggtgagtcaaaattgcaccactgcactccagcctggcaacagagtgagactctgtctcaagaaaactaagcacaggctgggcacggtggctcacgcctgtaatcccagcacttggagaggccgaggcgggtggatcatgargtcaggagatcaacaccatcctggctaagatggtgaaaccccgtctctactaaaaacacaaaaaattagccgggcgtgttgataggcacctgtagtcccagctactcgggaggctgaggcaggagaatggtgtgaacccgggaggcggagcctgcagtgagcatggatcgcgctactgcactccagcgtgggtgacagagtgagactccgtctcaaaaaaaaaaaaatgtctacttaagggcctcctggtgttcttaaggagatgaggagcacctttgcgatacagaacacaacattatatccaatgaaaatcttacccactcactgcatgggacacacagtgggtgctatggctgctgaacagaagatcgataaggcctggaatgtcaagaaagcttcctggagaagatcttgagcaggtacttgaggactgggcaggtttctgataagcagaaagttcaggagaaaaaaaagggacagtggtattcatccagaaaatcgtatgtcctttgtatgtttcacccagtgctggaaatgttgatcatcacttttaaagataattctaaagtcaccttgcaacaaccctgcatttatttaagatcatatatcatatatgtgtacatgtttttgttttgtttttttgagactaagtctcgctctatcgcccaggctggagcgcagttgcgccatctcrgctcattgcaacctccacctcccgggttcaagtgattctcctgcttcagcctcctgagtagctgggattacaggcacctgccaccacacccggctaatttttgtatttttagtagagacagggtttcaccatgttggtcaggctgatcttgaactcctaacctcatgattcacccactttggcctcccaaagtgctgggattacagacgtgagtcaccgtgcccagccgtgtacatgtattttaaaaagaatagagctcaaaatgttaaagtacttgtttccagttggcaggaatatgcgtgattcttctctgcctttcatacattttctgcaataagctatattgctgttgggctgataaaagttgacaaattcaacttaccaaaccaaaacagtacagttcagtgatcccatcccaaagcacttacacatccatgcgcacgggctcacagaaactgaggcttgccattgttcagtcatttgttagtgttctgcttttaatgattgcacctttttgctgcccattctgttttcccatccagtctcgtgtctttccatgatgggtttcctgtgtgatgggagtgtctccattatcatagggacaggatggcttgttgcagggagtaagagcgtcacaagagtgtctgaggcactcagggagtgtcatggagaaaggagagagtgctgggaggagcttgatttcagtctttctcctttcccttccccaggctccatgtcctttacaaagtcctttgtgggtagatatttgttggttggttcatgttagcaacttttctagagatcatccagggagaggtgcttcttaagaaacaagccaccacataggtcgtcaagacttaaaactggttaggattgagtaactgacctatttatttgcagtactttctgcctgttgtgggcagtgtctctgaggccacacagtgctttcagacctgccttgtgttgcagaaccccatggacactgaggttgagcgtggggccattcctgccttctctgggctgtccctcagtacacctctgcctggggctcctgagtggccactctcttttgcctgtgggctttgggaataaaactaggatagttttccctcagatactagaggaggaattttttattgatacataataattgtacatatttatggggtgcatrtgttattttgctgcatgcatgtaatgcataaggatcaaatcggggtaactagcatatccatcacttcaaacatttatcatttccttgagtttagaactttcacaatcctcttctagctttttgaacatgcgcaataaattattgttaacattagtcaccctacagtgctgaggaacccaagaactattcctgttactcagctgtaatgttgagtcccttaacctctccctctctcccctcccagccaacccttcccaccctctaataaccaactctgcgttctaattctgtgagttcaattgtatttttgctttcacatatgagtgagaacatctggcatgtgtctttctgtgcctgacttatttcacttaacataatgtaccccgggctcatcatgatgccaccactgacaggatctaattctttttttgtggctggatgatattccatctgaaacgatgtattttagatgattttaagacttaaatgggtgcctgctagttttcttccagaaatatttcaacctgatatcataatggcatttcactcattttccttttaagggaaataaatacagttaagatatcataaagtttgggatgctagaaacctatctgcaacaccgaagagagtctctaactctttagattaagtttcatttcagagggagtttcttgaagacaattagatgcaaatagccttctcacaattacaacctcattgtaatttctggactttgattccagtgtttgggatggtttggacccctgggatggggttgatggtgcatagggagagaatttgttttgttcatttcattattgttaggtgataatcttttagtgactcttcagttatttttagcatatgtaacaaagccacggtagctctgccttactttgataataatcccaataagcaatgctaatacaaacatgtaaaaaatgtgctattttctttattttaaactagcttgagaaaatgtacattatttctttatcactgtcttgcttctgtggtaatgaataatttctttttgcctgtgcattcaaaaattaggaaaaaaaattgacaaggcaaaatggcatattaattacaaatccgtatctttttctggccaaactttgtctgttttctcactgtctgttgaaagaaaatccagtgcatttgttctagaagctacaaaatgggaaggaacttcccagtttcattatctttacttgcatgtcatgattgttttgtttttagtagtctgggggaaattagattgtattttccatttgagcaggatagaggatgatagtagaaacagttcattttggcatatgataatttcaccaggccaccccaacagttcaaataccccattatgacctggaagcctttgaatgcagttggagaagcttcatctagtagttgttattgccaagtgctccgtttagccatcagttatgcaaatctatttgtggaatagaatgaagcatttactaagcactccgctttttctatattggagtcctgtattttagaggcaattggttaaaatgtctagtttggcttttaaatcctacagatatttggtaatgatgtacataagtccatcattactacttaagaggagtaattttaagctactagtgttttttttttttttttttttttgagacggagtctcgctctgtcgcccaggctggagtgcagtggcgcgatctcggctcactgcaagctccgcctcccgggttcacgccattctcctgcctcagccccccgagtagctgggactacaggcgcccgctaccacgcccggctaattttttgtatttttcgtagagacggggtttcaccgtgttagccaggatggtctcgatctcctgacctcgtgatccgcccrcctcggcctcccaaagtgcagggattacaggcgtgagccaccgcgcccggccgctactagtgttttttaaaagctgctttttaaaaaaatgttggctgctattttcatgactttattcaggccttaattatttgagctgctgaaaatagctataattttttgcatgatatctccaagtagcttatttgtatttggccatggcttatgtcagaggtggagttagttttgactaaaatcatgaagttagcagacagttggaatctgaagctttacagccttctttacaggacactactgtgtgccaactttgcatcactgtgcagtgagtgggggcccttaaccaagctattggactcatgcagccagggtcctagatttgccgcagtaggtcaatcattccataagtgaaacacgcagtagatgatcagaaaatgacaaattcatcaactgttttcataaagtagaaatcactctgctctgggtggatttaaggaacatgtggggttcagacctgtcctgtaggatctcccaaagacccaacttagccatgaggkctgattagagtatagaacctcttaagaaacgccctggatttgttggcaagatggcaaataggaacagctccrgtctgcagctcccagcaagattggtgcggaaggcaggtgatttctgcatttccacctgaggtactcagttcatctcattgggactggttggacagtgggtgcagcccaaggaggatgagccgaagcagggtggggcgttgcctcacccgggaagcgcaaggggttggggaactccctctcctagccaagggaagccattagggactgtaccatgcaccccggcccagatgttgcacttttcccacggtcttcgcaacccacagaccaggagattccctctgaagcctacaccaccagggccctgggtttccagcacaaaactggcggcctttagggcagacaccgagctagccagtttttttttttcataccccagtggtagcgtttgagtttttttcgtgccccagtggcgccaggaatgccaacaagacagaaacattcactcccctggaaaggagggctgaagccagggagccaagaggtctggcttgatgggtcccacccccacggagccaaacaagctaagatccactggcttgaaattcttgtgctagtatagcagactgagctcgacctgggatgctccagcttggttggggaaggggcgtctgccattgctaaggcttgagtagatggttttaccctcacagtgtaaacaaagccactgggaaattcgaactgggtggagcccactgcatttcagcaaggttgctaccctcagactgcctctctagattccctcctctctgggtagggcatctctgaaaaaaaggcagcaaccccagtcagggacttacagataaaaccgtcacctcccgggacagagcacttaggggaaggggtggttgtgggcacagcttcagctgtccctaactggcagctctgaagagagcagcagatctcccagcacagcgttcaagctctgataagggacagcctgcctcctcaagtgggtccctgacccccatgtatcctaactgggagacacctcctagtaggggccaacagatacctcatacaggagagctctggctggcatctggtgggtgcccctctggaatgaggcatccagaggaaggaacaacagcctgcagcccccgccagtgatacccaggcaaacagggtctggagcggacctccagcaaactccagcagacctgcagcagaggggcctgactgttagaaggaaaactaacaaacagaaaggcatagcatcaacatcaacaaaaatgacgtccactcagagaccccatccgaaggtcaccaacttcaaagaccaaaggtacataaatccacgaagatggggagaaaccagcacaaaaaggctgaaaattccaaaaaccagaacacctcttctcctccaaaggatcacaactccttgccagcaagggagcaaaactggaaggagaatgagtttgacgaatgtgacaggagtaggcttcagaaggtaggtaataacaaactcctccgagctaaaggaacatgtgctaacccaatgcaaggaagttaagaacgctgaaaaaaggttagatgaattgctaactagaataaccagtttagagaagaacataaatggtctgatggagctgaaaaacacagtacaagaacttcatgaagcacacacaagtatcaacagccaagtcgatcaagcagaagaaaggatatcagagattgaagatcaactcaatgaaataaagcgtgaagacaagattagagggaaaaaagtgaaaagaaatgaacaaagcctccaagaaatatgggactatgtgaaaagaccagatctttgtttgattggtatacctgaaagtgacggggagaatggaaccaagttggaaaacattcctcaggatattatctaggagaacttccccaacctagcaaggcaggccaacattcaaattaaggaaatgggacaccagaaagatactccttgagaaaagcaacgccaggacacataattttcagatcaccaaggttgaaatgaaggaaaaaatgttaagggcaaccagagagaaaggttgggttacccataaagggaagcccatcagactaacagcggatctcggcagaaaccctacaagccagaagagagtgggggccaatattcaaaattcttaaaggaaagaattttcaatccagaatttcatatccagccaaacaaagcttcataagcgaaggagaaataaaatccgtcacagacaaggaaatgctgagacagtttgtcaccaccaggcctgcctyacaagaactcctgaaggaagcactaaacatggaaaggaacaaccggtacgagccactgcaaaaacttaccaaattgtaaagactatcaatgctgtgaagaaactgcatcaactaacgggccaaaataacagctagcatcatattggcaggatgaaattcacacataacaatattaaccttaaatgtaaacgggctaaatgccccaattaaaagacacagactggcaaattggatgaagagtcaagacccatcagtgtgctgtattcaggagacccatcccacgtggagagacacacataggctcaaaataaaaggatggaggaaaatttaccaagcaaatggaaagcaaaaaaaaaaaaaacccaggagttgcaatcctagtctctgataaaacagcctttaaactacaaagatcaagagacaaagaagggcattacataatggtagagggatcagtgcaacaagaagagctaactatcctaaatatatatgcacccaatacaggagcacccagattcataacgcatgttcttagagacctacaaagagacttagactcccacacaataatagtgggagactttaacaccccactgtcaatattagatcaatgagacagaaagttaacaaggatatccaggacttgaacttagctctggaccaagcggrcctaatagaactcttcaccacaaatcagcagaatatacactcttctcagcaccacatagcacttattctaaaattgatcacataattggaagtaaaacactcctcagcaaatgcaaaaaaatggaaatcataatggtctctcagaccacagtgcaatcaaagtagaactcaggactaagaaactcactcaaaaccacacaactatgttgaaactgaacaacctgctcctgaatgactactgggtaaataacgaaatgagggcaaaaataaagatgttatttgaaaccaatgagaacaaagacacaacgtaccagaatctctgggacacatttaaagcagtgtgtagagggaaatttatagcactaaatgcccacaagagaaagcaggaaagatctaaaatcgacaccctaacatcacaattaaaagaactggagaagcaagagcaaacaaattcaaaagctagcagaagacaagaagtaactaagatcagagcagaaaaggagatagatacacgaaaaaccctttaaaaaataaatgaatccaggagctggggttttgttttgttttattttgttttgttttgagacggagtctggctctgtcgccaggctggagtgcagtggtgcgatctcggctcactgcaagctccgcctcccgagttcatgccattctcctgcctcagcctcccgaatagctgggactatgagtagctgggactacaggygcctgccaacacacccggctaattttttgtatttttagtagagacagggtttcaccgcgttagccaggatggtctcgatctcctgatctcgtgatccgcccgcctcggcctcccaaagtgctgggattacaggcrtgagtcaccgcgcccggcccaggagctggttttttgaaaagatcaacaaaatagatagaccactagtgagaataataaagaagaaaagagagaagaatcaaatagatgcaataaaaaatgataaaggggatatcaccactgatcccacaaaaatacaractaccatcagcgaatactgtaaacacctctgcacaaataaaccagaaaatctagaagaaatggataaatcgctggacatgtacaccctcccaagactaaaccaagaagaagtcaaatccctgaatagaccaataacaagttctgaaattgaggcagcaagtaatagcctaccaaccaaaaaaagtccaggactggatggattcacagctgaattctaccagaggtacaaagaggagctggtaccattccttctgaaactattccaaacaatagaaaaaagggactcctccctaactcattttatgaggccagcatcatcctgataccaaaacctggcagagacacaacaaaaaaagaaaatttcaggccaatattccctgatgaacatcaatgcgaaaatcctcaataaaatactagcaaacggaatccagcagcatatcaaaaagcttatccacttcagtcaagtcagcttcatccctgggatacaaggttcattcaacatacgcaaatcaataaacgtaatccatcacataaacagaaccaatgacaaaaaccacatgattatctcaatagatgcacaaaaggcctcgacaaaattcaacagtgcttcatactaaaaactctcaataaactaggcattgatggaatgtatctcaaaataataagagctatttatggcaaacccacagccaatagcatactgaatgggcaaaaactggaagcaatccctttaaaaaaccagcacaagacaaggatgccctctcttaccactcctattcaacatagtattagaagttctggccagggcaatcaggcaagagaaataaataaagggtattcagttaggaaaagagcaagtcaaattgtctctatttgcagatgacatgattgtatgtttagaaaaccccatcgtgtcagcccagaatctccttaagctgataagcaaattcagcaaattctccagatacaaaatcaatgtgcaaaaatcacaggcattcctatacaccaataacagacaaacggagagccaaatcatgagtaaactcccattcacagttgttactaagagaataaaatacctaggaatacaacttacaagggatgtgaaggacctcttcaaggagaactacaaaccactgctcaaggaaataagagaggacacaaacaaatggaaaaatattccatgctcatggataggaagaatcaattttgggctatactgcccaaagtaatttatagattcaatgctgtccccatcaagctactattgactttcttcacagaattggaaaaaactactttgaatttcacatggaaccaaaaaagagcctgcatagccaagacattcctaaccaaaaagaacaaagctggaggcatcacgctacctgacttcaaagtatactacaagtctactttgttactacaaggctgttttgttactacaaaaacagcatggtacttataccaaaacagatatataaaccaatggaacagaacagaagcctcagaaataacgccacacatctacaaccatctgatctttgacaaacctgacaaaaacaagcaatggggaaaggtttccctatttaataaatggtgttgggaaaactggctagccatatgcagaaagctgaaactagatcccttccttacaccttatacaaaaattaactgaagatggattaaagatttaaatgtaagacataaaaccatgaaaaccctagaagaaaacctaggcaataccattcaggacataggcatgggcaaggacttcatgtctaaaacaccaacagcaatggcagcaaaagccaaaactgacaaacaggatctgactaaactaaagagcttctgcatagcagaagaaacaatcatcagagtgaacagacaacctacagaatgggagaaaatttttgcaatctactcatctgacaaagggctaatatccagaatctataaagaactaaaacaaatttacaagaaaaaaaccccatcaaaaagtgggcaaaggatatgaacagacacttctcaaaagaagatatttatgcagccaacagacatgaaaaacagctcatcatcactgatcattagagaaatgcaaatcaaaaccacaatgagataccatctcacaccagttagaatagtgatcattaaaaagtcaggaaacaacagatgctggagtggatgtggagaaataggaacacttttacactgttggtgggagtgtatattagttcaaccattgtggaagacagtgtgccgattcctcaaggatctagaactagaaataccatttgacccagcaatcccattactgggtatatacccaaaggattataaatcattctataaagacacatgcacatgtatgtttgttgcaacactgttcacaatagcaaagacttggaaccacaccagatgcctatcaatcatagactggataaagaaaatgtagcatatatacaccataggatattatgcagccataaaaaaggatgagttcatgtcctttgcagggacatggatgatgctggaaaccatcattctcagcaaactaacacgagaacaaaaaaccaaacactgcatgttctcataagtgggagttgaacagtgagaacacatggacacagggaagggaacatcacacaccggggcctgtcggtgggtgggggataggggagggatagcattagaagaaatacctaatgtagatgacaggttgatgggtgcagcaaaccaccatggcacatgtatacctatgtaacaaacctgcacgttctgcacatgtacctacctcgaacttgaagtataataaaataaatactttcaacagtaaaaaaaagaaaaacgcccttagggaattgaggacctcgcacaatcctaattcttcaccaaaagccacctagcagacctgctattcagacgaatctgacttttttggtattttcaaacaacagcctcccaccctacttcaatggctattctgatgccactgccgtggcagtagtagtttcagtcaaatttgtttgcatttcttagagtgacattattaattcctgaaaatgatttaacagtatcaaaatgcctgaatataaaagttgagctatggtgtttattcggaattaaaccactcccttgtcctcttgaaaaaataacatatttcttttagctttactctgttgtagctaaataagataagtgactgcaggtagtctttttgggagaattgtgtgccgcctaaactttcttttcttttcttttytttttttttttctttcgagacggagttttgctcttgttgcccaggcttgagtgcagttgcacaatctcggctcactgcagcctctgcctcctaggttcaggcgattctcctgcctcagcctcctgagcagctgggattacacgtgcccaccaccacgccagctaatgttttgtgtttttagtagagacagggtttcatcatgttggccaggctcctggccaaatctcaaactcctgacctcaggtgatccacccgcctcggcctcccaaagtgcagggattacaggcgtgagccactgcacctgaccaccacctaaacwttccatggccacactgttacagatccttattcacgacatacaaacaaccttsttcactcagcactgggcaccaaactatgtactgtatagtcatagaagcagaggctatgacttttattyatttattcattcattcattcattcagcagattgtagtatcttctactgatggtgggctggatacttcttaggcaccacattgggcctattgcatcatgggctcatagtaaaagttccatatgtccaggaatgatgtaaagccaacaatggaataatgcgagcaactatttttctagaagaagtagactttaccagaatgccaaaatgggctgctaaaggaagggcagcccatcagtgctgtcaccagctcctgaaaccccggggcctgtttactcccaccattgcagtggaggacatgtctgagcytcctgcttgkctttaacccccacattagttcctttgtygtttcagtgtaagtagcttgggtaatgtgcagagaatttctttgccttgtattatttatgctgagaatcaactggttgggtcatcagttcctagggagaggctaatgggaaggtgatctatagagtgtgatagaagacaatctagctttcttgctgcatcttttcttcgttcagaacrtcagcttctcttttccctcccaactcccagyaggatattcctgattgaaagaaaggccaagaggagagaatgagatctagcaaaattgtaaacaaaggaacagagccasaaacctgttttacattcatataaaatgttacattgattgattaaacagtttaaaaatatcttcatagtatatggtacctttgatcataaaaccaggtcatgttaaggtgacctctattgaagagttctatttagggttactgtgtgccaaccaccctcattaaaatagtcacagatgtaagtagaggaaaccagataaaaggaaagatctctatctgcttcccnnnnnnnnnnnnnnnnnnnnnnnnnnnnnnnnnnnnnnnnnnnnnnnnnnnnnnnnnnnnnnnnnnnnnnnnnnnnnnnnnnnnnnnnnnnnnnnnnnnnnnnnnnnnnnnnnnnnnnnnnnnnnnnnnnnnnnnnnnnnnnnnnnnnnnnnnnnnnnnnnnnnnnnnnnnnnnnnnnnnnnnnnnnnnnnnnnnnnnnnnnnnnnnnnnnnnnnnnnnnnnnnnnnnnnnnnnnnnnnnnnnnnnnnnnnnnnnnnnnnnnnnnnnnnnnnnnnnnnnnnnnnnnnnnnnnnnnnnnnnnnnnnnnnnnnnnnnnnnnnnnnnnnnnnnnnnnnnnnnnnnnnnnnnnnnnnnnnnnnnnnnnnnnnnnnnnnnnnnnnnnnnnnnnnnnnnnnnnnnnnnnnnnnnnnnnnnnnnnnnnnnnnnnnnnnnnnnnnnnnnnnnnnnnnnnnnnnnnnnnnnnnnnnnnnnnnnnnnnnnnnnnnnnnnnnnnnnnnnnnnnnnnnnnnnnnnnnnnnnnnnnnnnnnnnnnnnnnnnnnnnnnnnnnnnnnnnnnnnnnnnnnnnnnnnnnnnnnnnnnnnnnnnnnnnnnnnnnnnnnnnnnnnnnnnnnnnnnnnnnnnnnnnnnnnnnnnnnnnnnnnnnnnnnnnnnnnnnnnnnnnnnnnnnnnnnnnnnnnnnnnnnnnnnnnnnnnnnnnnnnnnnnnnnnnnnnnnnnnnnnnnnnnnnnnnnnnnnnnnnnnnnnnnnnnnnnnnnnnnnnnnnnnnnnnnnnnnnnnnnnnnnnnnnnnnnnnnnnnnnnnnnnnnnnnnnnnnnnnnnnnnnnnnnnnnnnnnnnnnnnnnnnnnnnnnnnnnnnnnnnnnnnnnnnnnnnnnnnnnnnnnnnnnnnnnnnnnnnnnnnnnnnnnnnnnnnnnnnnnnnnnnnnnnnnnnnnnnnnnnnnnnnnnnnnnnnnnnnnnnnnnnnnnnnnnnnnnnnnnnnnnnnnnnnnnnnnnnnnnnnnnnnnnnnnnnnnnnnnnnnnnnnnnnnnnnnnnnnnnnnnnnnnnnnnnnnnnnnnnnnnnnnnnnnnnnnnnnnnnnnnnnnnnnnnnnnnnnnnnnnnnnnnnnnnnnnnnnnnnnnnnnnnnnnnnnnnnnnnnnnnnnnnnnnnnnnnnnnnnnnnnnnnnnnnnnnnnnnnnnnnnnnnnnnnnnnnnnnnnnnnnnnnnnnnnnnnnnnnnnnnnnnnnnnnnnnnnnnnnnnnnnnnnnnnnnnnnnnnnnnnnnnnnnnnnnnnnnnnnnnnnnnnnnnnnnnnnnnnnnnnnnnnnnnnnnnnnnnnnnnnnnnnnnnnnnnnnnnnnnnnnnnnnnnnnnnnnnnnnnnnnnnnnnnnnnnnnnnnnnnnnnnnnnnnnnnnnnnnnnnnnnnnnnnnnnnnnnnnnnnnnnnnnnnnnnnnnnnnnnnnnnnnnnnnnnnnnnnnnnnnnnnnnnnnnnnnnnnnnnnnnnnnnnnnnnnnnnnnnnnnnnnnnnnnnnnnnnnnnnnnnnnnnnnnnnnnnnnnnnnnnnnnnnnnnnnnnnnnnnnnnnnnnnnnnnnnnnnnnnnnnnnnnnnnnnnnnnnnnnnnnnnnnnnnnnnnnnnnnnnnnnnnnnnnnnnnnnnnnnnnnnnnnnnnnnnnnnnnnnnnnnnnnnnnnnnnnnnnnnnnnnnnnnnnnnnnnnnnnnnnnnnnnnnnnnnnnnnnnnnnnnnnnnnnnnnnnnnnnnnnnnnnnnnnnnnnnnnnnnnnnnnnnnnnnnnnnnnnnnnnnnnnnnnnnnnnnnnnnnnnnnnnnnnnnnnnnnnnnnnnnnnnnnnnnnnnnnnnnnnnnnnnnnnnnnnnnnnnnnnnnnnnnnnnnnnnnnnnnnnnnnnnnnnnnnnnnnnnnnnnnnnnnnnnnnnnnnnnnnnnnnnnnnnnnnnnnnnnnnnnnnnnnnnnnnnnnnnnnnnnnnnnnnnnnnnnnnnnnnnnnnnnnnnnnnnnnnnnnnnnnnnnnnnnnnnnnnnnnnnnnnnnnnnnnnnnnnnnnnnnnnnnnnnnnnnnnnnnnnnnnnnnnnnnnnnnnnnnnnnnnnnnnnnnnnnnnnnnnnnnnnnnnnnnnnnnnnnnnnnnnnnnnnnnnnnnnnnnnnnnnnnnnnnnnnnnnnnnnnnnnnnnnnnnnnnnnnnnnnnnnnnnnnnnnnnnnnnnnnnnnnnnnnnnnnnnnnnnnnnnnnnnnnnnnnnnnnnnnnnnnnnnnnnnnnnnnnnnnnnnnnnnnnnnnnnnnnnnnnnnnnnnnnnnnnnnnnnnnnnnnnnnnnnnnnnnnnnnnnnnnnnnnnnnnnnnnnnnnnnnnnnnnnnnnnnnnnnnnnnnnnnnnnnnnnnnnnnnnnnnnnnnnnnnnnnnnnnnnnnnnnnnnnnnnnnnnnnnnnnnnnnnnnnnnnnnnnnnnnnnnnnnnnnnnnnnnnnnnnnnnnnnnnnnnnnnnnnnnnnnnnnnnnnnnnnnnnnnnnnnnnnnnnnnnnnnnnnnnnnnnnnnnnnnnnnnnnnnnnnnnnnnnnnnnnnnnnnnnnnnnnnnnnnnnnnnnnnnnnnnnnnnnnnnnnnnnnnnnnnnnnnnnnnnnnnnnnnnnnnnnnnnnnnnnnnnnnnnnnnnnnnnnnnnnnnnnnnnnnnnnnnnnnnnnnnnnnnnnnnnnnnnnnnnnnnnnnnnnnnnnnnnnnnnnnnnnnnnnnnnnnnnnnnnnnnnnnnnnnnnnnnnnnnnnnnnnnnnnnnnnnnnnnnnnnnnnnnnnnnnnnnnnnnnnnnnnnnnnnnnnnnnnnnnnnnnnnnnnnnnnnnnnnnnnnnnnnnnnnnnnnnnnnnnnnnnnnnnnnnnnnnnnnnnnnnnnnnnnnnnnnnnnnnnnnnnnnnnnnnnnnnnnnnnnnnnnnnnnnnnnnnnnnnnnnnnnnnnnnnnnnnnnnnnnnnnnnnnnnnnnnnnnnnnnnnnnnnnnnnnnnnnnnnnnnnnnnnnnnnnnnnnnnnnnnnnnnnnnnnnnnnnnnnnnnnnnnnnnnnnnnnnnnnnnnnnnnnnnnnnnnnnnnnnnnnnnnnnnnnnnnnnnnnnnnnnnnnnnnnnnnnnnnnnnnnnnnnnnnnnnnnnnnnnnnnnnnnnnnnnnnnnnnnnnnnnnnnnnnnnnnnnnnnnnnnnnnnnnnnnnnnnnnnnnnnnnnnnnnnnnnnnnnnnnnnnnnnnnnnnnnnnnnnnnnnnnnnnnnnnnnnnnnnnnnnnnnnnnnnnnnnnnnnnnnnnnnnnnnnnnnnnnnnnnnnnnnnnnnnnnnnnnnnnnnnnnnnnnnnnnnnnnnnnnnnnnnnnnnnnnnnnnnnnnnnnnnnnnnnnnnnnnnnnnnnnnnnnnnnnnnnnnnnnnnnnnnnnnnnnnnnnnnnnnnnnnnnnnnnnnnnnnnnnnnnnnnnnnnnnnnnnnnnnnnnnnnnnnnnnnnnnnnnnnnnnnnnnnnnnnnnnnnnnnnnnnnnnnnnnnnnnnnnnnnnnnnnnnnnnnnnnnnnnnnnnnnnnnnnnnnnnnnnnnnnnnnnnnnnnnnnnnnnnnnnnnnnnnnnnnnnnnnnnnnnnnnnnnnnnnnnnnnnnnnnnnnnnnnnnnnnnnnnnnnnnnnnnnnnnnnnnnnnnnnnnnnnnnnnnnnnnnnnnnnnnnnnnnnnnnnnnnnnnnnnnnnnnnnnnnnnnnnnnnnnnnnnnnnnnnnnnnnnnnnnnnnnnnnnnnnnnnnnnnnnnnnnnnnnnnnnnnnnnnnnnnnnnnnnnnnnnnnnnnnnnnnnnnnnnnnnnnnnnnnnnnnnnnnnnnnnnnnnnnnnnnnnnnnnnnnnnnnnnnnnnnnnnnnnnnnnnnnnnnnnnnnnnnnnnnnnnnnnnnnnnnnnnnnnnnnnnnnnnnnnnnnnnnnnnnnnnnnnnnnnnnnnnnnnnnnnnnnnnnnnnnnnnnnnnnnnnnnnnnnnnnnnnnnnnnnnnnnnnnnnnnnnnnnnnnnnnnnnnnnnnnnnnnnnnnnnnnnnnnnnnnnnnnnnnnnnnnnnnnnnnnnnnnnnnnnnnnnnnnnnnnnnnnnnnnnnnnnnnnnnnnnnnnnnnnnnnnnnnnnnnnnnnnnnnnnnnnnnnnnnnnnnnnnnnnnnnnnnnnnnnnnnnnnnnnnnnnnnnnnnnnnnnnnnnnnnnnnnnnnnnnnnnnnnnnnnnnnnnnnnnnnnnnnnnnnnnnnnnnnnnnnnnnnnnnnnnnnnnnnnnnnnnnnnnnnnnnnnnnnnnnnnnnnnnnnnnnnnnnnnnnnnnnnnnnnnnnnnnnnnnnnnnnnnnnnnnnnnnnnnnnnnnnnnnnnnnnnnnnnnnnnnnnnnnnnnnnnnnnnnnnnnnnnnnnnnnnnnnnnnnnnnnnnnnnnnnnnnnnnnnnnnnnnnnnnnnnnnnnnnnnnnnnnnnnnnnnnnnnnnnnnnnnnnnnnnnnnnnnnnnnnnnnnnnnnnnnnnnnnnnnnnnnnnnnnnnnnnnnnnnnnnnnnnnnnnnnnnnnnnnnnnnnnnnnnnnnnnnnnnnnnnnnnnnnnnnnnnnnnnnnnnnnnnnnnnnnnnnnnnnnnnnnnnnnnnnnnnnnnnnnnnnnnnnnnnnnnnnnnnnnnnnnnnnnnnnnnnnnnnnnnnnnnnnnnnnnnnnnnnnnnnnnnnnnnnnnnnnnnnnnnnnnnnnnnnnnnnnnnnnnnnnnnnnnnnnnnnnnnnnnnnnnnnnnnnnnnnnnnnnnnnnnnnnnnnnnnnnnnnnnnnnnnnnnnnnnnnnnnnnnnnnnnnnnnnnnnnnnnnnnnnnnnnnnnnnnnnnnnnnnnnnnnnnnnnnnnnnnnnnnnnnnnnnnnnnnnnnnnnnnnnnnnnnnnnnnnnnnnnnnnnnnnnnnnnnnnnnnnnnnnnnnnnnnnnnnnnnnnnnnnnnnnnnnnnnnnnnnnnnnnnnnnnnnnnnnnnnnnnnnnnnnnnnnnnnnnnnnnnnnnnnnnnnnnnnnnnnnnnnnnnnnnnnnnnnnnnnnnnnnnnnnnnnnnnnnnnnnnnnnnnnnnnnnnnnnnnnnnnnnnnnnnnnnnnnnnnnnnnnnnnnnnnnnnnnnnnnnnnnnnnnnnnnnnnnnnnnnnnnnnnnnnnnnnnnnnnnnnnnnnnnnnnnnnnnnnnnnnnnnnnnnnnnnnnnnnnnnnnnnnnnnnnnnnnnnnnnnnnnnnnnnnnnnnnnnnnnnnnnnnnnnnnnnnnnnnnnnnnnnnnnnnnnnnnnnnnnnnnnnnnnnnnnnnnnnnnnnnnnnnnnnnnnnnnnnnnnnnnnnnnnnnnnnnnnnnnnnnnnnnnnnnnnnnnnnnnnnnnnnnnnnnnnnnnnnnnnnnnnnnnnnnnnnnnnnnnnnnnnnnnnnnnnnnnnnnnnnnnnnnnnnnnnnnnnnnnnnnnnnnnnnnnnnnnnnnnnnnnnnnnnnnnnnnnnnnnnnnnnnnnnnnnnnnnnnnnnnnnnnnnnnnnnnnnnnnnnnnnnnnnnnnnnnnnnnnnnnnnnnnnnnnnnnnnnnnnnnnnnnnnnnnnnnnnnnnnnnnnnnnnnnnnnnnnnnnnnnnnnnnnnnnnnnnnnnnnnnnnnnnnnnnnnnnnnnnnnnnnnnnnnnnnnnnnnnnnnnnnnnnnnnnnnnnnnnnnnnnnnnnnnnnnnnnnnnnnnnnnnnnnnnnnnnnnnnnnnnnnnnnnnnnnnnnnnnnnnnnnnnnnnnnnnnnnnnnnnnnnnnnnnnnnnnnnnnnnnnnnnnnnnnnnnnnnnnnnnnnnnnnnnnnnnnnnnnnnnnnnnnnnnnnnnnnnnnnnnnnnnnnnnnnnnnnnnnnnnnnnnnnnnnnnnnnnnnnnnnnnnnnnnnnnnnnnnnnnnnnnnnnnnnnnnnnnnnnnnnnnnnnnnnnnnnnnnnnnnnnnnnnnnnnnnnnnnnnnnnnnnnnnnnnnnnnnnnnnnnnnnnnnnnnnnnnnnnnnnnnnnnnnnnnnnnnnnnnnnnnnnnnnnnnnnnnnnnnnnnnnnnnnnnnnnnnnnnnnnnnnnnnnnnnnnnnnnnnnnnnnnnnnnnnnnnnnnnnnnnnnnnnnnnnnnnnnnnnnnnnnnnnnnnnnnnnnnnnnnnnnnnnnnnnnnnnnnnnnnnnnnnnnnnnnnnnnnnnnnnnnnnnnnnnnnnnnnnnnnnnnnnnnnnnnnnnnnnnnnnnnnnnnnnnnnnnnnnnnnnnnnnnnnnnnnnnnnnnnnnnnnnnnnnnnnnnnnnnnnnnnnnnnnnnnnnnnnnnnnnnnnnnnnnnnnnnnnnnnnnnnnnnnnnnnnnnnnnnnnnnnnnnnnnnnnnnnnnnnnnnnnnnnnnnnnnnnnnnnnnnnnnnnnnnnnnnnnnnnnnnnnnnnnnnnnnnnnnnnnnnnnnnnnnnnnnnnnnnnnnnnnnnnnnnnnnnnnnnnnnnnnnnnnnnnnnnnnnnnnnnnnnnnnnnnnnnnnnnnnnnnnnnnnnnnnnnnnnnnnnnnnnnnnnnnnnnnnnnnnnnnnnnnnnnnnnnnnnnnnnnnnnnnnnnnnnnnnnnnnnnnnnnnnnnnnnnnnnnnnnnnnnnnnnnnnnnnnnnnnnnnnnnnnnnnnnnnnnnnnnnnnnnnnnnnnnnnnnnnnnnnnnnnnnnnnnnnnnnnnnnnnnnnnnnnnnnnnnnnnnnnnnnnnnnnnnnnnnnnnnnnnnnnnnnnnnnnnnnnnnnnnnnnnnnnnnnnnnnnnnnnnnnnnnnnnnnnnnnnnnnnnnnnnnnnnnnnnnnnnnnnnnnnnnnnnnnnnnnnnnnnnnnnnnnnnnnnnnnnnnnnnnnnnnnnnnnnnnnnnnnnnnnnnnnnnnnnnnnnnnnnnnnnnnnnnnnnnnnnnnnnnnnnnnnnnnnnnnnnnnnnnnnnnnnnnnnnnnnnnnnnnnnnnnnnnnnnnnnnnnnnnnnnnnnnnnnnnnnnnnnnnnnnnnnnnnnnnnnnnnnnnnnnnnnnnnnnnnnnnnnnnnnnnnnnnnnnnnnnnnnnnnnnnnnnnnnnnnnnnnnnnnnnnnnnnnnnnnnnnnnnnnnnnnnnnnnnnnnnnnnnnnnnnnnnnnnnnnnnnnnnnnnnnnnnnnnnnnnnnnnnnnnnnnnnnnnnnnnnnnnnnnnnnnnnnnnnnnnnnnnnnnnnnnnnnnnnnnnnnnnnnnnnnnnnnnnnnnnnnnnnnnnnnnnnnnnnnnnnnnnnnnnnnnnnnnnnnnnnnnnnnnnnnnnnnnnnnnnnnnnnnnnnnnnnnnnnnnnnnnnnnnnnnnnnnnnnnnnnnnnnnnnnnnnnnnnnnnnnnnnnnnnnnnnnnnnnnnnnnnnnnnnnnnnnnnnnnnnnnnnnnnnnnnnnnnnnnnnnnnnnnnnnnnnnnnnnnnnnnnnnnnnnnnnnnnnnnnnnnnnnnnnnnnnnnnnnnnnnnnnnnnnnnnnnnnnnnnnnnnnnnnnnnnnnnnnnnnnnnnnnnnnnnnnnnnnnnnnnnnnnnnnnnnnnnnnnnnnnnnnnnnnnnnnnnnnnnnnnnnnnnnnnnnnnnnnnnnnnnnnnnnnnnnnnnnnnnnnnnnnnnnnnnnnnnnnnnnnnnnnnnnnnnnnnnnnnnnnnnnnnnnnnnnnnnnnnnnnnnnnnnnnnnnnnnnnnnnnnnnnnnnnnnnnnnnnnnnnnnnnnnnnnnnnnnnnnnnnnnnnnnnnnnnnnnnnnnnnnnnnnnnnnnnnnnnnnnnnnnnnnnnnnnnnnnnnnnnnnnnnnnnnnnnnnnnnnnnnnnnnnnnnnnnnnnnnnnnnnnnnnnnnnnnnnnnnnnnnnnnnnnnnnnnnnnnnnnnnnnnnnnnnnnnnnnnnnnnnnnnnnnnnnnnnnnnnnnnnnnnnnnnnnnnnnnnnnnnnnnnnnnnnnnnnnnnnnnnnnnnnnnnnnnnnnnnnnnnnnnnnnnnnnnnnnnnnnnnnnnnnnnnnnnnnnnnnnnnnnnnnnnnnnnnnnnnnnnnnnnnnnnnnnnnnnnnnnnnnnnnnnnnnnnnnnnnnnnnnnnnnnnnnnnnnnnnnnnnnnnnnnnnnnnnnnnnnnnnnnnnnnnnnnnnnnnnnnnnnnnnnnnnnnnnnnnnnnnnnnnnnnnnnnnnnnnnnnnnnnnnnnnnnnnnnnnnnnnnnnnnnnnnnnnnnnnnnnnnnnnnnnnnnnnnnnnnnnnnnnnnnnnnnnnnnnnnnnnnnnnnnnnnnnnnnnnnnnnnnnnnnnnnnnnnnnnnnnnnnnnnnnnnnnnnnnnnnnnnnnnnnnnnnnnnnnnnnnnnnnnnnnnnnnnnnnnnnnnnnnnnnnnnnnnnnnnnnnnnnnnnnnnnnnnnnnnnnnnnnnnnnnnnnnnnnnnnnnnnnnnnnnnnnnnnnnnnnnnnnnnnnnnnnnnnnnnnnnnnnnnnnnnnnnnnnnnnnnnnnnnnnnnnnnnnnnnnnnnnnnnnnnnnnnnnnnnnnnnnnnnnnnnnnnnnnnnnnnnnnnnnnnnnnnnnnnnnnnnnnnnnnnnnnnnnnnnnnnnnnnnnnnnnnnnnnnnnnnnnnnnnnnnnnnnnnnnnnnnnnnnnnnnnnnnnnnnnnnnnnnnnnnnnnnnnnnnnnnnnnnnnnnnnnnnnnnnnnnnnnnnnnnnnnnnnnnnnnnnnnnnnnnnnnnnnnnnnnnnnnnnnnnnnnnnnnnnnnnnnnnnnnnnnnnnnnnnnnnnnnnnnnnnnnnnnnnnnnnnnnnnnnnnnnnnnnnnnnnnnnnnnnnnnnnnnnnnnnnnnnnnnnnnnnnnnnnnnnnnnnnnnnnnnnnnnnnnnnnnnnnnnnnnnnnnnnnnnnnnnnnnnnnnnnnnnnnnnnnnnnnnnnnnnnnnnnnnnnnnnnnnnnnnnnnnnnnnnnnnnnnnnnnnnnnnnnnnnnnnnnnnnnnnnnnnnnnnnnnnnnnnnnnnnnnnnnnnnnnnnnnnnnnnnnnnnnnnnnnnnnnnnnnnnnnnnnnnnnnnnnnnnnnnnnnnnnnnnnnnnnnnnnnnnnnnnnnnnnnnnnnnnnnnnnnnnnnnnnnnnnnnnnnnnnnnnnnnnnnnnnnnnnnnnnnnnnnnnnnnnnnnnnnnnnnnnnnnnnnnnnnnnnnnnnnnnnnnnnnnnnnnnnnnnnnnnnnnnnnnnnnnnnnnnnnnnnnnnnnnnnnnnnnnnnnnnnnnnnnnnnnnnnnnnnnnnnnnnnnnnnnnnnnnnnnnnnnnnnnnnnnnnnnnnnnnnnnnnnnnnnnnnnnnnnnnnnnnnnnnnnnnnnnnnnnnnnnnnnnnnnnnnnnnnnnnnnnnnnnnnnnnnnnnnnnnnnnnnnnnnnnnnnnnnnnnnnnnnnnnnnnnnnnnnnnnnnnnnnnnnnnnnnnnnnnnnnnnnnnnnnnnnnnnnnnnnnnnnnnnnnnnnnnnnnnnnnnnnnnnnnnnnnnnnnnnnnnnnnnnnnnnnnnnnnnnnnnnnnnnnnnnnnnnnnnnnnnnnnnnnnnnnnnnnnnnnnnnnnnnnnnnnnnnnnnnnnnnnnnnnnnnnnnnnnnnnnnnnnnnnnnnnnnnnnnnnnnnnnnnnnnnnnnnnnnnnnnnnnnnnnnnnnnnnnnnnnnnnnnnnnnnnnnnnnnnnnnnnnnnnnnnnnnnnnnnnnnnnnnnnnnnnnnnnnnnnnnnnnnnnnnnnnnnnnnnnnnnnnnnnnnnnnnnnnnnnnnnnnnnnnnnnnnnnnnnnnnnnnnnnnnnnnnnnnnnnnnnnnnnnnnnnnnnnnnnnnnnnnnnnnnnnnnnnnnnnnnnnnnnnnnnnnnnnnnnnnnnnnnnnnnnnnnnnnnnnnnnnnnnnnnnnnnnnnnnnnnnnnnnnnnnnnnnnnnnnnnnnnnnnnnnnnnnnnnnnnnnnnnnnnnnnnnnnnnnnnnnnnnnnnnnnnnnnnnnnnnnnnnnnnnnnnnnnnnnnnnnnnnnnnnnnnnnnnnnnnnnnnnnnnnnnnnnnnnnnnnnnnnnnnnnnnnnnnnnnnnnnnnnnnnnnnnnnnnnnnnnnnnnnnnnnnnnnnnnnnnnnnnnnnnnnnnnnnnnnnnnnnnnnnnnnnnnnnnnnnnnnnnnnnnnnnnnnnnnnnnnnnnnnnnnnnnnnnnnnnnnnnnnnnnnnnnnnnnnnnnnnnnnnnnnnnnnnnnnnnnnnnnnnnnnnnnnnnnnnnnnnnnnnnnnnnnnnnnnnnnnnnnnnnnnnnnnnnnnnnnnnnnnnnnnnnnnnnnnnnnnnnnnnnnnnnnnnnnnnnnnnnnnnnnnnnnnnnnnnnnnnnnnnnnnnnnnnnnnnnnnnnnnnnnnnnnnnnnnnnnnnnnnnnnnnnnnnnnnnnnnnnnnnnnnnnnnnnnnnnnnnnnnnnnnnnnnnnnnnnnnnnnnnnnnnnnnnnnnnnnnnnnnnnnnnnnnnnnnnnnnnnnnnnnnnnnnnnnnnnnnnnnnnnnnnnnnnnnnnnnnnnnnnnnnnnnnnnnnnnnnnnnnnnnnnnnnnnnnnnnnnnnnnnnnnnnnnnnnnnnnnnnnnnnnnnnnnnnnnnnnnnnnnnnnnnnnnnnnnnnnnnnnnnnnnnnnnnnnnnnnnnnnnnnnnnnnnnnnnnnnnnnnnnnnnnnnnnnnnnnnnnnnnnnnnnnnnnnnnnnnnnnnnnnnnnnnnnnnnnnnnnnnnnnnnnnnnnnnnnnnnnnnnnnnnnnnnnnnnnnnnnnnnnnnnnnnnnnnnnnnnnnnnnnnnnnnnnnnnnnnnnnnnnnnnnnnnnnnnnnnnnnnnnnnnnnnnnnnnnnnnnnnnnnnnnnnnnnnnnnnnnnnnnnnnnnnnnnnnnnnnnnnnnnnnnnnnnnnnnnnnnnnnnnnnnnnnnnnnnnnnnnnnnnnnnnnnnnnnnnnnnnnnnnnnnnnnnnnnnnnnnnnnnnnnnnnnnnnnnnnnnnnnnnnnnnnnnnnnnnnnnnnnnnnnnnnnnnnnnnnnnnnnnnnnnnnnnnnnnnnnnnnnnnnnnnnnnnnnnnnnnnnnnnnnnnnnnnnnnnnnnnnnnnnnnnnnnnnnnnnnnnnnnnnnnnnnnnnnnnnnnnnnnnnnnnnnnnnnnnnnnnnnnnnnnnnnnnnnnnnnnnnnnnnnnnnnnnnnnnnnnnnnnnnnnnnnnnnnnnnnnnnnnnnnnnnnnnnnnnnnnnnnnnnnnnnnnnnnnnnnnnnnnnnnnnnnnnnnnnnnnnnnnnnnnnnnnnnnnnnnnnnnnnnnnnnnnnnnnnnnnnnnnnnnnnnnnnnnnnnnnnnnnnnnnnnnnnnnnnnnnnnnnnnnnnnnnnnnnnnnnnnnnnnnnnnnnnnnnnnnnnnnnnnnnnnnnnnnnnnnnnnnnnnnnnnnnnnnnnnnnnnnnnnnnnnnnnnnnnnnnnnnnnnnnnnnnnnnnnnnnnnnnnnnnnnnnnnnnnnnnnnnnnnnnnnnnnnnnnnnnnnnnnnnnnnnnnnnnnnnnnnnnnnnnnnnnnnnnnnnnnnnnnnnnnnnnnnnnnnnnnnnnnnnnnnnnnnnnnnnnnnnnnnnnnnnnnnnnnnnnnnnnnnnnnnnnnnnnnnnnnnnnnnnnnnnnnnnnnnnnnnnnnnnnnnnnnnnnnnnnnnnnnnnnnnnnnnnnnnnnnnnnnnnnnnnnnnnnnnnnnnnnnnnnnnnnnnnnnnnnnnnnnnnnnnnnnnnnnnnnnnnnnnnnnnnnnnnnnnnnnnnnnnnnnnnnnnnnnnnnnnnnnnnnnnnnnnnnnnnnnnnnnnnnnnnnnnnnnnnnnnnnnnnnnnnnnnnnnnnnnnnnnnnnnnnnnnnnnnnnnnnnnnnnnnnnnnnnnnnnnnnnnnnnnnnnnnnnnnnnnnnnnnnnnnnnnnnnnnnnnnnnnnnnnnnnnnnnnnnnnnnnnnnnnnnnnnnnnnnnnnnnnnnnnnnnnnnnnnnnnnnnnnnnnnnnnnnnnnnnnnnnnnnnnnnnnnnnnnnnnnnnnnnnnnnnnnnnnnnnnnnnnnnnnnnnnnnnnnnnnnnnnnnnnnnnnnnnnnnnnnnnnnnnnnnnnnnnnnnnnnnnnnnnnnnnnnnnnnnnnnnnnnnnnnnnnnnnnnnnnnnnnnnnnnnnnnnnnnnnnnnnnnnnnnnnnnnnnnnnnnnnnnnnnnnnnnnnnnnnnnnnnnnnnnnnnnnnnnnnnnnnnnnnnnnnnnnnnnnnnnnnnnnnnnnnnnnnnnnnnnnnnnnnnnnnnnnnnnnnnnnnnnnnnnnnnnnnnnnnnnnnnnnnnnnnnnnnnnnnnnnnnnnnnnnnnnnnnnnnnnnnnnnnnnnnnnnnnnnnnnnnnnnnnnnnnnnnnnnnnnnnnnnnnnnnnnnnnnnnnnnnnnnnnnnnnnnnnnnnnnnnnnnnnnnnnnnnnnnnnnnnnnnnnnnnnnnnnnnnnnnnnnnnnnnnnnnnnnnnnnnnnnnnnnnnnnnnnnnnnnnnnnnnnnnnnnnnnnnnnnnnnnnnnnnnnnnnnnnnnnnnnnnnnnnnnnnnnnnnnnnnnnnnnnnnnnnnnnnnnnnnnnnnnnnnnnnnnnnnnnnnnnnnnnnnnnnnnnnnnnnnnnnnnnnnnnnnnnnnnnnnnnnnnnnnnnnnnnnnnnnnnnnnnnnnnnnnnnnnnnnnnnnnnnnnnnnnnnnnnnnnnnnnnnnnnnnnnnnnnnnnnnnnnnnnnnnnnnnnnnnnnnnnnnnnnnnnnnnnnnnnnnnnnnnnnnnnnnnnnnnnnnnnnnnnnnnnnnnnnnnnnnnnnnnnnnnnnnnnnnnnnnnnnnnnnnnnnnnnnnnnnnnnnnnnnnnnnnnnnnnnnnnnnnnnnnnnnnnnnnnnnnnnnnnnnnnnnnnnnnnnnnnnnnnnnnnnnnnnnnnnnnnnnnnnnnnnnnnnnnnnnnnnnnnnnnnnnnnnnnnnnnnnnnnnnnnnnnnnnnnnnnnnnnnnnnnnnnnnnnnnnnnnnnnnnnnnnnnnnnnnnnnnnnnnnnnnnnnnnnnnnnnnnnnnnnnnnnnnnnnnnnnnnnnnnnnnnnnnnnnnnnnnnnnnnnnnnnnnnnnnnnnnnnnnnnnnnnnnnnnnnnnnnnnnnnnnnnnnnnnnnnnnnnnnnnnnnnnnnnnnnnnnnnnnnnnnnnnnnnnnnnnnnnnnnnnnnnnnnnnnnnnnnnnnnnnnnnnnnnnnnnnnnnnnnnnnnnnnnnnnnnnnnnnnnnnnnnnnnnnnnnnnnnnnnnnnnnnnnnnnnnnnnnnnnnnnnnnnnnnnnnnnnnnnnnnnnnnnnnnnnnnnnnnnnnnnnnnnnnnnnnnnnnnnnnnnnnnnnnnnnnnnnnnnnnnnnnnnnnnnnnnnnnnnnnnnnnnnnnnnnnnnnnnnnnnnnnnnnnnnnnnnnnnnnnnnnnnnnnnnnnnnnnnnnnnnnnnnnnnnnnnnnnnnnnnnnnnnnnnnnnnnnnnnnnnnnnnnnnnnnnnnnnnnnnnnnnnnnnnnnnnnnnnnnnnnnnnnnnnnnnnnnnnnnnnnnnnnnnnnnnnnnnnnnnnnnnnnnnnnnnnnnnnnnnnnnnnnnnnnnnnnnnnnnnnnnnnnnnnnnnnnnnnnnnnnnnnnnnnnnnnnnnnnnnnnnnnnnnnnnnnnnnnnnnnnnnnnnnnnnnnnnnnnnnnnnnnnnnnnnnnnnnnnnnnnnnnnnnnnnnnnnnnnnnnnnnnnnnnnnnnnnnnnnnnnnnnnnnnnnnnnnnnnnnnnnnnnnnnnnnnnnnnnnnnnnnnnnnnnnnnnnnnnnnnnnnnnnnnnnnnnnnnnnnnnnnnnnnnnnnnnnnnnnnnnnnnnnnnnnnnnnnnnnnnnnnnnnnnnnnnnnnnnnnnnnnnnnnnnnnnnnnnnnnnnnnnnnnnnnnnnnnnnnnnnnnnnnnnnnnnnnnnnnnnnnnnnnnnnnnnnnnnnnnnnnnnnnnnnnnnnnnnnnnnnnnnnnnnnnnnnnnnnnnnnnnnnnnnnnnnnnnnnnnnnnnnnnnnnnnnnnnnnnnnnnnnnnnnnnnnnnnnnnnnnnnnnnnnnnnnnnnnnnnnnnnnnnnnnnnnnnnnnnnnnnnnnnnnnnnnnnnnnnnnnnnnnnnnnnnnnnnnnnnnnnnnnnnnnnnnnnnnnnnnnnnnnnnnnnnnnnnnnnnnnnnnnnnnnnnnnnnnnnnnnnnnnnnnnnnnnnnnnnnnnnnnnnnnnnnnnnnnnnnnnnnnnnnnnnnnnnnnnnnnnnnnnnnnnnnnnnnnnnnnnnnnnnnnnnnnnnnnnnnnnnnnnnnnnnnnnnnnnnnnnnnnnnnnnnnnnnnnnnnnnnnnnnnnnnnnnnnnnnnnnnnnnnnnnnnnnnnnnnnnnnnnnnnnnnnnnnnnnnnnnnnnnnnnnnnnnnnnnnnnnnnnnnnnnnnnnnnnnnnnnnnnnnnnnnnnnnnnnnnnnnnnnnnnnnnnnnnnnnnnnnnnnnnnnnnnnnnnnnnnnnnnnnnnnnnnnnnnnnnnnnnnnnnnnnnnnnnnnnnnnnnnnnnnnnnnnnnnnnnnnnnnnnnnnnnnnnnnnnnnnnnnnnnnnnnnnnnnnnnnnnnnnnnnnnnnnnnnnnnnnnnnnnnnnnnnnnnnnnnnnnnnnnnnnnnnnntaactttgtacccattgacctcttctccccatcccctccactccattctccccagcctccagcaacctctattttactctctatttctatgaaatcaacctctttagattccacatatgagtgagatcatgtagtatttgtccttctgtgcttatttcacttaatgtaatgtcctacaggttcatccatgtcgccacagatgacaggatctcattcttttttatggccaaagagtactcygctgggtatatgtaccatatttttttaatccattcatccgctgatggaaagttaggttgcttccaaatcttggctgttgtgaatagtgctgcagtaaacatgagagtgcagatatctcttccacatactgattccatttcctttggatatattcccagtagtgagattgctggatcatatggtagttccattaattactgctaaaagctaaayatcagatttttatacatatagatggcatacattcatcagaaatatatcgtgcttcataaatacttgtacttttggctgcacattataatgtagtatggcatagtatcgagtaatagcatatcaatttattctcttctgttaataaactttaaaaaccaaatacattaatctgggcaaggtagtgtgtgcctgtaatcccagctactcaagaggctgatgtagaaggatcacttgagcccaagcgttcaagacaagcctgaacaacatagcaagaactagtctaaaaacaaaaagatacattaaatatattacagcttattcatttgaattaaaaagtgaaagctggacatagtagctcacacctgtaatcccagcactttgggaggccaaaggcgggaggatcacttgaggtcaggagttcgagaccagcctggccaacatggtgaaaccccatctctactaagaatacaaaaattagctggacatggtggtgggcgcctgtaatcccagctactcaggaggctgaggcaggagaatcgcctgaacccaagaggcagaggttacagtgagccaagattgtaccactgcactccagactgggcaacagagcgagactctgggaaaaaaaaaaaagttattttttctaggagaaaatctgctttggttggttcaacagtargaactgactttgccagttaagctgtggtagatatgttcactaaattggatgcactaaatctatagccataatttgaggaaattgagttgmcaactgatacattaaaaatggatatcattaaaaatggattttaataatcaaacagtgtatgacttttggcatataacttgtaaggagctcraagactcaaggggagacattactataacatttctcacaagttagtaatgtgaaaarggcttcttagcatttctmtattaaaaaaaaaaaaggaacacccaaaatagaaaatagacctagaattaatattgaacctgagtcttctagtggaaagccatattgatgcatgagatacatgaaataattgtgggaggaaagggcagccctactcatttcactatcactaagatatgcttttcaagtaaacatagtataaaaaaattaatrtttrtgtcttgcttgtcctatactaatcattctaatgataatacagaagaaaataaatgttaacctttacagccttatggattcagaaagcacattttaaaatttcatgttatatatattttttaattgcagaaaagtatgatagggtgatcagttaaagacaagtacaaaaatatactaggataaaattggagcacataaaatgaaaacagttcaagaaatgaaagatgtaaaaatcttggctgttaagagaatgtttttaatggattttggtcattttaaaatgtgctarggctgagctactggctaacgcctgtggtcccagtgctttgagagactgaggtrggaggattgctttgggccaggagtccaagaactagcctaggcaacatagcaagactcccatttaaaaaaataataaaatacaatgtgctaraatatttgccctttgtaaatatttgaggttacagtgagaattacagatatcgacctgaaaaatgtgggaggagagttgtatgtatgtgcatattttctggagggagaggtkatccatagctttcatcagattcattaaaggcagggtatttgagccagaaaacaattcagcacagtcagaggccaggtcaccagtccctgtaggtgtactgttcactctagcctctacttattccrtatgtctttcctgtaccaacatgtagatgtatggatggtgcaaaagagtatctgctttttaaaatcccagtagagttataaattcttagagtagaactcttagtttagaaacatctttcctgtatatcttcatcaaataattatatttctcctgtgattgtttcgtgtytgtaagttggtggtaccctctctttcagtttgaaggaagaaagtactgtgaacatgactttcagatgctctttgccccttgctgtcatcagtgtggtaagttttactgctaaatgtcaagtaaaaagtaagtttccggccaggcgcggtggctcacacctgtaatcctagcactttgggaggcggagggaggaggatcacctgaggtcaggaattcgagaccagcctggccaacgtagggaaacccsgtctctactaaaaatacaaaaattaactgggcatggtggcaggtgccagtaatcccagttattcaagaggctgaggcaggagaatcgctygaacccagggggcagaggttgcagtgagctgagattgcaccacttcactccagcctgggcaacagcmaaactccatcttgcggggaaaaaaagtaagtttccacattacttcagtcatttcacactggtgaagtatcgatggtaaaaatggtttttagtgctcattatgaataactgttggatacttcatcactcctcttccctattgttaacatagaacaagctggaggagtatcaaaacctagagwtcattgatttttaaggacatttaaggtagaggtattttgggatgaactaggactcctatcgggtggngtttgggagtgttcttttcctgtgttaacacaacctttaccwacttgcttttggttttgcccngaaagaggcaggraagaaatcagtgaggtgcttcagaagcttagggatgcttaaacattgcttgcacggcgcataagtgatggacttgcttgcacgttggccacttcactggttgctaatacctctgccnggtttccagagattgaagaaactgggtagaatgttctaaaggtttaatgaaagaataaattaagtatgggttataagaaactgtgctgtagatttcagttgtctatgttgacaatgaccagaaataaccaaaaggcattcaagagagcctagtagctcgtttggacaggaaagctagattcagagatgacacaaaacagcccaaaaatgtggctgytgaatcaaaaacaaaaattcrgatgaaataaaacttttttgctaatgtgcttactctggtagacacataaaaagttcttctactggccacgtgtggtggctcacgcctataatcctagcactttgggaggccaagacgggcggatcacctgaggtcgggaattygaccaacatggagaaaccccgtctctactgaaaatacaaaatagccgggcgtggtggcaggwgcctgtaatcccagctacttgggaggctgaggcaggagaatcgcttgaacccgggaggcagaggttgcagtgagtcgagatggtgccattgcactccagcctggacaacaagagcgaaactgtctcaaaaaaaaaaaaaaaaaaaaaagttcctctattgagaaaggcttcaacggtttttttcctcaytgtttttccttaattrctctctcagtaaataaagtgccatgcctgttacttaggatgttacttagtaacatcctttgtgtgttgctttcccacaggtgaattcatcattggccgagttatcaaagccatgaataacagctggcatccggagtgcttccgctgtgacctctgccaggaagttctggcagatatcgggtttgtcaagaatgctgggaggtaggtggattttcatccttgtcagatgtgggtggacaatgtgactgtgacaagatcatgtgtattctccatgtgggatgtaaggcagttctgtaggacactgaattgagggcatgggaactcagacactgcagtgtgttgactgagtgctgctgctgggagtggacccttgtgttgctgttcacagggcataactgctccatgcatggctgaactaccaatgggggatnnnnnnnnnnnnnnnnnnnnnnnnnnnnnnnnnnnnnnnnnnnnnnnnnnnnnnnnnnnnnnnnnnnnnnnnnnnnnnnnnnnnnnnnnnnnnnnnnnnnnnnnnnnnnnnnnnnnnnnnnnnnnnnnnnnnnnnnnnnnnnnnnnnnnnnnnnnnnnnnnnnnnnnnnnnnnnnnnnnnnnnnnnnnnnnnnnnnnnnnnnnnnnnnnnnnnnnnnnnnnnnnnnnnnnnnnnnnnnnnnnnnnnnnnnnnnnnnnnnnnnnnnnnnnnnnnnnnnnnnnnnnnnnnnnnnnnnnnnnnnnnnnnnnnnnnnnnnnnnnnnnnnnnnnnnnnnnnnnnnnnnnnnnnnnnnnnnnnnnnnnnnnnnnnnnnnnnnnnnnnnnnnnnnnnnnnnnnnnnnnnnnnnnnnnnnnnnnnnnnnnnnnnnnnnnnnnnnnnnnnnnnnnnnnnnnnnnnnnnnnnnnnnnnnnnnnnnnnnnnnnnnnnnnnnnnnnnnnnnnnnnnnnnnnnnnnnnnnnnnnnnnnnnnnnnnnnnnnnnnnnnnnnnnnnnnnnnnnnnnnnnnnnnnnnnnnnnnnnnnnnnnnnnnnnnnnnnnnnnnnnnnnnnnnnnnnnnnnnnnnnnnnnnnnnnnnnnnnnnnnnnnnnnnnnnnnnnnnnnnnnnnnnnnnnnnnnnnnnnnnnnnnnnnnnnnnnnnnnnnnnnnnnnnnnnnnnnnnnnnnnnnnnnnnnnnnnnnnnnnnnnnnnnnnnnnnnnnnnnnnnnnnnnnnnnnnnnnnnnnnnnnnnnnnnnnnnnnnnnnnnnnnnnnnnnnnnnnnnnnnnnnnnnnnnnnnnnnnnnnnnnnnnnnnnnnnnnnnnnnnnnnnnnnnnnnnnnnnnnnnnnnnnnnnnnnnnnnnnnnnnnnnnnnnnnnnnnnnnnnnnnnnnnnnnnnnnnnnnnnnnnnnnnnnnnnnnnnnnnnnnnnnnnnnnnnnnnnnnnnnnnnnnnnnnnnnnnnnnnnnnnnnnnnnnnnnnnnnnnnnnnnnnnnnnnnnnnnnnnnnnnnnnnnnnnnnnnnnnnnnnnnnnnnnnnnnnnnnnnnnnnnnnnnnnnnnnnnnnnnnnnnnnnnnnnnnnnnnnnnnnnnnnnnnnnnnnnnnnnnnnnnnnnnnnnnnnnnnnnnnnnnnnnnnnnnnnnnnnnnnnnnnnnnnnnnnnnnnnnnnnnnnnnnnnnnnnnnnnnnnnnnnnnnnnnnnnnnnnnnnnnnnnnnnnnnnnnnnnnnnnnnnnnnnnnnnnnnnnnnnnnnnnnnnnnnnnnnnnnnnnnnnnnnnnnnnnnnnnnnnnnnnnnnnnnnnnnnnnnnnnnnnnnnnnnnnnnnnnnnnnnnnnnnnnnnnnnnnnnnnnnnnnnnnnnnnnnnnnnnnnnnnnnnnnnnnnnnnnnnnnnnnnnnnnnnnnnnnnnnnnnnnnnnnnnnnnnnnnnnnnnnnnnnnnnnnnnnnnnnnnnnnnnnnnnnnnnnnnnnnnnnnnnnnnnnnnnnnnnnnnnnnnnnnnnnnnnnnnnnnnnnnnnnnnnnnnnnnnnnnnnnnnnnnnnnnnnnnnnnnnnnnnnnnnnnnnnnnnnnnnnnnnnnnnnnnnnnnnnnnnnnnnnnnnnnnnnnnnnnnnnnnnnnnnnnnnnnnnnnnnnnnnnnnnnnnnnnnnnnnnnnnnnnnnnnnnnnnnnnnnnnnnnnnnnnnnnnnnnnnnnnnnnnnnnnnnnnnnnnnnnnnnnnnnnnnnnnnnnnnnnnnnnnnnnnnnnnnnnnnnnnnnnnnnnnnnnnnnnnnnnnnnnnnnnnnnnnnnnnnnnnnnnnnnnnnnnnnnnnnnnnnnnnnnnnnnnnnnnnnnnnnnnnnnnnnnnnnnnnnnnnnnnnnnnnnnnnnnnnnnnnnnnnnnnnnnnnnnnnnnnnnnnnnnnnnnnnnnnnnnnnnnnnnnnnnnnnnnnnnnnnnnnnnnnnnnnnnnnnnnnnnnnnnnnnnnnnnnnnnnnnnnnnnnnnnnnnnnnnnnnnnnnnnnnnnnnnnnnnnnnnnnnnnnnnnnnnnnnnnnnnnnnnnnnnnnnnnnnnnnnnnnnnnnnnnnnnnnnnnnnnnnnnnnnnnnnnnnnnnnnnnnnnnnnnnnnnnnnnnnnnnnnnnnnnnnnnnnnnnnnnnnnnnnnnnnnnnnnnnnnnnnnnnnnnnnnnnnnnnnnnnnnnnnnnnnnnnnnnnnnnnnnnnnnnnnnnnnnnnnnnnnnnnnnnnnnnnnnnnnnnnnnnnnnnnnnnnnnnnnnnnnnnnnnnnnnnnnnnnnnnnnnnnnnnnnnnnnnnnnnnnnnnnnnnnnnnnnnnnnnnnnnnnnnnnnnnnnnnnnnnnnnnnnnnnnnnnnnnnnnnnnnnnnnnnnnnnnnnnnnnnnnnnnnnnnnnnnnnnnnnnnnnnnnnnnnnnnnnnnnnnnnnnnnnnnnnnnnnnnnnnnnnnnnnnnnnnnnnnnnnnnnnnnnnnnnnnnnnnnnnnnnnnnnnnnnnnnnnnnnnnnnnnnnnnnnnnnnnnnnnnnnnnnnnnnnnnnnnnnnnnnnnnnnnnnnnnnnnnnnnnnnnnnnnnnnnnnnnnnnnnnnnnnnnnnnnnnnnnnnnnnnnnnnnnnnnnnnnnnnnnnnnnnnnnnnnnnnnnnnnnnnnnnnnnnnnnnnnnnnnnnnnnnnnnnnnnnnnnnnnnnnnnnnnnnnnnnnnnnnnnnnnnnnnnnnnnnnnnnnnnnnnnnnnnnnnnnnnnnnnnnnnnnnnnnnnnnnnnnnnnnnnnnnnnnnnnnnnnnnnnnnnnnnnnnnnnnnnnnnnnnnnnnnnnnnnnnnnnnnnnnnnnnnnnnnnnnnnnnnnnnnnnnnnnnnnnnnnnnnnnnnnnnnnnnnnnnnnnnnnnnnnnnnnnnnnnnnnnnnnnnnnnnnnnnnnnnnnnnnnnnnnnnnnnnnnnnnnnnnnnnnnnnnnnnnnnnnnnnnnnnnnnnnnnnnnnnnnnnnnnnnnnnnnnnnnnnnnnnnnnnnnnnnnnnnnnnnnnnnnnnnnnnnnnnnnnnnnnnnnnnnnnnnnnnnnnnnnnnnnnnnnnnnnnnnnnnnnnnnnnnnnnnnnnnnnnnnnnnnnnnnnnnnnnnnnnnnnnnnnnnnnnnnnnnnnnnnnnnnnnnnnnnnnnnnnnnnnnnnnnnnnnnnnnnnnnnnnnnnnnnnnnnnnnnnnnnnnnnnnnnnnnnnnnnnnnnnnnnnnnnnnnnnnnnnnnnnnnnnnnnnnnnnnnnnnnnnnnnnnnnnnccatggtctgtatccagcagcagctcctcctttataggtgctactgagtatgctcacctctattctctttttgggctattataataggctatgtcttaaagtaaccttcaaaggacagccacctgaattacaactgcagaagtattatattatggggccacctatggccaaatgaaatgactgtctcaaactttccttcatcttctctgaaaataggttaactctggtrtttactttattagatataaaatatggcaattcaaaaatgacctatagcaattttttttcagcattttgtttgtgccaagtgtgagaaaccctttcttggacatcgccattatgagaggaaaggcctggcrtattgtgaaactcactataaccaggtattgaccttagtcactggatgctagatagacttttatgaacctaagcttatcagtagtttagctacaaggaaatctcttggaagatgtacattgttcagtagagatttgtttttaactttttatttgggaaataatttcagactcagaagctaactataaaatatacaaagaatacctgtatgtctttcattcaagtccacagtttgctttatcatttcccamgctcagtcttcctgtgtaaaacacatasttacrtaaatattatatacaagtacgatggctgttttgccaataagttcatcatactcctttayccctaaatacttcagtgtatatttcccaagaatatgggactctctaacataattgtagttatcaatattgataccgtactctaaccatttattccagttttrtcacttgagtcaatatcctcacagcattttttccactcccagactggacccagcctmkggctgtgatgtttctttagcyttcttaaatctggaacgtttccagagtcttttaaaatttttgatgacattgacattttggagggatgcagagggcccctaacccctttttaatagactactttccacttgggttcacctggtgcttctctgtgcttagatgaggttatacacagcaggttgtggcctcatacagtggcagggcatcttctcagaaccttgcccctggagcattttatacctctcctgcmctggtgatctcccaggmatggtgctggctgataacatcactgtgaattacaatttccttccctcctctgtaagaaagaagcaatctgtgggcaatcattytatgaccatggaaatgtcctgttcctcatcaaccygccctagattcagcaccccttgatgattcttgtctctgcgccagctgcaaacrayacttctccagccccatgccctccacccatagtctggtcctcagcgctctgcctgagcaagaacccacctcctctcccgtctataggtttattcatttatctatttcttatccatatggactcacagatttctatattttgcatcacttatttgggtgttcaaactgtcatcyggraagtttttcttttaattgatgagagtgaattactttcattgtaagaagtaaaaacttgtcaaagaacttttactaawtttctctagtagtgataaatcctcaatttagatagccagctatttttaaatgttcagtgttctaaaaattctaacacatcttgaactttgaccacctttttttattttcagctatttggtgatgtttgcttccactgcaatcgtgttatagaaggtgatggtaagtatctgtgtgagttttagattggtgccactttgacacaaaaacacttgggkaatgtggaaattcaggttggtgattgctatggtttgaaatgtgatcgttatcagttactttttctctatctttggcgtattttccaagtaatctgtagcagtaagatgataatatcaaagagttggatttgttactgatttatgacactactttyggccactgctgyagtgttgtatgycagcaatcatgggaactgtccctggtggaccctaagacctgttttgtgtccagtttcaggaagctctagaacaacgtttattaggaasagtttaatctgctatcgtagttagsaagaggcactttaacctgcacatgctaaaagctggcagttatcagcaagcatatctaggacttaccacccttgtactgtggtaattaggctgggctgattgattggaacagaaaggaagcagctgtgtttgctaagactcgctaacacacttctgccagagacttcctggcaaagttttgaacratmctgttttcagcatgattcatggctscctgcagacatcacctaattcaggaaatacttttgaaacactgttcatgtgcmgtttgtgaaaacaatccaggaaaacaatctttagtgccattgaaaataaaacttacctccctcctctgtgaaatagatgccaggtgaaagaagctgcaraggaaactgtcttsttatcatcagctctggaaaaaagactcctacaggggcaaataagttaatgtctggatttttgaaaattatttacctagttcatatttccwwgttggrccaacagcagtagggacagaaacagcaagctcacctaaacaacatgrtgcatggacagttgccacatgtgcccaggccaagggggcacagttgctggtgtaagacatggcacacatcatttataacttcacaggatacttaaggatgggggaagattaaagtcagccctccgtatccaggggctggatccaaacatccgtggattcaaccaactatggatcaaaaatatttagagaaaaataacaatataacartacaaatagtacagtataatgactatttacatatcatttacattgtactaggcattataattaacctagagatgatctaaagtatacgagataggaccaggctcagtggctcacgcctgtgatcccaacactttgggaggccaaggcgggcagatcaactgaggtcaagagttcaagagcagtctggccaacatggtgaaaccccatctctactaaaaatacaaaaacttagctgggtgtggtggtgcatgcctatgatcccagctactcgggaggctgagacaggagaatcacctgaacccgggaggcagaggttgctgtgagccaagatcacaccattgcactccagcctgggcaacaagagcaaaaacttcgtctcaaaaaaaataaataaatgtatacaaracaatgtacataggttatatgcattttatatcagggacttgagcgtctgagattttggtatcctcacagcatcctagaaacagtatcctgcacatactgagcaacaactgtatacataaaggttgagggccgggtgtggtggcttatacctgtaatcccagcacttaaggaggccgagacaggagaatttcttgaggccaggagttcgataccagcctgggcaacagagcaagacctccatctctacaaaataaaaataaaaaattagccaggtgtggtagcacacacctatggtcccagcyacacaggagaacgagaggagaagattgcttgagcccaggagttcgagctgtgatcgcaccactgcaatacagcctggacaacagagcgagaccctgtctgaaaaacaaaagaaaagaagctctcaggaaagaggttcttggctgggcatggtggctcatgcctataatctcagcattttgggagaccgaggcaggtagattgcttgagcccaggagttcaagaccgtcctgggaaacatggcaagaccgtgtctctataaaaaatacaaaaattagacaggtataggccgggcgcagtggctcaygcttgtaatcccagcactctgggaggccaagacgggcggatcacaaggtcaagagattgagaccatcttggccaacatggtgaaatcccgtctctattaaatacaaaaattagctgggcatggtggcacgcacctgtagtcccagctacttgggaaaatgaggcaggagaatcgcttgaacccaggaggcggaggttgcagtgagccrtgattgcgccactgcactccagcctggcaacagagcgagattccgtctcaaaaaaaaaaaaaaaaaaaaaaattagccaggtgtagtggcatgcactgtagtcccagctactcaggaggctgaggtgggaggatcacttgagcctgggaggttggggttacagtgagccaagattgtgccactgtactccagcctgggctatagagcaagaccctgtctcatttaaaaaaaaaaaaaaaaaaaaaaaaggttcttgagaacctccaccaagtgccacagacacagtcgtagttctgttttrgagttgaaattctaagctgccctgctccccatactgatgtatttccatgtgaccagatctctttcctctttctccagtggtctctgctcttaataaggcctggtgcgtgaactgctttgcctgttctacctgcaacactaaattaacactcaagtaagtgtacggttttgtccagtgtgaatcctaagactgaaaactttggggrgacactkaaaaaaaatcctagaatttagaaaaagagaattatttgatttcttatttcctctttctgttcaggccttctgaaagtaaaggttcttcctttaactgttccctgttctttcttctattccttctttgtcctactcaaagggataagtttgttgaaattgacctaaagccagtctgcaaacactgttatgagaaaatgccagaagaatttaagaggcgacttgccaaacgggagagagaagcaaaggataaggacaagcagaaaaagaaaaagccagtctgtttgtaaacttttctatccctgtgtcatcattttcactrctttctcctttggttagtcctttggaatatgtttttgttctgtttctgtcttttgctttcttccccccctgcaacttttgggcatgtatttgtagtcatcagagattgaaatacaagtatttgtcctatgtagaactggtccttttgcataactgctaaaattacaaaaattaaatgaatacactccatacttaatacagttttgtggtcatgtatttcacttactctgtagactcactcacctcattttttaaacaccatatagtatacatttctttcatttttttttaatggatttaaagggaagaattctaatctcttaatagaccctggaaaacattttaaaggatttttgtctgattaactgtagcttttaaaatcctggtttttggtttccttgccacgatcatttaattgataaattataagtgttgtttgatatttttaaaaatgcatatattctaagttatgtattaaattatttcagcatggcgaggcatggtggctcacgcctgtaatcccagcactttaggaaggcagagtggaaggattgcctgagcccaggattttgagaccagcctggactacatgcctagaccccatccgtcaaaaaaaaaaaacaaattagccaggcgtggtggcccatacctatagtcccagctactcaggaggctgaggctgctgcagtgagccatgactgccactgcactccagcttgggcgacagagtgagactctgtctcaaaaaaaaaaaaaaatctttcagcatgtttcrtatctaagcaaagtccatctgatttacgtaagacatcttcttctgtgatgttcgaatgtgcattcatacaatacccatatgctactgtttatgaattcatttcctcaatgtcttcaaactctttttttattcctgatttttatgagaagtatttcaatctttgaaattcttttgaattaccagcatgattgttccagttttccctcatagttaccattgtgtttggagctctaaaaataytttgttccagtttacatgtttccttctataaagaggaattaaatgtaaatgtaagattaaaacaatgaggccgggcatggtggctcacgcctgtgatcccagcactttgagatgccaaggcagcagatcacttgagatcagcctgggcaacatggtgaagccccgtctctactaaaaatacaaaaaaattagccaggcatggtggcgggtgcctgtaatcccagatactcgcgaggctgagacaggagaatcgcttgaacctgagaggcggaggttgcagtgagccgagatcgtgccactgcattccaccctgggcgacagagtgagactctgtctcaaaaaataaaaaataaaaaagattaaaactggaaagcttgctaaggtagtctgtctgaaaacaggaataatttttttcttttatcaaaaaaatggcagttttaatagcttttgctctaagatgaccttgggagaaaagccgtaaagtaattcccagtgtagtgttttaaaatagaagatttttcattttagatatgtgtttaggaatttcctttgttactaacattgtcctttaaaatgatcttgaagcaaagtctagtttaatataatgtttaaatgcagtaaaaatatcagcagattttataatttttgtcatagatagcaatataccactagatttatttcacaaatgctacctgaatataatttcacagacagtgaacaagttaccaagttgtatatttactcaattcaaaattaaacactctggatttcaacagtaataagctcctgtaattacctgttggaaatgcattacagatgatcaggaggctatctgaaaagttgtcttctccaggaccattttaaaaataaattgataatgtgtgttgctctagcttttcaaaagaatagttgagttcttcaaatagctaccgcttacaatgcaaccacaggtgatctggttacatttatgttaagagtgattaaaaactttcttccaacctttctgtcagataaccaaaataaccccttataatttaaaattaattaaacctcatggctacctaatttaaagtactaagtaagatcatgttgcctccaataaagaaatcattcacattataaaaatatgattctttcctttagataaatttatctttaaggtattctaaaatgtgattaccatcctaggcaatacgacaggaccctgtctctacaaaaaaaaatttttaagttagccaggcatagtagtatgcacttgtgtcccagctattcaggaggctgaggtgggaggatggcttgagtccaggagttagaggctgcagggagctgtgatcaccactgcactccagcctgagtgacagtcgaggctctgtttccaaaaaaaaaaaaaaaaaaaaagtgattgactgtacttaagtwaattatatttacattagatttcctgtttacttagtactgaataaaatgtaatctacagtctgtgttacacagatggatgtatagaaccaatttataaggacttttttttwaaattatactgaatttttatatatatatcacaataagaattgaggttaggattatggtttttttactaacatgaatataatatcatcacctagttgccttcgtttagttcagtacaattactgcacatcatttatatatctttgttgaatatgtttccactaacttctttttttttataattttttgtctttaggaataagtttgtggagtttgacatgaagccagtctgtaagaagtgctatgagaaatttccattggagctgaagaaaagacttaagaaactagctgagaccttaggaaggaaataagttcctttattttttcttttctatgcaagataagagattaccaacattacttgtcttgatctacccatatttaaagctatatctcaaagcagttgagagaagaggacctatatgaatggttttatgtcatttttttaattaaaaaagaaaaattcatataatcgtgtttaaaacacaaatgaagtcagtatttgcctttgttaacccttatccatttgttgacatgtagactgtttacaaaaaaaaaacacatggttaaatgttaaattttaattaaggcccccaaaaattaaatataactttttaaaatgaaaggagtcaccttttacatgactcaggtgaaaaaacagtataaacattaatttactttgtgttcaaaagaaaattccaactgctgttggggaaggacacagaaaagaaaaataaccacccaagaaaaacaaaaacaagaaaaacaaatcttatacaatcttagtatatttatcaaactagtagctagaaagtgaatatgcacattactaagacaaaaaacaagtgtaattcagaactacttgattttttttagttaaatgcaataattattatgcttagttttataacctgctctccttgtgaattmttccttcaaatgattacttaacgcagtagtaatagctagctgtaggatgtcctttaaatttttgtgcaaaaaaaaatttataccaggtatttggaaatatactttacaatattggaaaatgaagtatttttaatgtattacagcaattatgtttctaagcttaatgttaagcatgtagtcttagaataggacatgaaattaaattgtatgtagcttggaatatattgcttcagaaaactgaatgtgtatgtcggtcatattgcctttataaccatgctaatatctatgctttatacatactcaaacttgccttgccttaaaaamatacatactacatacttaaatcaggaattctagccatctcacagaataccaactaaaactaagtgcattgagatctgagattggtaaacccagattcatttaccacagctgtaattaagtttttagaaactattctctttttggggaaatccattgaagttaatttctgttatcttattagaagaaaatgatgttgatatgtgtttcagattttccatttgaaatcttataattaatttgatttatttactgtaagtaggaggtataaatgacactcttaaattggaasgaggggtgttttagtgtctgttttaggtcaaaattagtgattctatttttatcaaaagttttatcctgaagtttcaggaccactcttccttaataaacttgttaatggaaagcgagctttatgaacatttaaaaatgttgctgctgctttgttrcttaaaaagaaagttgccaagagagacttcttagggaaaatatttgggtttttttttccaaaaattgctgaaatattgttttgccatttttaaaaagtctcaggttattaccactctgccattaaatatttgtatgcctgcatttttaaaaattctgtgcatgtactttatggagtacattctatttttgttttcagataccctacaaccaattttttttagtaatcttttagaattgaaattatcataaatgatcgagaataatcatcacatagtttaagattgtatatgttgagtagtttaaaacaatctttgcattttacagtaagaatcaaagtcccttcagtgtgcctttgtcagctaatatgtgaccagcaatgacaaccttgggagtatttattaaatattatgctatgaatataggcaacacagaacagggtttgcagtatagcgtcttgatgctaaattctcatatacctctacacgagaaatatggaggagaaaaacaagcatttacatatattcttcgtcactttgaagatgcatgrcctgaactcgactgcttgtgtttgtttacatatcaggcatacccaggcayctcctgcagccagaggttccattgctgtctttgctcagtcctcttttaaaatatgaattagtggacargcacggtgcctcacacctgtaatcccagcactttgggaggtcgaggcaggtggatcacgaggtcaggagatcaagaccatcctggctaccactgaaaccccatctctactacaaaaaaattagccgggcgtggtggcgggcacctgcagtcccagctactcgggaggctgaggcaggagaatggtgggaaccygggaggcagagcttgcagtgagccaagatcacgccactgcactccagcctgggcaacagagcaagactctgtctcaaaaaaaataaataaataaattatgaatgagtattttctagaaattcaacttgctaagcctgtaatacttaagggtagtttatctagatacagtactttcttccctgataagtagtatcattggagcccttaggtataggagaagaggaagaagtttaaaaagtgtaagtgggccgggcgtggtggctcatgcctgtaatcccagcactttgggaggccgaggggggcggatcacgaggtcaggagatccagactatcctggctaacaaggtgaaaccccgtctctactaaaaatacaaaaaaaaacattagccaggcrtggtggcgggcgcttgtagtcccagctactcgggaggctgaggtaggagaatggcttgaacccaggaggcggagcttgcagtgagccgagattgcaccactgcactccagcctgggcgacagagcaagactccgtctcaaaaaaaaaaaaaaaagtgtaagtggattaaaagagaaacttggtctagttcataatatttttaatagggctttccctggctgctggaaaacttaggccagtaagcatctctttgtttaaagtcctacaagacaatttgaaataattcattgttcatgccaaaattctaagtactgtttttcttagcaagtgtaacataatcaggaacaatgggtacragtaaaacattctttggatgatattcaragccttattagcactgcayctgaataataggtcattttgcctcactcatttgccaaagtagccatttytaagttaaggaagtttttagataggctcatagccttgtatttcgttttagattgtaagctcaatggyagggatactatattggtaattatgttttcatatagcaaccaccmcagtatattcttggtgcttaataaatgtttataattgttaacaataacctgttgtatattgtttattttgaatggtatatatgtgaaatacatatgaaaattgaagtattcatgaatatataatagaaacaagtaaatgaataaaatgacctggttactatagataagccaaattttgaaccatctagaacaatggtgtagtcttccctctactcaatgtaaatgctgggttttttaattattattattattaagaaggagatacagtccaggcacagtggctcacacctgtaatcccagcactttgggaggccgaggccagtggatcacttgaggtcaggagtttgagaccagcctggccaacacagtgaaacctcatctctattaaaaatacaaaaattaatagggcgtggtggtgtgcacctgtagtcccagctacttgggaggctgaggcagtagaatcacttgaatccagggggcagaggttgcagtgcaatggtgtgctgggattacaggcaatgagccactgtgccctgccctcagctggagtgcaatggtgcaattaagttctttctttttcaactcaaaatttgtctgcatctttacccaaatatccagatctgatactctaggcttgggctaatatagtggggtggaggaggcttgggttaaggtttaaagttccaagggctgaaccggaataaatggtgtatttatcaagggaagagcaaggcaaaaccagcaagtccaaaccatggaggcctcaaccgaggtgaggggaaaagttagggagccttaggaaagctctgaggagggaccccaattagggggaccgtagttagggtatgaggtttgtgagatcaggactggaattgctgcaagagaccctatgattgggtggcagcagcacgttgtggagatgagcctgcttcctcagcctcttcctcttgtcagaaccctttgcctctccctacacacgcacacacacatgcatgcaccatgctacagaaacctttctcagtcttgccattctctcaaattatgcgttggtcttcccttcatcttcagattctttaaagagtaatcaaagttcccacttctagcatgatgaagtgaggaggtcaacaaatctttccaaaatgtaactgtatagctggacaaaccatttagcattctgcaattttaccaaaggcacggcacaaatggggatgtgtttaagaatgaaagctggccaggcgcggtggctcacgcctgtaaccccagcactttgggaggctgaagcagaaggaccacttgagctcaggagttcaaaaacagcctgggcaacttggtgagacccccgtctgtacaaaaaaaaaatcaaaaaaggcatggtggtgcacacttgtggtcccagctacatgggaggctaaggcgggagaatcatttgagcccaggagattgaggctgcagtgagctgtgatcacaccactgcactccaacctgggcaacagagtgagacagaccctgtccctaaagaaaaaaaagaagaattaaagtgagccttggataagaccagcctgtgtccgtggcatctttgcccaggctgctacccccatttaccccagctgttgataacacacacagcggcccccagcagggcagcctgtggagataagctcccctgccacctcgctgcaggggctggaggcaagagtgaggaaggttttgatttgcagcatggctagttaaggtggtgatatcagtgaccaggaggaagaaaggccactgactcctagcctgaggctctgggcctttggagacgagcaaacgacctgcagattagtcatggatgtaagagggagctccgggaggtcggagagccagagggagcttagtaaactcttcacactacccaaatggactgaaggctcatagctggcagagattagagcaagcccaagccatgtccatatgcctagggcacacagcctgtgtgtgtgccggtgccagtgttaggaagtaaaagccggaacacccttgcaaatggcccggggcgtgcctcctccccattgcacatagatccagcagcagatggtggaaaccatattggctttaactgatgtttgacaaactatgcaaacaagaagcgacctctaagaagccattctgaaaaattaaagcaaacaaatgccaacaataaaactgaacaatgacctgagtgagtgcacactgtggaggagacaggcttcctgcatggagtccagccaggagacagtacagaatgcatggagcagctattggaagacattgaaaactaaatagttgcaggcagctttcccaagaagaccagaacttgaagtaccaccaaaccagtggtgagataaccatgtttcccctacggcatcccgtgactaacctggcagtgggcaccagggtgcagatagaaagagctccagaagatgccctctatttctggctcaagtaacgggaaaagggtctcctaacattccgagggaatccagaagttcgttcctccccatttttcttttccctgttctctcatacctcagcccacaagcagtcccacagtggcactggcaccagccccaagaggagcccaggagccaagacgcaggagggaaccttctccaactgacagagctgtggtcccaagagggcagaaacaatccatgttgcttctcttccaattcagtcctcccactgcttggcttcagatgtagaaatgcatggtagagccagataccgaaagcctgttttctgcttggaagactaaaaagagaagcctcagcaaatgaaagcaacagggtaattgctgagagagagttaatcagtgaagcaaccccattaacctgtctataaaccccagggctcattcttgagctgctcctgcatagatctcgtcctgttcaacacaccaaagattgacagctgaactgagagaccatcacccacagacacaactggccactgggtggtgcacaagtcagacagaactgaatagtcctgtgaagactttggacactgaactgactttggaaccagactgcagaatggaggggtgggaacttgtggcttgaacctaatcaggtagattgcctggccaaaatgaaaatacctatcatctccataggatttaatttcattcaatgattttttttttagtaaatttgcaatgttttacagccatccccaaaatctaattccaaaatatctctatcaccccaacaagagactccattcaggttggcagtcacatgcactcccagatttcccctctgcccagcccttggcaatcactagtctactttctgtgtctttgagtttgcctactctggatatttcatataaatgaaatgatatatgaggttttgtgattggctcctttcatttagaataatgttttcaaggctgattcatgttgtagtatgcattggtacttcattattttttatgcaaaagtaatattctattgtatggctataccacatttttctttgagacagagatctcactatgtcgcccaggctggagtttagtggctcttcacaggcctgatcacagctcctgcatggatcaaggagcatcactgcagcttcaaactgcagcttcaaactctcgggctcaagcgaccctcctgcctcaacctccccagtagctgggactacaggcacgtgtgtctgtgccaagtaataccacattttaaaaatccatcttcagtagatggaaatttggatgtttccaccttttactaataaaaatagtactgctataaacattatgtataggttttcttttgtttttgttttttctttttttgtagagatgggggtctcgctgtgttgcacaggctggtctcaaatacctggactcaagtgatcctcccatcgaaaactcccaaagtgctgggattacaggcgtgagccaccatgcctggcctgtatacaagtttttgtgtagacatgtttacatccaattaatgaacacaggatgtctttccattgatttagctcctctttaatttctttcaacagtgttgtgtagtttccagtctacaagtcttacacttttggattaaatttattcataattattttattatttttgataatattataaatggaattgtttacttaattttacttgaattgttcattgctagtgtataagtaggcaactcattttttttaattgaccttgtatggtacaatctctttgaactcatttattatcactgatagtttaggtctttttttttttgaggtttcattagggttttctgtatataagatcatgtcatctagaatagagatagttttatttattctattcctatttcaatactttttgtttgcatttcttgcctaattgccctggctagaacatccagtacagtgttgaataaaagtgaagaaagaaggcatccttgtaagtcactattttttttttttttttttttgacacgtagtctcgcactttggcccaggctggagtgcaatggcacgatcttggctcacggcaacttccgcctcccaggttcaagtaattctcctgcctcagcctcctgagtagctgggattacaggcgcccgccaccatgcctggcttactttttgtatttttattagagatggggtttcactattttggtcaggctggtctcgaactcctgacctcgtgatccccgcccaccttggcctcccaaagttctgggattacaaagcactttgtaagccactgtgcccagccgtaagtcagtttttataccccttctttcatccctgattttagtaattagagtctttcttttttcttggtcaatctcaaaaaacaaaagctttatgaatttaaaaacgtttttcaagccgggcacggtggctcactcctgtaatcccagcactttgagaggctgaggcaggctgatcacgaggtcaggagatcgagactatcctggctaacacgatgaaacaccatctgtactaaaaaaatacaaaaaaaaaaaaattagccgggtgtggtggcgggtgcctgtagtcccagctactcaggaggctgaggcaggagaatggcatgaaaccgggaggcggagcttgcactgagccaagatcgcgccactgcactccagcctgggcgacagagcgagactctgtctcaaaaaaaaaaattttttttcaaaacagcaacttttgcctttgttgattttctctactctttaaaaatgagttttaaaaaatttaatagtgattaaaaaaaagatttaccaacttaactttttttttttttttgagccagagtttcgctcttgttgctcaggctagagtgtactggtacgatctcgactcactgcaaccttcacctccagagttcaaatgattctcctgccacagcctcctgagtagctgggattacaggcatgcaccaccacgccccgctaattttgtatttttagtagagacggagtttctccatgttggtcaggctggtctccaactccccaccacaggtgaatgcccgcctcggcctcccaaagtgctaggattacaggcgtgagccaccgcacccagcccaacttaaccttttttttttttttttttttttgagatggagtctgtcacccaggctggagtgcggtggcgtgatctcggctcactgcaagcttgccttccgggttcacgccattctcatgcctcagcctcccgagtagctgggactacaggtgcccgccaccacgcccagctaattttttttttgtatttttttagtagagacggggtttcacgttgttagccaggatggtcttgatctcctgacctcatgatcggcccaccttgacctcccaaagtgctgggattacaggcgtgagccaccgcacccggcccaacttaaccactttcaagtgtgcaatgcagtagccttatgttgctgtgcaatgtatctccagaaagttttcatcttttatttctatttatttatttattattttgagacatgatcttgctgtcacctgggatggaatgcagtggtgcgattatgggtctctgc

SEQ ID NO: 97008 - DNA, 42096 bp, Homo sapiens
ttccacttcttctacacagagtattagactactctgctcccttgaagttagactgagccctgggattcaccttggccagtgaaatatgagtgaaggtgatatgtttcacttccagacagaagcatttaagagacagtgttcaattctccaagctttttccttcagccatgggcaatctgcgattatagaagcacatactgatgtgaagtttccacaagaccaaagcagccttcgctggtgatctgtcaacagagaacatgatgccctggagagtcaccaaatgcatagaacatttgatttgagcaaaaaatacacctctgttggttaagctgctgaaatttttgttactgtagcaaaacttcacatatcctggcctttgtaaacccttatgtgcaagaccaagaatacaagtccagggaggaagacattgaaataccccaaccaaagttacaggtagaaaaaaggcaatgactagaattgaggtctcctctctccctgctttgtgttcacccctctgcaatattctgtacgcttttgcttccagtggaaacagcacatagtgtcaggacaagctgttgggtgagtcatgaacacagttttgcacacaagttgaaaaaccataaattacccaacattttactttcttgcaaaaatcttccctactttacctgtcaagtcagagatggatgtagtggcaggaagtctcagtaaattgcaacattaagtatcatcacaaataatcatttttggcaaataatccaacatgcctgggacttgtataggctctggtgtacctgaaaatattactgtagcagggaaagtcgcatataaaggtatttttttcaaatcccaaattattcaccatattactgaaatatgaaactgaatcattaataaaattgtcaacattttgaaggggctatgaaatacccttactacctctggttttctgcctgctaacagagcaggcttccctgtttttcctctttctaggtctgcataaagctggcaagatccatctttcattccctcataactttgggatttacaggataagatgctgccatacacattctacagccatggcttccagcccctgcacttgatggtaagaagtagacttttaaaaaaaatgcattcctgaatacgttactatttttcctgatatataggttgccaaaaaagtttaaaagatttttccagtgggacaagtttaggaaactgtttgtagcctctgtagacttggaacttgagaattaccctgatttaattctaaagactttttaagttagtgacagcacgactaacatagttcaaagaaagttgatgaacatgattctctgtgactgaatcagagagagctacaaaggagttaaagagccatagttatgatccttcattgtcaagggaggctgaatatgactgggattccccaggcagataacgatgtccacatagccccatcacagtgctgcaagcacctctgccactctatatgtaggacaatttattgtacaaactggcacactttgaagagtggaatggggcaaggggtggggctggtctggtagttatgctgatacaccaaacacataccagggttgtcctgggcaaatcccaatgtggggttgctctatcacttgctacacactcatacatgtggttgcacacacaaatgcaggccagatcaaggcaggtaacacacacacacacacacacacacacacacacacacacacacacacacacactggctggttggcttctgtgaccaacaggggctgccccatctaaaccaggcattgttatttagtcggagatcattgttcccatgcatgaatctgactcatggttgccaaatcttcccagttttaaagagaagcaggaaatcaatattggtatatgtattcttcaattgccaaatgctggctggcaatcgtataattcaaatactcaaattaccacacagggcaagaaagtctctagcttgggaggtcacctgtttgggacccgtgtctcacagagtggcagagggaactgtggcactgtgagaggaacatgcccgtggagctgcttacatctcacctgtgcttttgcctcaagggagaaagcattggaagatttatgcacttccaaaattaatgaattcatctattgaaaaaatgataaccaaatatgcctacaagttaatctagctttgctttttctaaaatccacaatttcctttaaaaacaattttggatctttggactaggttggctggttttatccatcaaaccaatatgggtcttaatcttcatcccagatggaagtggggaggaatgatatctttgcctttcatcatggaggaaaatctcttctaaaagttatcttccctcttcattctcagaggctaccaagctgactttctctaggtgtcattagccaggaccagatcaggtgataccatcagccatagaggagcttggaggaatagagtgggctcgttattacaggcttacagcaaacacgaccccatagcagagtacactattgccccaaacaaaatcagagttcttggcaaggaaggaaagaggaattgctgttgagtaggtaggaaatcggtgtctgccagaactgtgcaattcatctttcatttaatgaacattttttgagcagcttttaaatgccagaacctgttcttgggagcagaaattccccattcagaccttatacctttgaggggggagaaatgagactgtttttaaaagtaagcctcacagtattttattattctattattattattttggagacagggtctcattatgttatccaggcctcatagtattttaaaagttgagaaatgctttgatgaaggcaaatgaagcagagaagggtagaaaatggtgggaagtgtgggaagagggtcacaatctgacactgggtagtgtgggaaggactccccaaggaaggggtatttgacccaagacctggaaggtacaaggggaaaagtcacgcatctatgcaggaggagagcactccagccaaaggaaaaggcaattgcaaaggccctgaggtggccatgggtccatgtggttgtggaagaagaagatcagtgttgatggaggggagggagagcccacagagcagcagtgaagtgacatcagggcaggatattgggggcccactgtgcattataagggccactgcaagggagatggggagccaaggaagggtactgagcaggggagtcacataatctgacttgtgttttaacaggatcgctcagactgctttgttgagaaagcactgtgagagctaagggtagaagccgagaaaccagtgttggtgctattgccatactccaggcaagagataatcaaccgcttagaccagagtagtagcattctttaacacattaaaaaaatatgtagaggctgggcatggtggctcatccttaatcccttaaccccagcactttgggaggtggaggtgggcagattatttaagctcaggagttcaagatcagcctgggaaacatgacaaaaccccatctctataaaaaatacaaaaattagctggccgtggtggctggtgcctatggtcccagctcctctggaggctgaggtaggaagatcacttgagcccaggaggtggaagttgcagtgagccaagattgcaccactgcactgcagcctgggacagagcaagaccctgtctcgagaaaaaaaaattttatatatatatatatatatatatgaagagagacagagagagagaaaatacaatataaagggagacagaaatgtcctctcccagtctatgtgctccttgctgctaatattgtgtagaagccagaaatggaaagagcgatggtccttttcatttacattttctcccgtcttctaccacccttaattctgtactattaaagttaattcttgagctgtaagacagtgatctatgaacatatatatttcttttccctctggcttgcagagctccttatccattgatactgcacgcaagcaagaggaaatgttaggaacaactcagtatgatatcttctttcaggataaagttaccaaattaaacaaatggtaaatgaccatgttttccttttggttttaataaccagtgcttaatccaagaaacctgcttgcttagatatttttgttcaatgatcatctgttatccctactgaaaggtgtagctgtggatgactaggtagactccggagggataaaatgaaggagggagcaggtggtgaatgtgaagagtggagaggagaggaggagaattggggagtaaaagatacacagatgtgagctccggtgatctgtagcaatgcacaaaagaacagagaaagagccagtgcttctccagccacatttgtagactccaccagccttgcagctgtgctttctcgtccggagaagtcttgattgacccagggttcagacaattctggtatcacctctggggagaaagactggaaagtcagagcttacttattcagaagctagatgcttgtgtaaagaaaattctactgcacgtaagcacaggttattgaaattctacaaactgtagtgagacataatgttacagcatcaaacacacacacatattacttagtgcatgctccctgcttgcttgcgttctctctctctttcacgtgggcacacacacacgcacaccaatacaccggccattccctcatcgttctgtgctggcattctggcatagaatcatccttcaattgactggagtgatcaccttaactccgttaaatcattacgtagtatatgtaattgttattaacctcatcgtaaaaggtgatgctatgattcatgttgcagacattattaactggaacaaataggcgacactatttggttcgttcttattttgcaaatgggcgaattgaggcccgcagccataagtgatttgacgaagaccacagactgattcggagacaggaggcaaaatgacacaggaatgattcacaagcctctgtcacaagggagttttctgcttgtaacttatcagggaggcaaattttctgaaatcattttttcaaatctcagatccatgacttttctgttgagcaatgctgctgcttcctctcagcctccgcccaccaccaccactaccatgtttagatgttgtatttcatttaaggatttttcagttttccttcctcgctgaaaaagtgatactgaaatacactacgaaaacttttgtcctccctccaaaacaaatatcttaccagtcacaactccaccattataacagaattatcttcattttttacatagtctttcttttttgccacagtgacttgtttttacatagctgaagtcataatgagtaggctagtttatattcagacaattttatttaccaattataaggcgttttccattctgtgcaatcatcatttcaagtatgtttctgattaatacttgttaattttggaatgtaatgtacatatatggaaactactgaagttattgaagttgtatgtacatacattgaaactactgaagaaaatcagcaataattcaaccaccctcggaataactgatggatttccccagccttcacatatatgcttcttattttaagaattgaaactaatgctgcatgaacaggtttctatttgctccctgcccccttcgtttaaaaacaaggtggagactaaaggctctcagcctcagtttctccatatgcaaaatatcaggattaaataagtcatgctaagggctggaacaaagtgagggctctgcagcgtgtacgccgggcactcagccgtggatggcaggggacggcgttggcgttctgtccccgggacggagcgcaggcctgtaattgtccctcccgcctaggccatcactttcaggcttgggtacgcgccgccgtctgctcccctggggccgccagggggcgctgtggccccggtgcgcggcagccgcgcgacacgggccctccctcggagtcttcggcaccgccctgtcccagcctcctttgcgggtaaacagacatggccggcgaaggagatcagcaggacgctgcgcacaacatgggcaaccacctgccgctcctgcctggtaaccgcccggagtagttccctgtagtcgggagtggggcgaggctcggagccgctagcggtgcagctgggcctggraggcgggcgtgggggcgccaagcctggcgagccagcccagcagggccgcaccggaaagctgcttcacgtcggccctcggccagcgatggagtcgcggcgctttcttcgctgctctgttgccccgagccgtgagccagggtgtcggggggagcatttgctattaagaayaggaaacccatcctctccatcctccttgtgttctgagtttagctcctaggaaatgctctgaaactagaggaccgggtcagattcacagcggttacttttgctggtctccttccttttaataagagtgacagctaacatgtactaagcacttaccatgttacgagccgtgcagttaacgctttgcatgcatgtcgccttttaatccttcccacatcagttttcagtttccgatttgataagcgagtattggatttgcagattagttcaatgacttgcccaaggtcacacagcagagtcaggattccaacccgggtgtgtctgtcattatatctctaaaccacttctctgttttgtttttcttactatcggtctttctcaggcatgtacgattatgcttaatcagagatacttagtttttctttttcstgtatgttgtgtgaaatgtttagactttggccttgtgttgaaatactgaacaaaaaaaaaaakgcatggaatattgcataaacttttcatggaatgcctttcaagagatgctttccaaaaggtgtatcatccaaacttgaaagtrttacttgagtcccttcgttatatgacaagtatgttaggtgttgtggagatgaaacgagaggtaatacacaatctgataattgaggtttactgtctaggcggggctgctgagaatataactaaacgtaaatcaactgcagaggcggttgatttagggccagataaatgaatgctgttgtggctcttcagaggcagaggttgtttaagggtcagaggatttgggaaaaagcctttcaggtagatcaggagacatctaaaagcacatatttaggatatggttgtgggacataaggcctaggaggtatattgggtctaagttgctgggaaactggcatctcttgccagtgggtttgggtttttcctgtggattgccaagaaacagttttaggtttcaggtaattgcctaaagaaatctatgcttggaagattaatttgtccactggtagcagcatggattaaaagaggaagagactgagtgcgtgcccaccatataggagagaacttttctgtaaaaataaaccatagtcactggttgttctcgaagccattctagctgagttgacacaagggtaagtgtgccagcctttgatggaaagctgagctattttttcagagacattagccctactctctgtgccaaatccggtgtttcagggagaatggtgaatagaagagggaggatactgatcttctgtcgacattcacatcgtgcctctgcatgagatgagtcatcagacttcactgatagctctgaacartcagcgtggttttttgtttgttttttttttgtttgttttgttttgttttttgtttttcagaaaagcrtcgggagagggcccagagatggtgtagatatagcaataatgcctctccaaattacgtaaattttatttgtagggaaacactgggctttccataattccatgtagtacgagttgttctgaagagtaaatcctctaagttccaacaaaaagctttatatttgagatgtgaagagtttatcctaggcaaatgaaacattaataaacataactgagtaggggaaagtggtttttagccatatttatgaaaaaaaggttactaaagaaattatttagagactaggagtcagaacagttaaaatgtaaatttttaacaatattaattccagcctttgagctaatagtttatcttttaaactttctgtagtagagcaataaagtgggttgtgctgcatgccaagtgatagccatactgtcagagttggaaatacaaacaatttgatgcagaatatttttgtcatccatttagatagctctttttttatctcagtgaaacttacatgttccaaggaaaatttgtatgaagtgttagaccattggctatttacatataagttgaagtaattctgtttttgacaaagttttatatctaggaagttgtaataataaatagaaagtccaaggcagttaccatattgaaaatcatttttattttctgtcaggggcctggctagaggtggtttgacttaaataatgatatgcaaaggaaaacaaatgattatttcgtaatgacattttatcgatttagaagtttatttggggcatttaaaaatacatgaactgggaggtgagaaatgagattcagtaattctttattgttagtctaggccagggtctcccaacctcagcactggacttttgggctggagaattctttgggtgggattgtctcgtgcattgtaggatatttagctgcatccctggcctctacccactagatgccagtaggactcccttagttattgcaaccaatatcccctgaggggcaaaatcacctgtggttgagagtcactggtctaggataggaaatttactcatagtttgtatgaaaaggacagactcacagttagtacaatagcatatgtattgtgtagcgttttctaattttctttgctgtcattggtaacatctggttttctaagacattcttttaaaatgttttatgcttcatgcaaactttatttttaaatttaaaattaagcaaaatagtatgcaaatgattgcaaaattttctttgtttctttcttttgagatggagtcttgctctgtcgcccaggctggagtgcaatagcacaatctcagctcactgcaacctccacctcctgggttcaagcgattctcctgcctcagcctccccagtagctgggatyacaggcacctacaaccacacccggctaacttttgtgtttttagtagagatggggttgcaacatgttggccaggctggtcttgaactcctgacctyaagtgatctgcctgcctcgtcctcccaaagtgctgggattacaggtgtgagccaccacacctggccttcattttaagataatgtagcgactgccagggaaatgttgtcactagaaaaatgctgtgaaattcttcctgctaggttatctttctctcagttttaattaacagatcttgcctgctttgtttcttttcttacttatgtaggaactgattgaagttgagagtttgagagaacgttagaggttgacttgttgaagcctatcattttgcagatgaggaaactaaaatttaattgggcagaatgagttgtctaaggtgttaaaattagttactggtgagggagaagagaaaaatctcccatatagaagaattttaaataacttacatttcctcttcaagggagtggagcataactcatcacccctgaagtggaggctacacctagtgatttgcttccgaagggtacaatgtgaaaaggaggggggaaaggaactttacagcggaaaaacctgacacacactgctktagccaggtgatcaaggttaacagcaggaatagttcataatatataggctggatatgtaataaaaacagcacattggcaacagaccccatttctaaaaaggaaaagaataacaacacttcacttctgtggtcttcctccctaaaacacgtatcctcagtctaatcatgggaattacatcaaacaaaacccagttgagggatactctacaaaaggcctgaccagtactcctcaaaactcagaaacaagcaaagtctgaaaacccccctagcccagaggagggtagggggacctgataactaaatgtaaagtgggatcctggaacgcaaaaagactagataaaaactaagggaatccatttaaaatatgaagcttagttagagtaatgtaccaagactgattccttcgttgtggcaaatgtaccatactaatataaattaactataggggaaaaggatgtgtgacacacgggagcattctgtactatctttacacttctctgtaaatgttaaactattctaaaattcacagttgacttaaaaaaaaaaaatagctactgacagagcccagcacggaccccagtcctctggctccctcttcacggtgctgtagagtttaccaaatgcatgtggttttagaagtacccctcttttgaagaaggaattacatgtttgaaaggttttcattcatctttttttttttcttacaatattctacttttatagcagagagtgaggaagaagatgaaatggaagttgaagaccaggatagtaaagaagccaaaaaaccaaacatcataaattttgacaccagtctgccgacatcacatacagtatgtaatttagtgacagatctaatataatagatatacatttaaatgtagataaaagttcataaaaacaagtgactgatatttgtattactagatatcagaaattgtggatgaggacatgggctatttgccagtagataaacatttaactgtaatttttaagaagcttaatactatgttgtggtagaattgtttgaggaattgttgctctttatactctttctrgtaattgagctattaaatacttctctgtacttctaggtactagagtgttattgaacatactaacattttatacttactgtttgtgatatgtgggcatagagatatttcttggtaaaaataatactttgtactaaaaaaattcttgartttctgtgtttgtgatatattcataaaagattagaaattcttctaagagttaaagttagattaaaaattatattttaacatgggatgcttatataccacgtttattaagtgtttgtaaccccatttgtatttttttctttttttttgagacagagtgttgctctgtcgcccaagctcgagtgagtgcagtggcacaatctcagctcactgcagcctccaccttccaggttcaagtgattcccctgcctcagcctcccgattagctgggattacaggtgtccaccaccacacctggctaatttttgtatttttagtagcaacagggttccaccatgttggccaggttggtcttgaactcctgacctcaggtgatccgcctacctcggcctcccaaagtgctggaattacaggtgtgagccactgtgcccggcctgtatttcttttaatgtgatttgctctttagtctgttgagcttacatttttattacatatcgatcatgacactatacctatatatgttyttatatagtacctaggtgctgatatggaagaatttcatggcaggactttgcaygatgacgacagctgtcaggtgattccagttcttccacaagtgatgatgatcctgattcccggacagacattacctcttcagctttttcaccctcaagaagtcagtatggtgcggaatttaattcagaaagatagaacctttgctgttcttgcatacaggtaaaatattagagtccatttgcttaatacattccctctcatgggtaattgcagtggtcagtgttgaagccaaagcaggctgttatttcgcatgtacaggagaggttgggtaagaatgtgaggttaggaatttggttaagtagaagtttgatagtgcaagttggagtatttttgttcatttcattaccatctaactcagctcttcaccttcatacacaatttaactttctggtatttgaaaaatttttaatcatttatatttgatgaaaaacatttctggaatcttagtttcaataactgtcttcattatagagaagtagtgcttttttattttaacgtaaaggattacttttccaaaagagtggtcttttctttccctctctctcaaaattcataggttgtaccactttaaattgaagctgaattttaagtatcccatggcaaataaaggaaatctgcggtagaggcaggaaatacatacaggaagctcccaccccagtacagtgctgccagtaagcagcagaaatgataagtcatttgacagagtgaaagaatgtttggtttgggaaatgagtttaaacccctgtaagttctaaattattttcagtgactagaaatctattattttcctaaagttctctaattgtacttcctgagtccttcttgtatatcccccatgtgatttaaaaataaataaaattggccgggcatggtagctcacgcctatactcccagcactttgggaggccgaggcgggtggatcacctgaggtcgggagtttgagaccagcctgaccaacatggtgaaaccccgtctctactaaaaatacaaaaattagccaggcgtggtggtatgtgcctgtaatcccagctactcaggcagctggggcaggagaatcacttgaacctgggaggcagaggctgcagcaagccgagctcatgccactgctctctagtctgggcaacgcagcgagactccatctcaaacaaataaataaataaataaaattatcctagctttgtagtaagggttgattctataaattgtttacctgtatttattgctttgcctactttgcatatatttaaaactcaaatgttcaaaattctttccttttaaaattttcttggaagcaatgtacaggaaagggaagcacagtttggaacaacagcagagatatatgcctatcgagaagaacaggattttggaattgagatagtgaaagtgaaagcaattggaagacaaaggttcaaagtccttgagctaagaacacagtcagatgggtaagaaataacatataccttaatgctctttgaatgtttcctaatgaaatagttttcttgtactttttctgttctactgagccttcatattttgtaacttttaactagttgttctctttcccttctaaggtatagcccagtggtttccaaccttgctatgcatcagaatcacctgggaagcttttaaaactatrgaagcttgagttccaacctcatctcccatctccagagagtgatgaggctgcagcatcttttaaaaatgattttcaggtgattctaatgtctctccaggtttgagaacaatcatgtaaatccaaagggaagtgttgtttgggatttggcttctttaggattgaaggcctctcggagcataagaggatagggagaccagaggcttgtgagctgttcgtgtgctcaccaggacagctgtggtttttgtagcattgctatgatgtttgaaagccacactggttacatctgcctactgctccagctgagctataaaagccatttatatttcgtgtccctctccagtgtgaattttatatcacccagaaatgctatttacataataaatgatcaataaatacttgtagtctatgtgccttgtgacatttagaaattccctgagtatactgtttcagcagtwattcattttgacaaagctgtcatggctgggttttgyacaaattcaagggatacacattaaaacagacacaaaaaagtccagtttattttatcctcttttaaaaaggaaacaaagcatttgcyttgatcaytggatattacctcttaacggagtgcttctaaactgtggcatcacccgtgaggtctcacagatacacagtcctggtacgcaatacaagtactagtgaattggtttccaatttatacccacagttgaaaatctcatcagacctctgtgttgcccaggtggtatcttctgaacacatgcaagttctgagtattttggggtttttttgggcggggtgggggattaagactgaaaaaacaatgtgagcagcatgagggcaggaacgttttgtctgttttgttcacatggtgggcgttcctatatatttttgaattatgaaaatattgacatgtcaggtagctccttggagctaaagagagcatagaggcatgtgagatgggattgccagagctcttagggtgtttagttctccccaggtacttytccagaacattcactgtgcaaactttgatagccttaccacattgcactgtcctgacaggattttatgtacgtctccctcaatagataagctgcttgagaacaatgaccaagacttatttatgttttacatttaggaccataaattttatataaatgaatgaaagaatgatctcctggggcgggtgggggtggtctgcattatgataattagcaaactgttttgttactgtggattttgctaacagttccatttttaaagtacttcttatcttcatacaattttgattatttgtgaatacttttatagaaatcattaaggaaaattgacttggggaaaagtatatttctcagactgtcttgacattagtgacttttgattgtggaaaaactattgaacacaagatggcagtataccgttaactctgaaaacaagacaaggaatggatttttgactctagtaaagattaacatcaggccgcgcacagtggctcatgcctgtaatcccagyattttgggaggccaaggcaggacgatcacctgagctcacgagtttgagatcagcctgaccaacatggagaaaccccatctctactaaaaatacaaagttagccgggcatggtggcgcatgactgtaatcccagctactagggaggctgaggcaggagaatcgcttgaacccgggaggcagaggttgtggtgagccaagatggcaccactgcactccagcctgggcaacaagaggaaaactccatctcaaaggaaaaaaaagattaacatcaaactgatacaggtggacaagacttggaaagggcacattctctctagtattctgtagacccattattaaggcctctcataagggtatgtctgtcttcatttaaaaggcctctgtggaatgagatttctcttggctccactacttctctggccctgtaaccaccttcactggaaatggtgaaatgaaagaaattctggagttgatttagttcagtctcgtctttttctgtatcagaatgccaggtactagagaggttaagtaatttgcttaaacagcaaataagcgacagacctgattggttctaggtcccatgacttccaaactggtactccttccattataccagaatttctctataacacatttgaaactcaagccagcttccctttctccagtaaaatatttaatattcatttgtttttcttagagaaataagcatatagaaaaataaaaattaaaaaatataaatatccatcttttacctaaatgacacttcatttattaaaagtacactacagaggccaggtgtggtgactcatacctgtaatttcagccctctggaaggccaaggtatgtgaatcatttaaggccagcagttcaagaccagcttggccaacatggtgaagctgcatcactactaaaaatacaagaaattagctgggcatggtggcctgtgcctgtaattccagctgttcgggaggctgaggcatgagaaccacttgaacctgggaggcagaggttgcactgagcagagattataccgctgcactccagcttcgccaacagtgagactccatctcaaaaaagaaaaaaagtatacaacccccaaagtcatgagtgtgtgtgggttggggagggcggagsgggggtgggcatcttctgaacacatagaaattttttttttaataaaaacaggtctcactgacatasgactcttcagaagttcctacttcttagcatgtagagaggrggaggggattgatatcctattggcatcacaagagaagatctcwtacctgtctagactgagaccaataattgttagtcaaaaagttagctgaagctggaaatcacaaaatgttacacatatatagcttaaacattttattttaactttataaattcattcatttttcatctggagagaccaaggtctttccattgaagcagttctgcagattggagatgactgtagactttctggcactttcattgtacattatccacagtttatactgctagtttttctttaaagagggattctaaagatagtcacaaggcaatttgagtgcagaatttttccagatttgtgcggtttttttcctactattagagtagtctgtacctaatttgaaagcagtttatgtctcaacttaatgttccttgaagcagttttattgttgaagtcatatttcactggtttttataacatttatataaattatgttgctgtaatcacaaaacaactgtgataaacaagttggaaagaaaaaaaactagcttatgttaaaaacaaaactcagctgctgggagaagaaccagccactgcatatgcagtggaccctggccatgtttaaccaggtaaaggagagcattccttaatccttcaaggcaattcagacagtttgtactgcagactaattaacrtgatctgtaagccaggggatcaataatgttactgtttttatcataatcaaatcttatacaatagttgggtaaagcatagttcttaattcagttacctataaccttgaagaatcagatttctaaaaatttctataggatggtatatacttttaccttcataatgtaattaacaagttatttgtgttcatgaatcaggtgaagaaaattgagattttgtttctaatgagctctaataataatataagaacacttgaccataatttgactatagtaaaattttttaacattttccgaagtcatgtagacaaattttctgagtatttctaatgagtttgcaggaaggaaataaagttagtagagtgagtctactattatcattaaattaaacttagatactttctaacacactcagttatttttccttctaataaataagtaaaatgtcagaatttcatccataatatcttgtggtcaaacagtggttattatgaaagactactttagmagtcttaagtataactaataaagcagagacttttaatatatttgactttgtcagtctgacagtgttatatactagcatttgaatatagttacatattctacatttcagaagctacactctaagagatagaatgcctcacaggaagatagctcatagatacaaccttcctgtttgcactagttcatgataagatgtttgcaattatgatattctcaagtagcattttggaaatgactttattatgacattttaaataacttttaagaaaaaatctaatttatagtttgatcctttgtacagttamactcttaagaacgtgaaaaggaatgcacacagaaaggttgcatgtaactctctagtgttattttaattcatccatgtaaatgcattcttgatttttctcttcctttctctacttagattagatgacttatgagaaaggatagatgtaagagttaagcagcataagaagtggggggatagaagaatttgggtgtcttaagaatgtttaagaaagtagaagtatcaagcagtagttggttgtatgttggtttttttaaaactttgtttcatttatagactctgtatttatctgaaatgtgtagatctccctttccattccacagtgacattgaagatccgtaccttaggttatctttggttttaactttggtatgattwatgaaataaaattattttctgaaagtttctgtatcttaacatcagtatttgatgaatatgtttaaaagataaaacttggaaaatcttggtatttaaaattatcactgtttagaaacttatagttttgagttagtcaatcttagaaatgaataccatgcttggttctctttattttagaatccagcaagctaaagtgcaaattcttcccgaatgtgtgttgccttcaaccatgtctgcagttcaattagaatccctcaataagtgccagatatttccttcaaaacctgtctcaagagaagaccaatgttcatataaatggtggcagaaataccagaaggtgagaaactaattttttatgcatcttcaaaaaatgaagacaggttgttttttttcctgttttaagaaagaaacacaactttcatgattcattacccagccaccttgtatggcaatattccagctacatttgatcctctaaaaattgcacaggcagctactttatgtaaaagcagtttacaaaagcaataaaatgtcacacagctgtaaggtatccttgttattatgcttatcagctatattaatcgcttttgatttttaattccatgggaaatgcttattaaactatgatcaaattagatgttcggctcttgagttataaacatccattatcttaaagaagggaggattcttttggggtagagtagtagtagagaagtagagtctgttttccttcttccaaaccagagagaaaggtttcttttgctatgtgttttaatgaaatacagttgacatcgcagaaattgacttgagactaggtgctctttaaaaatgttgcttgtttgggcactaattcctatgttatatcctttgactaaatcataattgtcataggraaaaaaaattgagggagcctgtttctactcgtttgtgagatgtgcaattttaagtatagttaatatttataattgctacctaaagaaaaagattactagtttctaaatttagaataattgggctttttgagtttttttttttaatatggaaagacagtttccactgtaaccttaaaaattctctattaatcattcctttgttgagtggtgaggatttaatattttaatgtaaatacagaatcctaatttaatgtaaattattatggataattaatgaagtggacttatatactagtcactgtaccgaatttttattgttcttgcagtagaattcctccagttttcagygaaaacttgtgcagaatgggcacttgatgggcatcagggttataaccaggtatctataagacttcctggtctttatctcagttaactgatctgtttcatggtacagtgtgttttgactagtgtttctaaggaagattctaataaggaagatataattagactgctttaagactcccaaacaaccttgaaactagtattttttaacgtttagtaatattgatactgcctttagttaacaggcagcttttgtgtagctgtattagtccattttcacgctgccgataaagacataaccaagactgagcaatttacaaaaaaagaggtttattggacttaaagttccacatggctggggaggcctcacaatcatggcagaaggttgaaagtcaaggaagagcaagtcacgtcttacatagatggcagcagggaaaaagaacttgtacaggaaaactcccatttttaaaaccatcagatctcatgagactcattcactatcacaagaacagcacaggaaagacctgcccccataattcagtcacctcccactgagttcctcccatgacatgtgggaattgtgggagttacaattcaagatgagatttgagtggggacacagccagatcatatcaccgtgcaatactttcttccccataccagatrcagacactttaaatacatgtttacccttgtttcttttaactgaactgtgagaaattttgctcccatagtcattttaaatgttactgttgaaataagtatgtcagtgatcactgtcagtatgtggcccccaaggagtagatttggaatatattaagtcatttagtgcctaaaagtatgtttggcactggtttgctactgaaatacgtggcaaggtaactgcatcaagttgttccctatgtgtcatctgaatattcacgtagtgatgtatttcatactagagattttttttcagggggtacaggcataccacggagatattgcaggttcagtttcaaactgctgcaataaaacaagtatcacaataaagttagtctcatgagttttttggtttcccactgcatataaaagttttattcacacaatactgtagtctatcatgtgtacaataagattctatctaaaaaacagtgtacataccttaaataaaaaaatactttattgctaaaaaatacaagcatctgagccttcagtgaatcataatcttttttgctggtggatagtcttgttttgctgttgatggctgctgactaatcagggtagtggttgctgaaggttggggtgactacagcaatttcttaagacagcaaygaagtttgccccacagattgactcttcctttcacaaaagatccctctttagcatgcggcgctgtttgatagcatttaagccacaacagaactttcaaaattggagtcagtcctgtcagaacttgctgctgctttatcaactaagtttatgtaatattctgaattctttgtgtcatttcaacattcacaacatcttcagcagtagatttcttctcaagaaaccactttatttgctcatccataagaagcaactcctaatccatgtttgatcatgagatcacagcaattcagtcctatctgtgggttccacttctaactttagttctctttttgtttctgtcacatctgcagttacttaactgaaggcttgaaaccctcaaaatcgtcatccatgagggttggagtaaacttcttctaaattcctgttaaggttgatattttcaccacctcccatgaatcatgattattcttaatggcacctagaatggtgactctttttcagaaggttttcaatttactttttccagatccatcagaggaatcactatctgtggcagctatagcctatgaaaaatgtatttcttaaataataagatttgaaagtttaaattactccttgatccatgggtcacagaatggaaattttgttaccaagcatgaaaacagcattaatctccttgtatgtctcccatcaaaacttctgggtgaccatgtacattgtcaatgagcagtaataattataaagagtcttttctgagcagtaggtctcaacagcaggcttaaaatattcagtaaaccattatctaaacagatgttctgtcatccrgactttgttccatttactacagagcacaggcagagtagatttagcattcttaaagggccctaggatttttggaatggccagtgagcattggctttaacttaaagtcaccagctattagcccctgaaaggagacttagggactttctctggattaggctttggctcaacggaaatttgtggctggtttratcttctgtccagaccattaaaactttctccatatcagtaataagactttttggctttcaccagagtagcatttcatattcacagctttgctgtttgccccaggaggcctagcgtttggcctctttcagctttgacatgtgtttctaactaagctttatcatttttagcttttgatttaaagtgagagatgcttgactactcttcttttcacttgagcacttagaagccattgtaaagttattaattagcctagtttcaatattgttgtgtctcaaagaaatagggaagcctgaggagagggagagagatggaggggctcgtcagtggagcaatcaaaacacatttgttaagtttactgtcttaaatgggtgcagtttgtggtgccccaaaacagttacagtaataacatcaaagttcactaatcacaaatcatcataacagatataacaatgaaaaagtgtgaaatattgtgagaattaccaaaatatggcacaggcaggtagttagcacatgctgttggaaaaatggcttgatagacttgcttgaaacagggttgccagaaatcttyaattttttttttgtttgtttgtttttaaaggcagtatctgtgaatcacagtatgcctgtattaagtatttgggtatatagaatagttcttcsgcaccaagatggcttaaaaattcttaaccattaaaaatcctaaattaacgcttctttgcaaagttctaagtatagagtgagagcagtggtagttaattcctgactcaagtgctctgtacagctagttctgtgacctgcctgtaggatcctgcagtcttaaacctgaacttgggctaagcaagtaagactgctttttaaatttattttttatgtgagttactacttaaattcttcctgttctatggttaaagcatcttgtttacattacattccgaatttggcccatgcamctgggttgccactggcttaataagacaagaaaagatagagctgggaagaccaaagaagcacatatttgcctgggttcagatcctctgaatttttcctcttgtcttaattagcccttggttattttcatattcagagttgccaagggctaaagagacgatgctaaggaatgagaaggcctaaaaggttttaggtgatacaaataactccatcccatatacgtcaggttatctacagggttcccttgcttaaacrttgatagagtttcttaggttctgaaatttggaatctagatcactaggccaagagaaaccgctagctgatctattttggactccargtgacctacaaactctgttctgctttagagagaccacttagagccattctgtgtgcatcaaaaaggaatcyaacagggaaaggggatggcagatatctttggtrggaactccgtatgcagtgggaccatctgagtggtttggcatgctgcacctttagtgggacgctagcttaccatgagggctggattatgtaacagtgtttgtctttagacagatacaaggttcagttcattcctgtcttcatagagcttgcttgtatctgatttgtccatcccaccataatctgaagtactgcatatgtgtcttctgtctctgtgtctgagtagtagttaaaatggtcagagttgggagatgcttacataactaagctaactcaagctaataaggttgccgcgcacttttcctgcagaaaaggaacttaaagtatcgaggattgtagtcttcctgagatatattcaattaactttgaaactgcacacagcatttgccgtggaaacctaaacawctcaaatgacatgaaataaaattatttaagcttctggaagtgttctgtgttatctaccattctgacaaggaagcattagagaagattcagcacgtgtctctcatgattaaggagttaggccagtgtaattaggaaacactttcaaaacccactccatctagagacatttcttgttctggaatttgagctctgaaactgtttacttcttytcccatcacagtgcctttctctattcactggtttactgtagggggatttgagaatccccctacagtaaaaatcctcctcaaaaaaaaagaggaaattttgtttaaacctgtttggagtatgacttaaatgtttctaagtatattccctgcttgcccagaccatctgcttattcatatatcaaggcttactatgttaatcagaaaagagttgagtatgaaatgtaaagataagtcaaatgggaaacagatactaagaaagtaatgagtctcatctttctggcctctgttgaacttagccatggttgttcctgtttattgcgtagagcagggaggaactgagcatgaatttggaagggcaggggtctcatacgtaatctcccagattagtgtttaaatctcctcctaattttatctagatacaaatgttcttatttctttcttatacagaaggatacgtacctttttcttaacggtgtatcttataggagattcttttgtattagtttatagagcattgctcattcttaaagctgcttggaattcttttgtatggatacactgtataaccagtcccatactgatgatagatctgtactaaataacatgtacaaatgaccttttatataggtaaatatttatgataacttttaaagagtgaggttattggctyacagggtaaatgcatttataattctgtcagttttaaaaataattttgaggccaggcacagtggctcacgcctgtaatcccagcactttgggaggctgaggcgggtggatcacaaggtgaggagttcaagaccagcctggccaaaatggtgaaaccccgtctctactaaatatacaaaaattagccgggcatggtggcgggtgcctgtaatcccagctacttgggacgctgaggcaggagaatcactggaacccgggaggcgagttattttcaaaatacttaaggtgtttgtacttatttttattgtttcatcatggcctgacaggcaatgtagtatcaaacctgatgtttgctgatctgataagtgaaatatattacattgaaggttcaatttgaatttctctgagagcaagggtaagcattttgttgtaagagcagtttgtgtttcctttctgtaaagtgtttgcccatttttctacggcttgttgatttcttgggagttccttgtaagctttatagtctctgtaattaatgagttccaaacatttttcctagtttgtcttttgtcttttgtttttggtgtggtgtgtcaaacagaactgtttttttgttgttgttcttacatagtttaatttttaatgcttctgtattctaaatcatagccaaaaatgacgttcccatgcaaaggaatgtctcatgttttctttggatacttgctgtggtttcattacttttccgtggaaagctctgatccttgtgcagttgatcctgatataaattccactttacttttttccagatggctccctattgtcctactaccactttttgaatagtccatattttctcccattgatttgagatgccaccattgtcacagaccaaattcatatgtttattttacttttcttctcttttggtctgcttgtgtgccatcatcatattgttgttaatgttggcactttatactttgtgtaaataaaaatagggctggwaagcccctcactgcttttttgtcaagcttttcagtgactaccattgattaacatttccttgtgaacttgagaatctgtttcaccttgttccaggataataatcgtaagaacagtaacatttattgactatttytatataaagaagraaagtcttgaaatcttaggctatgtatagtcaggtgcttcctcagaaagactggtcatttcccaggcatacatcttgtatgtacacttgtgtatctgccattagcgtataagcctcaggagtaggaaagagcttatcattccatcccagttcttattaccatgtaggaatttggttcatgaaagaaggaaacaaaaactggtaactttttaattatttatataaattatttctgtcatttacattgctgattgtaataggatttaacacaataagtgaccacttttagtcactatataaaggaagtcagtggtagtgatttactatttatgtttagcttttcacattactctttccattttcattgcacttcaaagactcacttaaatggagtttcacatgttttgaacattctacgttgttgggaggcaaagccgaagccatagttatgaggcttaagaatggaggactgtgatagattacctccaggtaacagattsgttttaagggcttttatgcctgctttcagtagtaaatcctgttcccagagtgaatactactctgctggagaatccgtcattggtcacttttaagtgcctaaactttttggctagtattaaaattttcttgaggtataamcattttatgacatcaatcatggtgttgatatatttaaagaatgcctataaattgctagaacttatcatccattttacccagatataagacaggagcctttcctattgtgccagaaagctaaatgggactcttaaatttgaggatgttgaaatgtcttaaactttggcagttgctctgtaaaagctagctagctaatctgttctggtatrtgtctcttcagtgtgtctaattgactaacacacatcacaaatattaaggatgtattatgcatatttgaatctgtcaggatgctccagataaagaattttagaggtcttctgactctgaaaagaagctacctgaaactgtagcttgctcatgggcatggtggcagagtgaatgcctgatccagtgcattgctcttaatatgctagtgtgccacattttattctctttatacttgaaatttacatattatttcagattctttttcttgacatgggtgccaaatgaaattacacttttgtactacacttttttacatttcttttgtattacaaaagtgaccattctgatatgtgaagtatattttaataactgaatgaggagtgtgtcagcgaaactaaaactttcagttgggtctttgtcattttgtaattctaagaatatatagcttcttctctctaaaatataagctcsacagggtattgaattttgttggtttttctttcattcactggcatagcctaaatgtataaaaatagcctgacacatgttaggcactgtattagtctggtctcacgctgctaagacgtacccaagactgggtaatttataaagaaaagagttttatttgactcacagttcagcatggctagggaagccttaggaaacttaccatcatggcagaaggggaagcaaacatgttcttcttcacatgatggcaggaagaagtgccaagcaaaagggtmaaaaccgtcttaataaaaccatcagatctcgtgagaactcactatcatgagaaaaccatggcagtaactgtccccatgattcagttacctcccaccagatccctcccacgacacatggggattatgggaactacaattcaagatgagatttgggtggggacacggccaaaccctatcaggcactcacaatatttgttgaatgaatgatggttagagtcagactccctgtatacagatcctagctccttcctatttactgactctgtgaccttgagcaagttataccatccttgtgtgcctctgtttccttactttagaatggagataataaactactaaccttagagtattcttacaagaaatgtgaaattcttggcacaatactaatggttgccattgctgttcctgaagattcagagctacttgatgtgctcttggtagtattttcttaaattctgtaactggactgtgacaataatcttaccattaggtatttagtcttaaaagtgagggacaacttattggagagtacctgaagggtctcatggtctgactcctcaggctttaaccactaccagagcacacagtaggaggccatctcagatcacctttggcaggggtccccaaatcctggcccacgaaccagcactggtctgtggcctgttaggaaccgggacgcacagccggtggtgagtggtgaacgagcaagtgaagctgagcgccacctcttatcagatcagtggcagcatagattcttataggagcgcaaaccctattgtgaactgcgcatgggagggatctagactgcgtgctccttatgagaatctaatgataaatgtaatgcacttgaatcattccaaaaccatcctccaccccatctttggaaaaactgttttccaygagactggtccctggtgtcgaaaaggttggggacggctgatctttgcatagtctcaaatataaggattatattaagccagaaatgtttctcattaaggaatcctttgttttgagctgtaggtcgtgttttagaacaagtctgtcctcttccatatkgcaactcctaaaatatttgaaaaccagtgtgtccacttgagagacagctctaaactgaacatctctggtaacaagacattccctttgataataaaagttcccatatttgaacagcakggaatagaataacattgtctcatagattctagtcttctgttaaaaccgcagttacttttgcaccaaactaacatagctagaataggattggagtggcggggaagtcgagggtgtgagtggtgtagcacattgtacagttgcgtagtacaattccagctgtcagctcagtcccgagtcccttttatgtgtgctgtgttcccacgtttcctgcagatcttactccggcacttgcaagatcawatgactaggtatgaaacatacctagggtaagtatcattcagcgtatgaaacatacctagtcatttgatattgcaggtgcaggagtagggtcttcctcttgttttgttmaatgttaccttgtttttcttgttctggtctgttaaaagtgccttttgatctaccttattccttttctctctcactttcatgtgtcatgtcacatgtcaattaacattttatttacagtgaaattacaaagatttgtacgtatgtaggttttgttttgagaaaaatgtgataattctttatattctgctataccttgttctttgatcacttgcagagcattccttgatataaacatattctaatgtatttcactctatttttgattgatgtttaggttgtttgcaatttgttgctattagcactgctgcagtgcatcccttcagtaatatttttgtgtcctatagaccatttgcttctctttcaaaaattttgtggttacttttgcagttatgtttccaaacgaactttaaattatacttataaattccattctcactggtattgcactgaatatgtaatttgaggactgacatcttaacagtattgagtctccccctcaaatactgaaattctacaatttctacaattcacatttctccccctcaaatactgaaattctacaatttctacaattcacaattcaactgaaatttctacaattcacatttttatatggacttaggcatgctcctgtttggatttcagttacaattagargtgataaataatcggtttcccctctccttgagttttatgaaatgaggaacttcatcatgaagtctcaagtaaacgaacattttatctttcttgggattctatcacttcttaatgtttgcccttatagtgattmagctgattctcatttaaagtttttacacaaaaacagtttggattatatcttgaggttttcacttcagatactggacaagtaattagtataaaggcaactaacatggtcataatagaagtatggtgtttactctcaacatttatcttcccaaagttgtcttcagcattgaaattttaatgtttgacctttttaaataggaatgaagattctagttacaatatatatttgaaggatataggaagcatgatttcacacttcatagatagtcacgtcatgggattatctacaaaattttttatctttttaaaattagatgttttcctaggccaaaatcatttttcagatgttgctcattccagcattagaatctttattctgtggggttttttaagtgcctttttgttttgttttcagagaaagtttcattgtgcaaatctaacttcatggcctcgctggctgtattccttatatgatgctgtaagtaacttaccttaaatttactttatatrtggtaggccatgtcataattaagggtcattaaaaaacaaaggtttagtttttccagtttctagtgccttataacttaagatatcgttaagagtggtggctcacacctgtaatcccagcactttgggaggccaaggcagggggattgcttgaagccaggcattcaagaccagcctgggcaacatggtgaaaccccatctctacaaatacaaaaattagccaggtttggtggcatgtggctgtagtcccagctgcttgagaggctgaggtggaaggattgattgagcctgggaggtcaaggctgccgtgagctgagattgtgtcactgtactccagcctggacaacagagcaagactgtctcaaaagggaaaaaaaaaggtatcacaagactctttagagttttattaagcatgtgaaattttgttgggttgggtgatagttacatttagaacattaaagcatccatattttactgttttggtttttctctaaacaagtatattaacttacgtctcttgatcattagtctattaattaatgcatccaggagggtttttgctccttaaagtttaacactaggcattgccacattttgcaaaactaagggacagtgctgaaatggtttaaagaatctggatttcagatcagagactgacttcagagtctgatttctgtcacttactctgtgggcctggagcaaattacttctccaaggacctatgaaatggatataatggtagctattgyacctggtgtgcatagcgggcattcaataaatgctagccatttcccttaatgaatcactgcccacaaatctggagtcctgggaaaactcamcaacatgcacgacactaaaggaaactgcagttgatctccgctctttagcagcttttcagcaattacaaagacacaatatatgagtttttgcatgttttgcatatgcttgtgaaaattatgtagtaaataggtgccaagtaaggtatgtagatagcaagtgctagtgcaatttataggtgccataatccctatggactgrgtcagaaatggcctaatagaaggcagaagagaggccagttccaagcaggggcatagaacagaacaatctgcaagggagttgggagcatataccgctgggttaagacagtgagtgagaaaaggctggaaggcagacagtgctgggcaaaggagctggagcttgatcattgctgcatacgaaaatggaggcatttaaactgggactgagatgggactgagtgattaaattgctaccagtgttagttttaagagttgaaaagcttaatagtaaattttaataagcccatgaacttgattatggctacctttattttaaacaaggagaccttaatggacagaatcaagaaacagctacgtgaatgggatgaaaatctaaaagatgattctcttccttcaaatccaataggtatgaaaagttagtttcctgcctggagcctgggatgtcttgctataaaaaatagctttttcatggatgcgatccaatcatatcttctaggttttaagactgattaaaacattttaattctgaaaagcataatttcctttgagcagttgaaaaaaaatgagtattttaaaattaattgcaataaaatcctcatattctgtgagcactccaattttagacaagttttccataaaaagttcaaattgcaggaagtggctgtcatccaaaaacacttcctgtgtaaggactcctttccctgttcttcaaggtgcctttaaaagaagtgagtctagttccaggacttgccttaattatagatactctctttatctgtttataaggtatagtttagttatttttctagtctcttggcaaataacttctaacatggatttgagttcatgtttaacataaaaggattttaccaaaaaaagtataagaaaagcaattaaatttagagcttctgaaaagtgtatctttgacagctggtatatttttgtattgtttatacttgtataaaatgtgtaaccttaaagagaagsgtttatttcaaaaggatattatccgatttgtaagttctctgatgcttatctgactcctaagtttaaaacttgaaaaaccatgtcttgaagatttttcttacagagtagctgcttgtcttcctattgatgatgtattgagaattcagctccttaaaattggcagtgctatccagcgacttcgctgtgaattagacattatgaataaagtgagtaaagtgaatatgtttttgatgcccatgttttattcaggctggagaactaggatgctctgttggggccaatggagctctgtatagagtccagtaatgtagtcatgcaattcagatttcaattgggatcttacaaacaaactcattgttttgtgtttgtcaaatatgaatacatttatcaacttagtgaaaaataacttgatttctgcatggaaatatccaaggttatatatcactattcctttactctagagaaggtcatttagttttatgtaaatatgtggcagatctcagtttcagtgactttcgtgctccatctttaaaagtgtttttgaatgcttggaaggaaaatgtgatattcagagagagcaatatctttataagtaagtttcttgatgatctatgtgattacatgataaagtgaatgccagtttttcctaccaataatttttctctcaaatcttttagtgtacttccctttgctgtaaacaatgtcaagaaacagaaataacaaccaaaaatgaaatattcaggtaaggtctttattacgtttttaatatacttgccttatcagaattataatgaagactgtatttctgttttccataaactttcctccagtaccttaaagttacaaacatttagcaaatgaaatatagggaattagctcacttttgctaagaccatcttccagattgggtactcagagcaacaatgcrtgtcagggattattcacaggtaatgagcatggtaaagtaaaacaactgagaaattcttttccccctaattcttgttgacaatctatatattagactgtcttcaattaggccctaacatagatgcttcagaaattacatttcagtcatcagttttgccatatagggccaaagtaggacatgcttctgaacacatactgatgctctgatataacagtgtttgaaaatcattttatgacaaatccatcagttgtaaatcaagaaggtaaggaaactgctttctgcaaaataatcaactgccccaaaatgaccacacaggaccttgtcattgcacttayactctcagactcctttagaagcatttgagttttatattctttacaatgtctgtcttgaggagggttttaaaaacaagtactatttcctttgggtcatcacagaaaacatttagacatttagacaaaacaggcctgtctgccagctgtacccccaccccattttcatactaagatcctggtattatataaaactgaaggattaaaaactgtatagctcatacctcatttcttggtgaacttcaataaaattctaagcatttartaaaattagacttctcgttttgacgtgttctccatgttgattctttgttttagtttatccttatgtgggccgatggcagcttatgtgaatcctcatggatatgtgcatgagacacttactgtgtataaggcttgcaacttgaatctgataggccggccttctacagaacacagctggtttcctgggtaatattatggtggtggttgcttttttttttctttttttaccttaattgggcagaaaaatccagagtcctaagcagagttgccacaatctttataataaaaagtagacagacaaatgagtaatttgctacaaaaattagccgggtatgggggcaggggtctgtactcccagctgctcgggakgctgaggcacaagaatctcttgaacctggaaggcaagagtgttgcagtgagccragattgtgccactgcagtccagcctgggtgacagagtgagaatctgtctattwwwaaaaaaaaaaaaatttatttawatgtccttcattccacaaatagctagaaacatctgttgcactttttgtatcttttatcattgaatgaaaggaagaaaaggttgacaactgcagttgtcctcagattactgtatccagttaaatccaaaattgtttttttctgtcagtcaygtaattctgaaaatcagctgtcttatgacmcagtagaactttatatctggaccatattctgtagtaatgtaaaacyggaraatgtttacaaagcaatgatagactaagaaggtgcagaacccattgaatcctgcttttcttctagtttgccttttgtttgtttgtttgtttgcttcagcttaatgattctctatgatcctgggaacctgttcagttccctcagctgtactatcttcagttttcaaagagggatgctaagaagggattacatgctactctggggttaggactatgtmtcttggattgccctatcttacttggcaccctatgtgaggactaaaactagaatacatttgttactataaataaatgtggcatggtatacctagggaaaaaaataaggaaacagttgcaattacatggtttatcttaagaacaaaataccatggtttgtatttctggttgcattatctgacaatcgttcttattttagaatagtagtttttaaatatttaytttttgagacgtgtccttcctggcccatccagtttaactcagacagaagtgcattatttctgcaggtaattgctgttttctaacttgactgcaatacaacaaaggaaaagccagtacaagttagaatgtggtgccagtacaagttagaatgtggtcttggcaaccagcaatttctataaagaaattcwtaagattactctttatttctatgcagtagaagaaaaatgtaaacatggcttaagagcatamaagtcatacatattacaaaattaraaaatgtttttagaaatgtttttaggtttcagggaactgtatggatcaaatctcaacttagaatctctaatccttagaatttgcctctaaagtctgtcttcatgataggtttatatgataggcttggagtacagaaatgtttccttagctgatatctttccttaatttcttaggtatgcctggactgttgcccagtgtaagatctgtgcaagccatattggatggaagtttacggccaccaaaaaagacatgtcacctcaaaaattttggggcttaacgcgatctgctctgttgcccacgatcccagacactgaagatgaaataagtccagacaaagtaatactttgcttgtaaacagatgtgatagagataaagttatctaacaaattggttatattctaagatctgctttggaaattattgcctctgatacatacctaagtaaacataacattaatacctaagtaaacataacattacttggagggttgcagtttctaagtgaaactgtatttgaaacttttaagtatactttaggaaacaagcatgaacggcagtctagaataccagaaacatctacttgggtagcttggtgccattatcctgtggaatctgatatgtctggtagcatgtcattgatgggacatgaagacatctttggaaatgatgagattatttcctgtgttaaaaaaaaaaaaaatcttaaattcctacaatgtgaaactgaaactaataatttgatcctgatgtatgggacagcgtatctgtaccagtgctctaaataacaaaagctagggtgacaagtacatgttccttttggraagaagcaaggcaatgtatattaattattctaaaagggctttgttcctttccattttctttaacttctctgagatactgatttgtaaattttgaaaattagttaaaatatgcagttttttgagcccacgaatagttgtcatttcctttatgtgcctgttagtaaaaagtagtattgtgtatttgctcagtatctgaactataagcccatttatactgttccatacaaaagctatttttcaaaaattaayttgaaccaaaactactactmtagggaaaagatgccaaaacatgtcccctcacccagrctaaacttgatactgtattattttgttcaatgtaaattgaagaaaatctgtaagtaagtaaaccttaagtgtgaaactaaacatgttctttgttcaaataatgtaaaatatctactcataattttaaagttctaaaaaggctgctttgccacctacctctttgcttatattcaagggtttagtgggtccttccttccacatttgtatgataactttcgttttattggtagtcctttgctactttaaaactaatcaggttaaatgtttactcaaatgtagtaatagtatgaggccaaaatacatgccttgaaggtggagtgaaatcagttgagtgtcacactgcatatttrtgtaaatagagtaaatgaaaattcaagaatacttccawtcaggatatgcccctgccttattttttctaaggtctacttttactactttaataattttgggtttgtgtgacttcactggtctggtttgttcctatagttcttacactgcactaaaacttacttactccaggaagttcctgtcagtagcatagtacctctctgtaggctgaactctaaaccagttgcaatgagttaccttttccctctgaaaagttaaaatttcagtatgtcccataccgtttactagcaaataaaattttctgatctgtaaaaacacacatatactatactactactgaaaatggttttacacatgacaaaaccagacctgatagctaaatctgcatactttctatacagaaatagtatgtattatatgacgttgggtctaaatctgtattttggcagtacttaaatattttaagtaagtatttcaaagtattattttataatgcatctaattactgacctgtatgcagtcatttctgaggctttcttgcatcatagcccctgtgacatttcctcttagaaatattacactctacaaaattgttttatcaaggtccaaaattactatttgctcatagagtacaaagatgttatgactggctacacagaaaggaaataaattatgaaatgtcagtatagcagctgaaattatagcagctgaaataaacagtttgtattatacattttatttacctgatgaaagcatttaggactcaaatctttagagaataaatctttagagaatatataataatagccatatccttttaattaataaaataacactttaaagacaggcatattaccattgtatatgacacctaatacacattgtcagataccacataaacatatttatcttccaataccaatgtttgttttattaaaacaataattaattaattaataggctcaatagtgaccctcaagttaatcccatgactttcccaggctctgcatgcataaagaaatcattgtgacagaaaaatatcaaccacatactgaagcatagcttgctagaacaaatcctgtacatatgaatgccagcaactggggacacatttagtattcacattttatgcaaacttacttggtcaattatttcttttttaagcacaggtttattttggaattcagataagaactgacacatcatagacagtcattgttaaggtaaccctgttatttcaattgcaaacaaacaataaacgttttttcttcaagacagttaccactttttaagatcttagtactaccctatgcaaaaacagttttttttaaaagcctgaacaggttaagatagataatagccaactatgttttctcaggtgaaactattccaaaagaactgtacatttcagtgatataaatcagatccagaaaggtggatctctgtttagttcttgaaatatataattcacaaaataagacccttgttgttctacagaggtcccctaaactgtcttttattctggtgtagtctctaaaacctcattaagagggaggggagaaaatttagtcttaccagaaatgctctgctttttagtagccatcagttttaggtcttctttatgtaactcagaagttcatctttttccatttggtaaccactttttttccactgttctcgcaactgttgtaatagagccccaatttcttttcctgaagaaatgcccacttttctgatgtcatggccacttacaggaaatggaggaatggaccactgctgcatttcctttaggagacagtgctctccttggtacttcagtagttcacatacacgagtagttgcatcaggttccctagactacgtgtcaaaatcaaacatttagtttcgtcacacatgaaaacatacacttacaatcttatcctaaaatttaaatactcaacataaattttttcatttaaaataagtaaaattcacagatttgtagatcttagttttaataaattaattctaaattcgtgacgatacttcatatttctgaccaagcctagtatatacttacatctataatgaagtcttgatagggtttcaatgggtctgaactatctgttgctttaattaaatctttcctatttttaactataaataagccaaggtttttctcctctttcgcgatcttcaacctcaaatccaattttgtgacatcatcttgtactttgaataatgaggccaaaagagtcactggctttggtgaaaaaccatcaacatttttactgactttgtcaaattcttctaaacttgcattagcaggtaaacctgtagggacaaaagcatttttcacctgtttttagtggggataaaaaaccactcatatcctaaaccttgccaccattttagtatccagaaatgctttgtcactaggatacattatataggttcagtctgatgttccaacttaaaggcgaaccactaatatattgttattctctcccctgtcaccttcaaaacctctaaaatgttcttgtttccattaaagctacatcaagagttccaggggtagtggtgacagtggtgtcagactcacaaggcatactctttctaatcacaaattcctgactttacactgatacaagatccaccccccattcagtaatgttactgaaatttgaaatatgcccaagcttaccgaagtgtgataaaccatataatcccactattctctgtgaaaatgaattacaacgtttactgaacaatttctgtgtacaagtcactcttctaaaagagctttacatgtattaactcactgaatccttttagctttcctattagatagaggctacattacttttaaaccgcttttttgggttagaaactaacccaagttgcaaagactagataaggggctgagcttccttcaaacctaggtctgactagagactactctacaagcaccacaagctgtctttgagctcttccctactcacgacaaaacttaccccataacccaaactttgtcttattttaaaatactccatttctccaagaattcttcaaccaaatgagtcaaacattttttccttatgaaatttgaaaccagatatttcactgccaaaaattcaaacactttataacttgctctcacctatataaggagccacatcaagatcatagataaggtgaatcaaatgatttacatggttaccaacaagaatttttttcagttccacccaaatcctttctcctgatattccagccaagccttttgcattttctgcaattgcttccaaagtctcaggatcatggtcaccaggtttgtctacaattctcccataaaacctacaagacaaaatcttcacagggtattacctctatattggcatatcacaagcaaaatctgtttttcatttttattggtactatcccatacatctgcttaatgaaaacaacatataattagttaggtctagaagggaccttagaaagcaactggtcatttctccacctcctctttcttttcccagataagaaaacccaggatcgaataaaatataagtagcctttttgaggttagcaagaactaaaacttcaaggtctccacctcacttccaaattactgactcaagacattccgaatggtcatcaaatgcaattcctgaattggcacttatactagatgaaaaaaaaaacagcattcttgtaaaggcagcaaaccaaaacaagactgcagtgccttaacagagtagtctgaattcctcaaagcttgcctgtctgtacacattagtactttcaaggaaaaccttcaaatacgactcatctagttgcgcaccctggagtatatttcgcggaatcttagaactggaagccctaacgtgcatgtgtttccctctcatgcccttaaaattctaatgaattcatcagcggtccaaagtgatgctaaataagtaaattaatgctaaatctggattagtgatacaaatacagctaagtcttaatctatgttctattatttataagacagactacaaatactcaagtttagagaaactacattgacaaaatatccatgttctgttatagaatattctgagagcaatcccaaccagtgaaaaatgaatattacttgacataaactagccaattcggatagttttttaaaaaggttagtgtgtgacatttaaacatcattgctacccacaaaactagtcatgcgtttcatatttaccaagtttatccaagatcttctttttttttttttttttttgagatggagtctcgctctgtcgcccaggctggagtgcggtggcacgatctcggctcactgcaagctccgcctcccgggttcccgccatcctcctgcctcagcctcccgagtagctcggactacaggcgcacaccgccatgcctggctaattttttgtatttttagtagaaatggggtttcaccgtgttagccagcatggtctcgatctcctgacctcgtgatccacccgcctcggcctcccaaagtgcggggattacaggtgtgagccaccacacccggcccatccaagtttcgattatgtctttatgctttgattctttaaatcatataacaggtatttcttttcaccaaaatcattttgttgtgaaccatcaccgatttccatgactacctaaaaccgtaagctgtatgaaggcgaacactttcactcgttcattaccacgtttaatgcacctaacacagggattgacctgtggtaagcattcaaacatctgtgtaattaataaatcaatggaggaaatatcaatcaaaaagaaaaatggacatttaaaaagatgacttaaaattgtaggaaagatgacataaagtatatgtgcgttctgggaatgaaaatacaatatgaagtagctaagtaattttcactcataagtcatagggtgctaggtctccactggagacagacatttgggatgtcaccattttgtacactgacctgctgtgggtttcgtatgaccactgttatgctctagtcatgatattaaaactatcattttttatttttaaaaattcttacctgaagtatcttaaaattctaagataatcctcttgtattctctgtttagcatgtccaacaaatctaactttcttattttttaaatcttcataaccattaaagtagtcaaataaagtgccatcaaaacctattcattagaaaaggagggagaaaaatcactattggcaaataagaatttgaaaacacaagaaaatcagctaaacactatcacaaacagtaaaaattcagcagagtgaacagttattaaaacacatacgtattcatacatatcaactatcaaatggaagacaataaaagactgtcttttagtctgtttagctgcatttacaattgcaactaaaaagataatccaagaataaactaaacaagaaatatgcaaaacttgtatgaggtggagtggagccaacaagacaccatacaagctaattttcacaatatgggaaaataatagccaaaataaaatggaaaaaatacgtaacaggattaacagaagaaacgaggaaaatatttttaatcttggaatctttataatcttgaagatctttcaaactcagcaagaaaacagaaaacgcaacacaaaaacaacaggattttcgaagaaataattgaatgacataaaaaatgaaatatgcctgtatggcagaaactactatcacacacaaagtcataagtgacatttttggaaaaatatatgtaagtccatattttaaaaatggctaatttccataatatataaaagttctaataaaaaggccacgtaaatagaaaaataggctacctataaaggaaatatagaaatctctttaataatgaagattttcaaccttagtcataaatcctttttttgttctttgaggcggattctcactttgtcaccctgggtggagtgcagtggtgcaatctcagctcactgcagcctcccaggttcaggtgattctcctgcttcagcctcccaagtagacctgccactacacacagctaatttttgtatttttagtagagacagggtttcggcaagtgggccaggctggtctcgaactcctgacatcaagtgat

SEQ ID NO: 97009 - DNA, 21104 bp, Homo sapiens
  misc_feature (1)...(21104): n = A,T,C or G
tgatcatgtgggcttcatccctaggatgcaaggctggttcaatatacgcaaatcaataaatgtaatccagcatataaacagatccaaagacaaaaaccacatgattatctcaatagatgcagaaaaagcctttgacaaaattcaacaacacatcatgctaaaaactctcaataaattaggtattgatggaacatatttcaaaataataagagctatctatgacaaagccacagccaatatcatagtgaatgggcaaaaactggaagcattccctttgaaaactggcacaagacagggatgccctctctcaccactcctattcaacatagtgttggaagttctggccagggcaattaggcaggagaaggaaataaagggtattcaattaggaaaagaggaagtcaaattgtccctgtttgcagacgacatgattgtatatctagaaaaccccattgtctcagcccaaaatctccttaagctgataagcaacttcagcaaagtctcaggatataaaatcaatctgcaaaaatcacaagcattcttatacaccaataacagacaaacagagagccaaatcatgagtgaacttccactcacaattgcttcaaagagaataaaatacctaggaatccaccttaaaagggatgtgaaggacctcttcaaggagaactacaaaccactgctcaatgaaataaaagaggatacaaagaaatggaagaccattccatgctcatgggtaggaagaatcaatatcgtgaaaatggccatactgcccaaggtaatttatagattcaatgccatccccatcaagctaccaatgactttcttcacagaattggaaaaaactactttaaagttcatatggaaccaaaaaagagcccacatcgccaagtcaatcctaagccaaaagaacaaagctggaggcatcacgctacctgacttcaaactatactacaaggctacagtaaccaaaacagtatggtactggtaccaaaacagacacatagatcaatggaacagaacagagccctcagaaataacgccgcatatctacaactatctgatctttgacaaacctgagaaaaacaagcaatggggaaaggattccctatgtaataaatggtgctgggaaaactggctagccatatgtaaaaagctgaaactggatcccttccttacaccttatacaaaaatcaattcaagatggattaaagacttaaacgttagacctaaaaccataaaaaccctagaagaaaacctaggcattaccattcaggacataggcatgggcaaggacttcatgcctatgccaaaagcaatggcaacaaaagccaaaattgacaaatgggatctaattaaactaaagagcttctgcacagcaaaagaaactaccatcagagtgaacaggcaacccacaaaatgggagaacatttttgcaacctactcatctgacaaagggctaatatccagaatctacaatgaactcaaacaaatttataagaaaaaaacaaccccatcaaaaagtgggcgaaggacatgaacagacacttctcaaaagaagacatttatgcagccaaaaaacacatggaaaaaatgctcaccatcactggccatcagagaaacgcaaatcaaaaccacaatgagataccatctcacaccagttagaatggcaatcattaaaaagtcaggaaacaacaggtgctggagaggatgtggagaaataggacactttgacactgttggtgggactgtaaactagttcaaccattgtggaagtcagtgtggcgattcctcggggatctagaactagaaataccatttgacccagccatcccattactgggtatatacccaaaggactattaaatcatgctgctataaagacacatgcacacgtatgtttattgtggcactattcacaataggcaaagacttggaaccaacccaaatgtccaacatgatagactggattaagaaaatgtggcacatatacaccatggaatactatgcagccataaaaaatgatgagttcatgtcctttgtagggacgtggatgaaattggaaatcatcattctcagtaaactatcgcaagaacaaaaaaccaaacaccgcatattctcactcataggtgggaattgaacaacgagaacatatggacacaggaaggggaacatcacactctggggactgttgtggggtgggaggaggggggagggatagcattgggagatatacctgatgctagatcatgagttagtgggtgcagcgcaccagcatggcacatgtatacatatgtaactaacctgcacattgtgcacatgtaccctaaaacttaaagtataataattaaaaaaaaaaaaaaaaaagagtgtgaaacggccttcatgaggcttaattgtggcttaacctggcaccacccctcacaaggtcaaagctatacatcagctcctgtgacattgactcatcccccagaccttatctaaaacaacggagcaaacacatgctaggaagggcacccgggaaatggaaggcattgttctatctcctcacctgattccatatctctgtattctgccccaaaatgcctccactggaagccataaactgggcccaagtccccttcttctctggtggagaatcccaggctgtccaaaaagtctcgggatccattggcatcccagattttcactcccttggaagacagctctttagcatttgtggatccctggaagagatggggagagcagagcaggcatccaggtaaatcctaagccatctcagttgatccccccgagacaccacttacaagggcctctggcccctgctgacttgctaggaggtgggcacttgacaccacccatatggaacccatccttttttttgttttttgagagtttcgctcttgttgcccaggctggagtgcaatggcgcgatcgtggctcacggcaccctccacctcccaggttcaagcgattcccctgcctcagcctcccgagtagctgggattacaggcatgcgccactacacccagctaattttgtatttttagtagagacagtgtttctccatgttggtcaggctggcctcgaactcctgacctcaggtgatccgcccacttcggcctcccgaagtgctgggattacaggcgtgagccaccacacccagctgcccatcctatctttaagtaggctggtcccagcccagattcctgagggctttaggacagtctgatcccttctttggaaccaccctcccagatcttttcttccattcccctcaactaagctttttaggctaaacacctccaagtgcttttaagtattccaccgatctgacagttttatgtttcttaatgaaatgtgttgtctatatgtaataccccaaaatgaatttaatgcctacatgcaatctgttcaatgtatcttctacctggcatacaggatattcctaatgatcagactaatcagtattttacagtgcaggtgcctcaactcctgtatttgatcgagtcaccaatggagtaactccaactatcaaggtgagtctgacattcctggcaaggattccttagaatcctgaattgaagcattaagttgaaacaggggaatgcattttatttctgagtatcttgcttcctccctttctattgttgagtttgtcccgattttctttgattgagaaagaatcaaagaaatttccaacaaatcaaagaaatttctccaattgagaaatttccaacaaatcatttctcaatcttttacatattgcttcaaaagtctctccttttcatccattcagaccaggctctagccagtttaagaatgttgtcttctgaggtttctgatgatatgtttcaaatccaaggttcattgttagtcaagataggccaatacagaacaaaataccccaagaatacagagctaaggcagacctggggctggatccaaattgaagccctttctaaaatgggataagagggcttgggtctggcttgccccaagaccatacaagccataccaagtgctctatagaagggatcccagcttctagtatggcccagacctgagcccagacctcagccaccttccaaaaagcactggtcagaaagaacatcgctggttctagaccaggacacggaacacagagaagcttggtctgggctgctgcctgtcttcacagcactctggccccggcctgaggtacctactcagccctctggaaggggttcaccttgttactgaagagactcttctagaatttatatgaacatgggaacacaggtggtatctacatttagtgatcaatatatgttgactcctactatgtggcaggctgtgtttgaggccctggcgatacaacagtgaacacgagaaacaaatcctctgccctcataaagcttacagcacatttcacttttactacctgctgtcccccttctaacaggggaagggaaaggctgacatacatcagatggtgatgttcgtctatggagaaacaccaaggaggttgggggagagtcacagttttaaatcaggaggtctaggaaggcttgcccgagtggagtagagactcaaaggaagaagccaagtgtgggggaagaaggttccagggagtggggatgtcccggtgtgctcaaaaactcacaagaacagcagggctggtgcagagagcagcagctaaggtcagagctgaaaaacggacaccataaggaccgtggctcttactgagtgaaatggagccactaagggcttgagggtgaggaatgatatgctttgacctttggtggtgtctttttttgtttttgacatgggttctccctctgtcgcccaggctggagtacagtgccacgatctcagctcactacaacctccgcctcgtgagcaattctcatgcctcagcctcctgagtagctaggattacagacatgcaccagcacacctggctaattttttgtgttattagtagagactggggtgtcgccatgttggccaggctggtctcaaattcctaacctcaggtgatctgactcagcctcccaaagtggtgggattacaggcgtgagccaccacacctggctgctttgagttttgaaaggatctcactggctgctgtgttgagaacagactactgacttctaatagcagcgacttctttaccttgataaaccacagcaactcctccaaaacacccttccagaacacacgtttggttgtcagcagagggaattcatctgaaaaacaatttgccatacggtttcaagatgggaagacagatcatgccatccaactttcttcagggaagaaaactgccctgggacgtgaggccctggagcatccagaaagcctagactcccgcaaagtgggccagagatcacggtggagctcccaggctgcaagtcccatcagtggcccgattcaggctgagacagcacttctgtgccccggtgaccagtggacacaggaattccacacagtgagatggtggcgagggcagggatgaacatgtggcaaaagggaggagctatcatccactgcccactagtgctaatcctgtcacaaaggtgtgaagacaacaccaagcatgtgtcccaggaacaaaaagggaggcatcagaagtgtcgagccacagagaaatgaaagtgtaaaaacttatctttaaatgcagtcctcgttcatccgcactcgcttgtggtacagtttatattcagacaacagagagatttttgcaagcacctgcttttatcagaattgcctactaagcattattttctccatttttaacatatagggaagctatatgagaagtaacttgctcaatgtctaagcagaaaggtgggttaaaaatgaggtctatggctcatcaaaggcccctgggcttggagctgcagaaaagtggatccctctcctcagacaaaactccccacgctgtcccacgccaatcagccacagcagctgctatgtattcgtctctagatgggtccgtgggccggagggcttttccgctagctacagtgaatctgcttcaccacgaatgggtttccccattcaaaaccacctccacccctgtgtcaaggctgcgctccatttatctgagcggtcaaggtcagcccctggctcacacaccttcgagtcccctcccccgcgcagctggcgcaggatccaggacggcaggacggtgtggccttagggagggccaacggctgcctaacgtcctgtgcccaccccgccccgccccactgtcccctgaaagcctggcgccaatgacccgcgagacattttttgcctggggtgctcctgtcggaaaggaaagaggaaaggacgactaagaacttatactcgaactcccgaatttctcttttcaaggtttaagaggaaagctggttcgtggggattggatgggaggccaccaggaaaccaagttcccgcgccagcttcagtgctstcctctycccgccgcctttgccccgcccacatcactttcgctccagtttttgaaaacgctgcgaagcggaatggtccacaggggaaaacggaggaggggccaaagccaggactttgagaccggcgcgcggtcaagcccaggcagctctccctaaccctccagcactgggcaaacgctgcccgatgacgcccgcctcgggggccacggcatcactggggcgactgcgagcccggccgcggagccgctgggacgcggcttacctcccggctgtcgctgctgtgtgtgttgcccgcgccagtcacgtccctaatgggaccctccgtttcggcgtctgtaaggcgaggaggacgatgcgtcccctccctsgcaggattgaggttaggactaaacggggtccgcagcgcccggcagctcccgagcgctctccccagccgcgcctccctccttcccgccacccgtcccgcaggggcccgcggcgtcacctctcaggctgtagcgcgcctgcatgccgaataccgacagggtgccggtgcccgtgcggtcgtccttcctgacgccgcagcggaggatgtgttggatctgccccaggtactgcagctccccgtgcggcggacgcggctcggcgtcccgctcctgtgcggcggggggcaagggccggcgcggcagctccgagccggccacaggcatggcgcggcgggcgggggacggaggcaggcgaagtggcgcggcgggacggaggcaggccaagtggcgcggtggcaggaccccttccgcgcgccttttcccgcggccgtcccgcgctccgcctcttcctgctcggcggggtcgcggcggcccccgctctagagagcgtgcgccagggggaaacgcaggagccacgggtgtggcacagaacggagcccagggccacagctgagagtcttaggaracccgggaacctggatgcaggtgcggtggckgggaaggactgcgccctttgggaaccgtctggtcgaccgcgccttctctaagccagcagcacagttcccacgttttcctgcggtcttgtcracaaaactgctgtttgagatctgtttcctacaactaataagggatttgcatttccatttcttcgttctcactgaaggcaaccgaagcaagtggtataatgcagcttttctacttgattaaaaaccgccagggcgctggacgcggtggctcacgcctgtaatcctagtactttggggggccgaggcgggtggatcacctgaggtcaggagttcgagaccagcctggacaacatggtgaaacccccgtctctactaaaaatacaaaaattagctgggcgtggtggctacttgggaggctgaggcagaagaattgcttgaacctgggaggcagaggttgcagtgagccaagatccgaccattgtactccagcctgggcgacagagcaagactgtcccaaaaaaaaaaaaaaaaaaaaaaaaagaccgccagggcttttccgaggttttttgtttgagccctggcggtcttttttttttttttttgagacagagtctcgctctctcacccaggctggagnnnnnnnnnnnnnnnnnnnnnnnnnnnnnnnnnnnnnnnnnnnnnnnnnnnnnnnnnnnnnnnnnnnnnnnnnnnnnnnnnnnnnnnnnnnnnnnnnnnnnnnnnnnnnnnnnnnnnnnnnnnnnnnnnnnnnnnnnnnnnnnnnnnnnnnnnnnnnnnnnnnnnnnnnnnnnnnnnnnncctcctgggttcaagcaattctgctgcctcagcctctcgcgtagctgggactacaggcgcccgccaccacgcccggctaatttttttttttcatgtttagtagagacggggtttcgccatgttagccaggctggtctcaaactcctgacctcaggtgatccacccacattggcctcccaaagtgctgggattacaggcgtgagccaccgcactcggccccaagtttttaatagaccacatttcccagttttactgaattgtttataacattaacactggggagtgggaactgttgatgaaaagagttaaactctgtaaaatatctgaagaaatttattctgagccaaatatgagtgaccaatggccggtgatagagccctcagcagatcctgagaacatgtccccaaggtggttgggctacaacttgattttttatacatttggttgaaagaattgttatctaaagatctggaatcaatagagggctgggcgcggtggctcacgcctgtaatcccagcacttgggaggtcgaggcgggcagatcacgaggtcaggagattgagaccatcctggccaacatagtgaaaccctctctactgaaaatacaaaaattagtggggcgaggtggcacacgcctgtaaccccaggtactcaggaggctgaggtaggagaatcgcttgaacccaggaggcggaggttgcttgcagtagctgagaaagcgccactgcactccagtctgggtgacagagccgtatggggaaaaaaaaaaaaaagatttgaatsaatagaaaggaatatctgggttaagataaggggttgtggagaccatggattcatcatgcagattaaacctccaggtagcaggctttagagagatagattgtaaatgtttcttgtcagacttaaagagtgtgttctacctgtcttgaggcctgtgttgatgtcaatgctggtcagctgtgcctaaattccaaacggaggagggaataatgaggcatgtctggctccccttcccatcatggcctgaactagtttttgtggttaaatttggaatgcctttgacccagaggagtggtcttttcagatggttctgggcgtagaattttatttttggtttacagaacgattttataatgagtttaaaatgcactgatacatgtgttgtacttgcaagcatccttttacctcaacggttgattgagtacagaggtgctctcagcattttgggtgggacttttcttagctggaccggtttgttctgcacattgcagggctttagcaggactgtggaaagccaaccatatgttggcattcccccaccccacaccagctgaaaactgtccctacacgtttccctacacgtttccgagcacgaggaagatcccaggctgaaaatattccagattatccagatgcacgttatctgtgtttaatttccttgtgttattctttttccttttttttttttttttttttttttttgaggtggaatcttgctctgtccctcaggctgcagtgcagtggtgctcagctcactgcaaactccgctgcatgggttcaagcaattctgcctcagcctcccaagtagctggaactataggcgcctgccaccatgcccagctaatttttttttctttttttttttttttgcatttttaggagagacagggtttcaccatgttggtcaggcttgtctcagacttctgatctgaagtgatctgcccacctcggcctcccaaagtgctgggattaaaggcrtgagccaccatgcccagccttacttgtgttattttttaaaaacctgatacataataattgtgaggtagacagggcttgactctggaggcagggctctgacatgggaccaaattgaggagtagtcaaaacaaggatggggcagaagtagttttccataagacgtgcccaccagtgtgccatgtcagtttacgattgtcatggcaacatccagagcttactgcccctttccatggcagtgagccgacaaccggaagttaccaccctttttctagacatttctgcataatctgccccttaatttgcatgtaattgaaagtaggttataaatatcactgcagacctgcctttaagctactgctgtcagcacactgcctatagggtagctctgctctacaggggcactcagggagctgttgccatatcagtagagcttttcttctaccaggtagctcttaaattctttcctgagcaaaaccaagaaccctcctgagctaagcccaattctgggctcacctgccctgcatcagttgcacatccttgtgtgttttttttctttctttctttttttcttttcgacggagtctcgctctgtcacccaggctggagtgcagtggcagaatctcagctcactgcaacctctgcctcccaggctcaagcaattctcctgcctcagcctcccgagtaactgggattacaggcacccatcaccatgcccagctagtttttgtatttttagtagagatggaggttcaccatgttagccaggctggtctcgaactcctcacctgaagtaatctgcctgcctcgagcctcccaaagtgctgggatacaggcgtgagccactgcacccggccccttgtgttattttgaggctggtttatttgtttcacccaaataccagctaaatcacatctcaagactaggctcctctgcccacatggagcttccacttctgctgccttccttgagtatcttggcttgatagtaaagacagaatggttcttttcaaagtagttactccataaatgttggttagaatgaatggttctctcagacaaatttcattcattcattcattaacacacatttatatcatggtgccttcctcatgtctacaaacagcaagacagacaaggcccttttcttcatagaactgatattctggcagtgacaaacactacaaaagtaaccaaacaagayatctgcagatagtgacaagtgtgatgatagtaaattaatgggtatagcactaaacagtgattgtgtagagggtgctttagatctgatcaccaggaggcctcattgaggaagtcacatttgagctgagacctgaatactgggaagaaaccagcaggggaagatctggggaaagaacattccaatcagcaggtgcatttataccagtaggtgccacagtgcttgcatctataaaaacatcccccaatagggacggtcatgatgcttaatcctgtcttgttctaggaagaaataataattattagtggatacgttaacttattggagtataaaaagctcttccttctcattaagagatatatttgtttaaaattttacttttatatgtttagtagtcatagaaatttgtagtatatttatgttattttgatcaattatgtacaaaaaataattataatgatcacccaatctagaataaatatttcatacctagaatttgatgtcacaggatgttcttaatttttaaaatttaaaaatgatcaaaattgtgttgatcaacaaaagatatttaagcataaaaatatactacattakgataaaattcttaggaatgtagattgaaakaagagtttagggagaaaatgtaatgagataaaatttctcattgttaaagaaaaacttgtatatttgtttaaatggatgatgctgggtcaaattgcgatgatatttagattccatttggtacattttaaagagggatgacctgctaatctttacgatgcgtgggaaaataacaatttgctattctttcaacttatatagaaaaatgacatgcaagtatgttgcaactttttcagtttcctttgaggaagtatgagagcaaaaatatttgaaaattattggtctagaaaaaccttccctttacaaattcaaacatgtaggtaaacttaggtaaaggaaagcagaaaattaacgtttttgagagtcaattatgaatcagttacttgataatattattttttattgttgctactaccatctatcaatgagtatcatgagccacacattatggattaatgtagttctcacaactactctataaaacacaaacttttacagtagtttccccttatccacgggggatatgttccaagacccccaggggatgtctgaaactgcagatagtactgaaccttatacataccatgtttttttcctatacctacatacctatgataaagttgaattcataaattagtcacaggtagagatgaacaacaataactaataataaaatagaacaattataacagtatgccggcatccctatcttgtgctttggggccataattaagtaaagtaagggttccttgaacacagaaagggttcctaagagaacaatttggggaatgtagtcatcgtggagccactggacaaagggagcattcacctccggagaggaaggggtcagggacagcatgagatttaatggcatgcaattgaaaacttactatgtatttctggaattttccacataatattttaaaaccgcagttgatctcgggtaactgaaagcttggaaagcaaaaccacagattagtggggcactagtgtactttaattaccttatagatgacactgagattaaggatcttggccaaagtgacacatctggagaatatagtagccaggatgaaaatccagttcagcctgcatgcaaaatcttctttccatttagctgttttgagcctcacttcccccactctctttccactctataagcttttgatagctcattggatagaaaataggttctcttaatcacttatttttttgtcaccttcactaacaaatatttaaaatctatggttgaatagactgtatttgagatttattgcacaccgaagaacccaggattctattagttccctgccaggagcagtggctcatgcctgtaattacagcacttttggaggctgaggcgggcagattgcttgagcctgggagtttgagaccagcctggacmacatggagaaaccccatctctactaaaaaaatacaaaaatagacgggcatggtagtacctgtagtcccagctactcaggaggctgaggtgggaggatcacctgagccaaggaggtcaggcttcagtgagcccagatcatgccactgcactccagcctgggcaatagagtaagaccctgtctcaaaaaaaaaataacataattctcattttttatagccttcagttatgatttagaaaaggtttatcttcatttggagttaattatattcaatkggctgcctctgaactctaactttctctgacaagcctttctgtcagatagatcaagactgggtgaaaagttctttaaaagttcagagttctctctctttcattacgtttcttttatatatttatttatttatttatttattaaaaaagagtctcgctctgttgcccaggctggagtacagtggcacaatcttggctcagtgcaacctctgcctcccaggttcaagcaattctcccatctcagcctcctgagtagctgggattacaggcatgcgccaccacacctggccaatttttgtatttttagtagatacaggttttcaccatgttggccaggctggtttcgaactcctgtcctcaggtaatccacccaccttggcctcccaaagtgctgggattacaggtgtgaggcaccgtgcctggcctacatttctttttataatttgtaatactgactgtatatactstcattgtaatccttagtgatatatactgacacatagctctcctattattgtgttgcaccaaggtccaaattatgaggttgagcgtcagccaggaaaatcttgtgttttccataaaataygtatgtcaaaagacagcgctgttgtgccaattttaaaaagtaactatgtagcacacccacgttcaaaacagcattattcacaatagccaaaagatggaagcaacccaagtgtccatcaatggctgaatggataagcaaaactaggtaaatayatgcaagaatattagcctaaaaaaggaagttctgagacatgcaacaacatggatgaaccttgaaaacatggcactaagtgaaataaaccagtcacaaaaggacactgtgattgcaccactgcactccagcctgggcgacagagtgagaccctgtcttagaaaacaaaaaacaaaacaaaayraagcaaaagacaaatactgtatgattccacctacatgcagtacctagagtagtcaaattcatagaaagtacagtcgtggttgctacgggctgggggatggggaaamgggaagtgagtgcttaacgagtacagagtttcagtttrggaagataaaaaggttctgaagatggacggtggtgatggttgcacagcaacgtgagtgtacttaatgccacaaattgtgcactttaaaatggttaaaatggtaaattaatgccatgtgtattttaccacaatttaaraaaagactatacagaacctattggtctttacaaaacaaagcaatgaatcttagatttttttccaaaaaagtcaattatatatattttaagtgcaaaagcaaactaaaggaagaacattttgttaattaggaagtgacatgtttgtagatgtgatagaacatagacacctaggtgatttagtatttattcaatatacaaagaactactaatgtaccatgaaatgtaatacatattacgtttgattttttaaggaggaattttcattttaactcaatttgagtattaatagctaagccattcaacataagtaaactaagagtacttcatagtatatagctaacatactttcctgcaactgtgtttattgcattatccttttttatttcaggatttccaggtcccagatgaagagataattctacttactggatataggatgcattagatcttcttaccttaaaaaaaaaaaaaaaggcagcaatgatcaaaatactaataaattactcacagactcagtgtattttttcttggagtaaaagtccaggatgggtaatagaatacctgctgttggcttttggaaaaattggtactgtatgtagcaaaataatgtgaaacccatatgcatggatattcttaacaatttgaagaaatcgtcacagctttcctgggttgttgagcctctaagatggtcttttcctctgatgtgataataaagtgtttattctgaactctacatgcacgtagtgtttggtcagtaaacttctgttactcatgactcattacattagtcaacaaattttgtatatttgcctttcacgatgatgatgatggtaagagcccatctacaaaagcttattaaagactcaggatgtgcaagatattgtgttacagcctgtgactgtagatcccagggccggcagctatgaaacttggggatgggaaataaaacacattgcaaaccaatcaggaacgtccaggcacttaggatgctagataactagaagaaagttccagaagagggttctaaatatatatttcaccttataaaattggaattcatgtttcagtgagctgtatacctgcagctagggcacctagcaaatgtttacgtgattgaaaatgccagggtgattcttttctaccatcttttcctggtttttcccttagtatctttctctttaaactttggcaggtttgggaccctgaatgcattgatataatcagaaaattgacaaaattttatccatgataccaagtaaggtgcacaaaaaagaaattcagtcagtaaacaaacttggaaaatgtttattctcatgaataataaaaaaccataaaaattataacaataagataaaaattttcatttattactgaagattttaaaaattgaaatgccaggccaggcagtggctcatgcctgtaataccagcccttggggaggctgaggtggaaggatcacttgaggccaggagtttgagaccagcccggccaacatggtaaaaacacatctctactaaaaaatacaaaaattagccaagtgtggtggtgcacacctgtaatcccagctacttgggaggctgaggcatgagagtcgcttgaacctgggaggtggaggttgccgtgagccgagatcatgccactgcaatcctgcctgggcaacagagagagactgtctcaaaaaattgaaatgccagttagcatttgagaaagtggtactgcagacattgctgttattaaatttagctatatatagctatatatatatatatatccagaacaataagatgttaataacctctaaacaagtaattctatttcttggaatctaagaaaataggtagaaaatgtgaataaggaaaacaaatgataatagtggttgtgttaagatggtgggattatggataatttttgtcgtctaaatgtttggtagttgtgattttgttacttttagaattttaaaactacataaaaaagaaaaacattaacattgcctgtgaaaaatcacttcgtgtgccttgttagtaaataatttgcttgatctcccaattactcagtatcttaattcccattgccattggaagtcccaacaactgggaagagatagatgactttatgggaaatactttgatttggctacaaatgcatagtcagtacccactggggcaccagcatgaggcttcctttctctaaaacctatcgtgtctcaccagcgctgtagagtgaacctcagactccacagcccagcactcagagccctgacctcttcccacctttgccttccaccttcgcctactgttactcttgttgtagtctactgatattcatttacacgtgtttattaattaatttattcaacaaatattgagggtttgccctgtgccaggcagagtcctaagtccccactgacaaagagaagagcaaaaaccctagaacggtggtaccctcatggactgtaggtctcgggatggagatgaacgttcataaagagtcacatgggtaaatgtcaacttacaagagttgagtgctacatggtgttatggtcatgtgtgaaaggggagagagggtatgttgcccctagtttatgggtagaagagggtatattgcccctgaagaagtgactatttgaactgagatctgttgatgactcagtaacctaaacaaaggggtactacatggggactgtcaaccaagactctcctctctcctggtctagaggtagacacacatgtcccagctgggccagccagattcctcctggcaagtcacatcttgagcagagtgatctgaggactaaaaacaactgcagctgcttcaccctgagcgctgggccctgaagcagctgtccatcggtttcctcctcccagactctagacctgacccgtttctgcctggctctgggcatagacgtccagcttcccctctgactcatgagtcggtatccatccatttcttttagctgagctggtcttggttgcttgcaaccaaagaaagaactcaaactcacagagggcaggtaccctggcacagggaaactcaaaggccccacagtgggaggggaccactttagcaggacttcccagcaccctcagtacctagatgctctactctttcttgccgtatttttagcaggacttcccagcaccctcagtacctagatgctctactctttcttgccgtatttgcccatgccatccccccttttggaacagtctcctctccaacctatacactttgattctgcctgtgtgtgtatctacatttatatatttaattaattgatgtatttttaagaaagggagaggaggccagtgtggtggctcatgcctgtgatcccagcactttgggaggccaaggtgggtggattacttgaggtcaggagttcaagaccagcctggccaacatggtgaaaccctgtctctactaaaaaacacaaaaattagccaggcatggtggtgtgcgcctgtaatcccagctactcaggaggctgaggcacaagaatcatttgaacctgggaggccgaggttgcagtgagccgagatcgtgccactgtactccagtatgggtgacagaacaagactctgtctcaaaaaaaaaaagaaagaaagaaaaaaggaaagaaagggagaggacagagtgggaggagggagaagaaagaggaaaagagaggaggagaggaagagaggggatagaaggacagtgagaaagggaatatactgagctcagaagtatcttccctaccagaatgtgaacgaccctcccctgaactcccagagcccactcctgtgcactctctaaatcttgccttgctttatagtgtgtgtgtgtgtgtgtgtgtgtgtgtgtgtgtgtgtgtctatctatctgtcttgtgcccctgttggataggaagctccttggggacaggatcttgtcaaatttctcattttctctttcagagtaccagttcccgtatctaaacttagtagatgctaaaaagatattggttggctgactgatacaactagaaaaaaaaaaaggcctccaaaattcagaagtaaagggagaggcaacaaatcctgtcacatctggcttaattacacattgatggtgacctactaacaaggtctcatgaataatttaaaatgtaattattctttaaggttgatcatattacccagatttttatatctcgcattttttgagcaaatatcttaacaggaagccgtgcagtgtgatgatggagtcggagagagaactggctccacatgctgctctaccacctccgacctgagtagttcattggaccttggacactgagcctcaggatctttttctgaaaaatcatgataatactattacctccaagactagctgataataaagctcttgttaaagtagttagcaagtcattatttaaattttttgaatatttttaacgtttcataaaatgtattgagtgtatttagtcataatctacttaatcattctcttgtttttacacattaagagtatgtttaacatatatatatatatatatatatatatatatatatatatatatatttttttttttttttttttttaaacagagtcttgctctgtcgcccaggctggagtgcagtggcgcgatctctgctcactgcaagctctgcctcccgggttcacgccattctcctgcctcagcctcccgagtagctgggactacaggcgcccgccaccacgcccggctaattttttttattttagtagagacgcagtttctccgtgttatccaggatggtctcaatctcctgacctcgtgatccgcccgcctcagcctcccaaagtgctgggattacaggcatgagccactgcgcccggccaacattttaatattttaaataatgctgcaaatctagatcttggagggagaacttttcatcaaatttagatttattccttaggattgatttcggaagtggaattattatatcaaaaggaaattttatggctcttcatatgcataatcaaatagctttcaaaaatgcaaaaccaattatgttcccaccaatacatgatatatgagaattcccatttcatcacattcctatcaggatttcctgggtttttttttaatttgcaaatctgataggcagaaaatgccatcttgtttgttttcatgtctttattaatgaggttaaacatgttttccaggtattttgaaacaagttttgtttttcccttttgagaattaactattcctgtcaacaaggcattcctaaccaggcactctgcttaccaggttttaaaatgttccttaaaatgctgtagagcttttgccactacgtagccaatgaagttagaactctcagcactttcttcaagagggatcttgagtgtgaaattagaggaaggcagaatgcttaagtctgtcatcattgtttcatcttgtttggaaatatttccttcatgaatccttggaactacctacagaagaaggattatacagtagaagtttactaaatcccaatacacattcaatagtaatttaataccaccttagtcaggataggctgggttgtgctgaggtaacagattagtcctggcattcctagggcttcatgcaacaaagatttatttcttgttcatgttatgtgtccattacaagggctccacaccagtaaacactgagaagcctggtaggcaaaggcacattatctcatagctgtagcacatgatttcaggactttctttgtgccctcagcagaaaaagagaatagatgagcacacataggctcttcactgtctcaatctacaaagaacccttttcagttttgctcacgcttcactggccagaacttgccacatggcaacgtttaaccacaaggggagctggaaaatatgagagaggaggtgggatgtttgctgagtattactgtctgtgccacaaactttattgcattgcaccaagttttgtactgagttttcctagaaatttacaatttatggttgtaggtgtgattttggcaagaatcaatgcaaaatttatgttactcttaatgaataacatgtatgttactctcttaatgaattctcaaatgcacagactttgatttgaatcatttaaatggaactgaactgatacgcaacttgatgtaaccttaagagaatgatttaaaaatttttcccttctctttctgtgagtataacatacataaaaactgcataaagtatttatgtttggtttaaataattgtaaagtcaacacccatgtaactattatacaaccagggaccacaaccgttttcacttgctggaatttgtatatttctttcataaggcttctcttcagcacttgctattttatgggtttgtacttttctttacatggtgaaataggagctgttttgagaaaagtaacttcacaggcagtttagcaaagtggttacgttcactgattctagagaaatactgcttgagtttgaattctagttctaccatttacta

SEQ ID NO: 97010 - DNA, 256287 bp, Homo sapiens
  misc_feature (1)...(256287): n = A,T,C or G
catgggggcagttcccccatactgttctcgtggtagtgagtaagtctcacgagatctgatggttttataaggggaagcccctttcacttggctctcaattctctcttgtctgctgccacgtaagatgtgcctttcactttccgccatgattatgaggtctccccagccacgtggaactgtgagtccattaaacctcttttcctttataaattacccagtctcaggtatgtctttatcggcagcatgaaaacagactaatacatatgtatataccacatttcgtttatatagtcatccctcaatagatatttgggttgcttccatgttttagttattgtgagtaatgctgctatgtatgtgggtggacaaatacttctttgagaccttgctttcagttcttttgggcacacagtcagaagtaaaattgctgggtcatatggtaattttagttttaattttctgagggactcccatactgttttctactgtggctgtatcattttatagtcccacccacagtgcacaagtattctgtattattctgttctcacactactgtaaagaaatacccgagaatgagaaatgtataaagaaaagaggttgaattggctcacggttctgcaggttgtacaggaagcatggctggggaggcctcaagaaactttcaatcatggcagaaggtgaaggggaagcaggcacgtcttacatggccagagaaggaggaagaaagagacgcgggaggtgctacacactttcatataaccagacctcatgagaaccctatcacaagaacagctctagggagatggtgctaaaccattcatgaaggatccactaccatgatccaatcacctcccaccaggccccacctcccaccaggccccacctccaacattagggattacaattcgacatgagatttgggtgggtacaccaatccaaaccatatcaggttccaatttctccacattctcgccaacactggtgttttttgttttttgtttttgtttttgtataatagccatcccaatgggtatgaggtagtatttcattgtagttttgatttgcacttccctgattagtgatgttgagcatcttttttattattattctttcaacttttattttagactccgggggtatatgtacagttttgttacataggtatgctgcatacgcacctctttaagtctcacagaactccacaatacaggtactattacaggcacagagagcttaagtaaattgttcaaattcacacagtgtgttgggctggaatgtaaatctagggaccccaaatcatgagctctggctctgaatcgttgcactagactgtctctctcaatacaaaaaaaaaaaaaaccctactaagtgtaatgtaatgacacagagttagttcttagtttatgttaactattgttatacagacaaaagagaaatcagaatggagagcaaacaattaaaaacaaagaaaattctaaaattctatcaaccgaaatctttacataagcaaacaaatatttttattttttaataacgtttggctggctaaaggtaaacagtaaggaaacagaaaaagttgaatatgttaacctgataatccaaagtgtagtttatatctatagatcaataaccaaaatagcattttaaacaagtttgtttattatatgtgatagcaaataattgagagagtccttatttctcaccaacaaaaagttggtagaattatgcagccattgagcattatagcttcaaagactttttaatgatatgaagaaaatactcatgaaataatgtgacccgattacataaagacattcatttattgattcatttattttaaaaaagtttgagtacctattacatggtataggccctagtctatgagctggtcacatcatccctctccaaagagtatatggtctagctttcagtgcaggctttgtaaatagactggcagagttcctcttctagggcttagtttctttatctacaaaataaagaagttggatttgatgactgatacggtttggctgtgtccccacccaaatctcatcttgaattgtagctcctataatccccacatgtcgtgggagggacccagtgggaggtaattgcatcacgagggtgagtttttcctgtgctgttctcatgatagtgaataagtctcaagatctgatggttttctaaggggcagttctcctgcacatggtctcttgcctgctgccatgtaagatgtgcctgtgttcctcctttgccttctgccatgattgtgaggcctccctagccatgggaactatgagtccattaaatctctttttctttataaattacccagtcttgggtatttcttcatagcagtatgaaaatggaccaatacaatgactgtcaacatctctgcaacaactaagttctacaagtggaaacaggaccctttattcagtcaggaataaaacattatttgatatatctgcaaagctgcaactcaactaaaattgtaacagcaccataaacctattaatgttagttctatttagaaccgcccaccatcttggtttatccaagactaaggtgtgacctgagatgttgagatttttaggactaaaacctggagattcccaggcaaactaagatggttggtcactttagttctatgtcaaatttttaagcttaaatgcaaaaactagttttaattacagaaacgtcaattaatcccttttttgtgttgggatgtttcatatgcagtaaacaaacaaacaaacaaacaaaacccgagaagaacaggaactacgtatatgtagtaaacccactcattgtcaaaaattcttagagaaacaatacatttggtatgaaagttaacaatgatcacaatagtcacaaaattttaagctacagtcatcaccctctaagagcttggtggtggttgttttaaaatcataatttcagttcagaaattggaaagaactctgactaccggtactctattaatatttcaattagagagagacatattttcaactttgaaaaattgcagttttaagaggcatatgataattttcttttcaaaatacagatgttcttctaaagattattcaaatacgactgtcttctgaagtttcatctttcttttttttcctcatttatcacatagatcagtacaattaggctaacaccaatgataatgttccttcaaaccaaagctaaagaacctcaaggggctggtaggggaatccagaggggtttgtagtgtctcaacacagccaatcgaggggcaagaactctttacatcaacaataagaccttgctctcctgggaactcttgggctcttgtctccaattccgttctccttcaaaaattccaaggtcttctaccacaccttaataaataactattaagtgcttttttactaactaataaattcaggatcccaggactgggtgagctcattaggagtaattcagatggatttgagctctttaagcaagaagcaagtaagagatttggttatgctggttcattgattcctcttcgtccaatgatgcaaaaatgcgtgtttcctcttcatccatcccaatgacaaggagcttttaagtgtcagttaacaagacagtcccgaaacccctttgcagagttaaaaaagggtaatttctaaaatttggaccaattaccaattcaggcaattcagcaaatttctaataattacaccacatttcagactctttcataattgtcatgctcatttttcctcttctgtccacagcaagccccatcctctcacccaaattccttcccccatccctgacacacatttcttcctaatgataatgctcttctctctgtctggaaccaaatgcatgcagtggtcaagtagaaatgggaaaagctgcctttctcactcttgccttggggaagagggaaattagtttaaataaatgatatgctaatttgaaaagaaatgaatcgaacagtggagagacagagtccatttcctccactggagcagctagtgcctttgagatattctgtcacatgcggaatcattatcccacctgtctgaattgatgtcttgttttagtcttcaatacctgcctaataatgcctagagcttacatctgtcgttgaatgcttactatatactaagcactgtcctaagcattttacatgtttactcccacttaaccatcacaatcctttgggataagtactgatattaaccctactttagagccaaggaaattaagccttaaagagataaagtgacttgccattagggacacagctcataaattgcagggctgggacctaagcagtgttggcctggtttcaaaattcacaccttggtccctgactcacaccattctcatgaagtctcttccaaaacctggaggctgttctagatctggcctcccaagagcaactctcaccatcattaattgctccgactgctcctccaagacctacctctgtaaagctcctccttgaagggcacaacctcatctctcttccactcccaggaaggcaggctggaaacctaatagagactccctaagaaacctgcattctatctttccctgaccattcaatttccgtacttccaccagagcccaacttctatcagacaaactccatgctatctgcatgctaactccatggataatctgcatgaaaaggggggaaagagacaaaatcatgttacaaaacttgggcaagggtctagactcaacttgctttgaaagatcttaaatcttcccattcatttgtagacagcagtgggcctttttcttcctctgctctgcacgaccttctagcccaagtgctagtatcaccttttcctaaagacttttaagacaaactgtgaccatttatgtctacatgacacagtttcaggataacaaagtgtgaagacacacaaagacgtcaaacatttatcagagacctacgcgaaacgccaataaatgttacagggatcaagaatatggttactgacattgaatgtatcctgtggctttgaagaatccaaaggatgattctcgaataatgtatccttccaaattctccagaagttctaagtttagacatcataatgaaatgtcaccacgttcctctgccagaagttgttcagtactgaggggctaatgatgctttcgcttaaagccgattcccccaataaagggtgccaaggcttttctgaagccctgcttccggctggcgactttgaagctgagacgcaggttcacgcgcagtttccgaagacctattccgtccccaccctcctccccttcctcggagacacctccacttaacactgccttctcagtccctcgccgcctgtttaaacacaacttccgcccctcacaaatcagaaagctgtaatttcaaagtttcagaaacgttttcggaaagcctcctccaatgggaagcgacttcgccgctgagttaagcgtccgaatcctccttcccgcggcagggacaccggcccgggccaggtctgcggaggacgcccccgggcgcgcacacacagcccgaggacgcgccctgtattttaagacgcagggtcggatttcaccccgaaacttggctcccacagccccaggccgaactgtgtctggttctcagcccccgagcccgagttctacgccgcaaagagatggggccccattgtgcctagctggcctcctagcacggacgtgtattttcttttgctaaaaaccggcagtgcgcttcgcctccctgcccagccgcagcctgccgtcccctagacaaaaagcggcgaccgcggcccggccacccgagccccgccgcgctgcgcctttgttgggcggtccacagatggtgcccagcacggggccgcgccgagggcgggggcgggaggccgcgaagagggtcgggcgggaggggaggagacggcggagcagccaatccgcgcgcggcccatcagctgaccgcctttgcttacaccaggtgcacgccggctgcggggagcacaaagcggggcgcaccgcgggcgccggcaacgagccggtgaacgaggcgaggcccgtgcgcccgcggctgcaagcgcccgcctggcggggagaggggccgrcggcgtcagcccgggcggcggcatccctaggcgcctggggcgccttcctccggacctggccgctcgctgccccgccctctgcaccccacttctccgaccctccttcccagtcctgcctccccctgccctggcctctgagagccgactgagcccagccccgtgcagcagcggttgcctgtgtcgccgcctagtctccggtcttggtgctctsccgggggtgccccaaggagccagtgcgcgctgcgggctgggaaggaggcgccgctcagctagtcctcctcctcctcctcgtctttctcctcctcctgctgctgctgccgccgccgccgccgtgggtgccgggtccgcgcgcaccccaacacccccaccagctgggcctcggggtaagtccctggccggccgcgccgcggcaggaggtgtgggaggcagcgaggggaagtcgaggcaaacttggtggcgtgggagaccctacggggtctggggaacctcagggtaagatcgcgggcctgagggggacgagggggcgcggctcacggagctggggaaaatgacgaagtcgggaaacgagaatatagtgccccgtttccccccgtcccccttgccaaaaaaaaaaaaaaaaaggtgtgggagagcgatagttgggaaggcaggccagatagaaacaggcaaaaaaaggcagtgaccggagccgagcctgctggatttcaggggccgaccaggggagggaggtgcccggggacggggagggaggagggctgccgggatgtgaaccggggaaggcagctggggctggagagcagcgcggaaagggggcccagggagctggaaagmgggccaagaggagggcaaggaaggtggcgggckacggggagaggaaagaaaaagggtgtcttggcggtggccttggtaagagaaaggggcaaggggtataattgacaaggcactgaaagtattgaagtcagagccttgggaaggatctaccgaactctcggcggtccacgcggggacagacctcagcccgtgagccttgagctccacgcggggacagacctcagcccgtgagccttgagctccacgcggggacrgacctcagcccgtgagccttgagctccacgcggggacagacctcagcccgtgagccttgagcccagaaggagtggcagcctcaggacgtttgccaggtggcctggaatgtgaggraagcctcagccccgccaggaacagagctggcgctgagttcccggctcggcccgggtcagaagcgaggaaagtttgccggcgagtgtcctttgtgctgcgtggagaggggtgtgggcggccgccgactcggcgcttccccgccgcccgcccagggagtccctgcctggcaagctggggctcggggaaaagtccagcagcgagagggccgcgtgtcccgggacggttccaggggagcccgcgcggaaacgcggaccaggcgcttcggcccggatgcyggatccaggagaaggggacctcgcttgccgtgtccaccgccgcggccccrgcgccaagaacagagcctggccgtgagtgaacgactggccggggtacaaatggttytgaagcacttgaagctcacaggcaaaggctaagagtctaaatcccatcccgccgtaagtattttcattcccaaacctaaatcgtaaaggaaaagtggaattctaattgggtgagggaacaggtgctgccgactctggcttttgcgtggaggattttctaaaagacaacatgttttgttttgtcttgccatgacaatctaaatcatgttagtggaataggctcattatttcatttttaaaagctagggctggaggagtggaaagttcaggaaggcactttgatcagtataaatctagagtaaaagtgttattggctccagggccatatgtgtcccgaagtctctgatttgcatgcaaatgtgagcggatcctggcagatgtctggcctcatccattcacatgaaggaatttgaaaagacaaggagtcttcagttaacaatagaccttaagaaaagagaataaagacgcagtgtgagtttttctgtttgggaattccatggtttgctgacacctttattcaggagccaaattctttaagtgctattgtattgaaagctcaaagtgctgcttgctctttacctggctgtatatattcgtgcaatattcaagctggatattctaagctagttaggaaaaggtttgtgtgaagcagacagtaactttaacccacttctggcggcttgaagtgatttctgaattgacccctcaacttttcgagttttcttttaataatttgactcttgctcaaatttggtcctcatcttcagagctattcattatagtagaagatcgttgtcgttgaccgacatgaagatttcctgagaatgtccactgtctagctgagaatgtccactgtctagccaaagtcatttcggttcttaaggcaccaaactgtagaactgcaggtgatgcaactgtcccaaccctagttacccgagtggttttcaggtcacataacagtgaacggggaggtagtcgtgcagtagactctggagcaagggcctttctgccgtgtctaacattagctgcgtgaccacactgcactgttcacctcttggcrttgtgcgacagctgaacaaaaggcaggcagtgtgggccgcacgtgaggcaggcgattatattaatacctacgactaaccagccccagtggcctcttcttttgtcaacctcaaacactgttgaagggaaaaagaacctattcacggaacagcatttgccccagtattctatatattcactgaaagggacattaaaatacaacacccccccaacccccgccagaaaaaaaagacaacattgttttggagggctcagtgtttcgggggaggggtggacaacagatgttagtctgctattttacatgttcctttaagttatttttgcaggttcagtgccttttatacataaggcaawattttcacaggatggggaaaaatgaattgaatcaaatttaagtaagaaaatgttatagccaagtttgcattttgtgtcttagagctatatagaagtcagaaagtaacaaatcattctaataaactcttaatttgactctwcacgcctgatgtcttcctgatagagttgaagggtaacttaaaataaacttgacatttctagactataaaccattttgttgtaaagttatctagatatttttgaaacctggtaagttaaaaatgaccctcacwtttgtgaaaccttatctttggcaattaacctgcctgtgtaatcgttattctgcaagtctaatgaaaggacagattagaactcattccttggtaaataaaactgataaagtgtttaattattagaaaaggawcattctgctaaataaaagatctcaagaccagatccaactgcagactgtgtttctaaaamataacctcagctagctctggttaatgtctgaaattctgggaaagcaaggaaaaactcaaccattgatctctctctggttagtctgtgctaaggccaccttcttgatctaaactgctagagccattaccacatattctaaagcagtgacactcatgggaatatactaggtactaaagaaaatcggtctctacggagttatattgctacttcccaagccagtggaatataaataataatgataaataatcagaatggtgggctttttataccaccataagtaggccataagtcataaataaaatatggtaaattataggatgcagatgccagttttacgagacttgcacaatgcttacttaaaattyatttttaagttacaaaataatagttccccgaatgattcatttcagcactaatgtcaggttattcaaatattgtatttaattttaaaaaattatgctgaacatctrttttgggttaagccaatctggagataaagcaaattccattgtagaatcatatgatcatttagaatcatatgtttctgggaacaatgaaagtatctttaactcatgaatagagctctgattaatatttaattcaggatgaaattatatggrtgaagtcagaaaaacatttattctctcttgttttggctcaaagtacagaatagagataaaagttaaaccctatctgtaaaattcaatactttagtgaccaagggatccatttgttctaaaggtctttttaggtgaagtttgctttttaatttcttgttttagcatatattagcattcacctgctttacagatctgttacagaatgtagcctcccgagttctgaaacatagataaatgcatgataaatggtttattgacattgcattataatccatgataaaatgataaatgtttccagactttatgggcaccctgtagaactgttaagcatattatccaataattaaaatacataccattttatgttacagttttttaaaagaaacaatatgcaagctttactactatttatattttctactttttgaatgttttcaaagctctaggcaaatgtcgggagttaytaacaattttatcagttgattggttggttagcaagctattatccagtcgtagctggatgatcttggatcagttgcttaaccccataccaaccttcaattttgtcatgtataacataatcgagttgggagaataamgctggaaggactaactgccataatcagtgagattactaaaaggtttatgtaagccatgcctccagtaccacaattaacatcaacatttaacttatatggaaccattgtacctaatgaactgaggatcattcctgagatgcggagaatctaggggtgaacttggaataatacattcccaaggtcctgtccactctgactttagagtaccctctaaagatgctgctgtatcagcttaagacacttagttttaaaatctatggagtgaaaactgcttttagagtggcttattgccttccatttatactctttattgctcagaggttagagtgttatttgaaagctccgattaatataaatgagttgtaattttccaacccaggctgtcctagctcacatctattataccactggcagacatgtggactccacagctgtcccctcatttgtgtatgaaacagacacactggtggcattttttggttaccatagttacattaacaatgtacatgtgacatgacatccttctatgtgaaaggtttctgtggcagatattttgtagamctgggagtaaaggaaaactatttaaagtttggggaacacataaattagtctgccattgtattccggagccaccatttcaatccagggaagagagccatcctacagtggtgtccaggaaaggacaatcttggaaacaaagattttcaagggaggcatttccagcaatgcctaacctcttcaggagagtgtccatttaatattcatttcaaaatatttgctcttcctatttgtgactgccctttgtgagataatgtattagcatagtcattttcaatttgyagggggacagtgggcagcaccaatattagcacctatctcagtaagacctaggaaacaaaaaaggagtttgcactattaagcagtgagccacagaaagaatcatcctttagaaaaactaaaaaagctttaaaagagagaaaggtggcttaattggtttcatgcctataattttcccctctagaaagaaaaatgttagcatggcaataaagaatatcattaacctgcrttgttatttcacartagtgataagtcttagtttgcatccataataatcagtgtaatcaagtactgtacagagaatcaggaaggcgcaggctcaattcccagcaatgacactaatgactcaatgtctgaccttctggatgtcctgcaaccatcccggtgcttcatggctctatcagagttgtgcgttaaaggatccaggaacactggtagatgatttcartatcaccagtgcgaataatttgatttctgccccaagagctagaattatatggagagctaatggtctgggtacagcccctaccyttctgcaaggtgatgtttctggtccctaatcccatagctaagagattttgttgttctttttaaaattttctctccctagcattgacagtttctcaccacctcacctgggccygcttgaggggaaaaattttaccaggggtacaggaagccatttacaatcattaaacatttgttcacctcacaagtatatattgagcacctgctgtatgccaggcattacagaaggcagtaaaactgaaataagttagcttgatttttctgcagcttgtacattggagcattttgtttccatcaacctatgcattctcctacaagtatttattgagtgctctgtaggaaaaaggcactctgcacagaggatttcaaccaagggtgatttttgcctctgaggggacattaggcaatatttggagccttctttttgtcatctgctgtcacaagtgagggtgggatgagggtgttataccggcatctaatgggatgctgctcarcatcctaaaatgcayagcacwggaagccccacgacgragaattatctggtccaaatgtcagtagtcgcaaggatcctgcctctgccctcagtgagcttcagtctagtcggggttacagaaaggagactgacaagtgcagcatagcgtgctatgatggtgggagtgcaggctacacaagtacagaagcagcagccttaactcagatgtcagctgccagcagaggctttaagaaacagactggttaattcacagaacargctttcacctgccacacaagtgctcagcaggagacgattttccatctagcctctttgaacataagggggttggatggttgcttgagagagggtagactccttaagtttgtcaagaactttaaactgaagatggagttaattccttgtaggagttggtcagaattcagtgtgtcttgagtaaacgggagaggaggctggaaacagagagaaagtcgatagcaatagacataggacagcacaagctgcatgaagagaagatgcagctgagttgacaaagctgtcactgcctcatattttagagctttaaactttgccaaatccttaaatatttatctcatttgacctataacatcctgagaaaccaaatgtgattgttctttctccttttccccagtaactgagggacaagagtcatggagaggttcaytgtgactgtggacaagtcactcgatgaagtttatctgtaaaaggagaggtcttgtgaggctcctcttcccagcacaagttgaatttgtctagggtcacccatctagggggagactggaggtgggataagacctgagactcctgtctctctcagacctagtgtcttccactcagatggtagcagcttcctagaccgtggagtcctaayaggtaacaagctgacggtgactcagcatgctagctcttgggttaccgaagaaagcaaggacctacgatgcatcggttaaaaagtatcatgcagagaaacttaagctgggtttcccctatacctaaggattaaccacgccccctacctaatggcttatcttaagctgaccttagccacttaaaaaaagacttgtgacaatctgggaagaaaggttcataggagagtgcagctagagttagaaaacgagatagaaaatgggacaacccagaacatgtgggaagaatggactgcctagaatagatgttatagtggtatcattttctgttttcrttgatttttgttttttctttgataggagcgttttaactttcstatcagagaataatgaccagtgtatacagawatgcacacttacatgcacacacatcacacatatagagcaggggagacagatttcatacaagtttatgtttstttcttgtttgtttagtaagacttgcacrtcagaacgagttttggagagaaccttccctcaaggtcttatttctggtttctctgggataatgagtgtaaggtttcctatgagaagtaagactgagaagccacatgactactcaaggttcttttcattctctgtggtttccaggatcaggagtgagagttaggtaggacttcaaccatatcctgagagtttccmggacacatgtggaatctacatgaactcatcagaccatcagagaaccataaggacagtggagtagcaatgactggctttctccaggttgttattcyagctgactgtggttctgtgcagtgaggactacatgtaaggcctaaccccccaaaggaccagttagctttgctgtgttccacagggacacagccagcctcctcacgtactcagaaactcatcctttctcatggggaggccatgtgaaaaatgtaggtcacttcaaagccatctgaaggcaaaacacaaaawatgtgggcaaaggctggtgggatatgtttctcttcatgcattcattcacactgtcaaattggagtcctggtgaacaagttcccaaatggcttcactaccaggattgagcactggagcggagattagttctatgcaaatgagatgctttagtgatcgagaggaaaatattacatagagctcccaaattctatccccagagcccmtttttcctaacgtagcatacagtagtagcagtagaataatgatactctacactgtgcctttccaatgtgttgggacccatcaccaacaccttatgtgcattaactcctttaatccttgcaacaactctgtaatgtagacacccactttatagctcaggaaactaaggcagaccgcaactaagtaccttgcccaaggtcaaacaactagtgtgtatgtaataaatatttgtcaagtgaatgaatgaatgaatgaatgggtacacatctgttttagaggagagagtcctttayttgaattctcagtttatggcattcctgctttccaggcagrgcattttcaagaactgcctctgtgacttgtgaatgataggggaagagctggtcggtggagaagcaggggttgaacktgggtctgtctgactctaaacctgtactgttaaagtgcttggctatatttcttcctctttaattgcagctataaaacaagaggactggactacgttagctctcttagcccattccactcaaaaagttacataattccatattaaagtctatgtaaaataaatcactttttttwwattttactacttttaattttgaaatctagtttggtatttttatttaaccaatcattgaattatcttttaaaattatattagaattattaacagaacatatttataaaccctctttaaatcattttaaatggatgagaatgcatagttacagattgcattctcctaacccttaccatctcactgcctattaagttatatcatcattgtctaaatttaggtgtctaaaaattgaaaagcatcttttgttacacagggaaaagacaggtaaagtgattaattttgaaaaaattactgccgatatttgcagaaataagtaggttgctgaatctaatgaatagtattgaatgattttttttttctttaagatggagccttgtttctgtcgcccaggctggagtgcaggggcgtgatcttggctcactgcagcctctgcctccggggttcaagcaagtcttgtgcctcagcctcctgtgtagctgggatcacaggtgcctgccaccatgcccagctaatttttgtatttttagtagagacagggtttcaccatgttaaccaggctggtctcggactcctgacctcaagatatccacctgcctcggtctcccaaagtgctgggattacaggcgtgagccactgcccccggccatgaaaagtattgaatgatttttatgagcttcaaactgctagcaatattaaaagctactacttgagattcgcttctaaggattgttttgctttaaggtatcctcctgacatgcaagtgaagcatcagagcaatgtgtcagtcattgccgtagtgttacaggacatgcagcccaaggcaggggaaggagtgggtaacaaggcatgtcctagatttgggaagagttagtttcagaactgcttctcagctctgtgatctagagtgatttcatggaacctcagtatctacatctgcaaaatggggatgataatagagcccgcctcttagaatcactagaatcattcagtgagaacatgcatataaagtccttagcacagttcctcttccaaggtacatacttagtatacagtagcaatgagtagaagtggtatttgtgttcaaatctgacatttctgcctgctacaaagtctgcattctgaggatgctaattctgaggcaagtggagagattttaagggacaagaagactcagactagatattttatgaagtccgtagttgacatggttgtcacctttcgtggtggacccctagagtgctttatgtttgtctagacatgagaaatatggattccactgatgtgctttgaaagaattggcaaacaggtgaatacattagagccttttttgtttgtttccagattctcttctgtatcccactctctcttttctctctgaaaatattataatgcccctaaatggtgattcatggaatcacattttctaaataaagagaataggttaggttcagagatatcattccaccaagaggagctgaatttaagacattgtagcaaacaaacccaaaagcttcacctctctgcctccactgtgatatgaaggttggccatgtaaaactcttagaacaatgctgagcgtgttgtaaatggtccatagacaatgcagctaccattgttactgttaattcttagtatcatcgtcatcatacaatatcatcatcttgtatcttgaccaaaccacaaggcttctggttaggaccagattagaacagtgcagtttaaccacaaatctttctggaagcaagagaaagtcaccaggtatgctgggcatggtggtgcacacctgtagtcccagttacttgggaggctgaggtgggaggatcacctgaacccaggagattcaggctgcagtgattcctgatcacaccactgtactctagcctgagtgacaaagcaagatgttgtctctttaagaaaaggaaagaaagaaaagaaaaagagacagtcaccaggcaagccaaatcaggtgtgatccttagggagatgaacccacagaggccagttgctatgagttggcctccctggcacctcccgtgttttagctagctgattttcacttgcacatgaagggaagagttgagaataccattaacttgattttctttgaattctttgtgaaatggaaatagtaattatttgtggagaacttcattgtcttgtttaatcctcgtcatcagtgcttcccaattgctgtgaccacatttacaggttaattgtagatatccatactcttagctctgggggaaagccagtaccacacagctrgtcacctggctacccttgcaggccaataaatagagttttctaagtgtgctgagaggaacacataccaactctgggagttatgtattatccccattttaaagatgtggaaaaaaaaccctagacaaggatcttgcccagtatcrtacagctagtaagaagtatgcataggaacaatactcttaactctggttttcctccagactgagttagtcacattgtccttgatcttcccacatctccttgtcctcactcaagtctagcatgtgttatctttatttacatcctgtagtaccaccaccaccaagcagcttcgtaagggaaaaggctatgactgagtcttaggtccctggcacctataaaagcatttggcacatggaaaatgtacttagcaaatattcagtcgttgaaagaggaaaggggcttccgtatcatatgtctatttcattttgccatattgctgctttaaaataatttgtacaaagttatttcatctgtattttggtagaaaatgagtagttcataaacctgtattatactcagagatattactatgttactgctttagagagcttattatagaaagttgaactcatttgggaatgctttttgtgatattattgccaaggaagtgttattaatcaaaaagtattcattaaatgcatgtcgaatatcaagtgctattagaaaggtgatatgagggttgaagaaaatgtacatggtgttatttctgtccagatgagcttccagactcattggggaggtagagtgaatagaatcaaatcaaaataattaagtgatcatctgtaggaattctgcaacaaagcagaaaaacaggggctcagaccagacgggtttgaatctcaactttgtcacgtaatagctgtgctcagtattggttaaaagactcaatttattgaccgcaaactcatctgtagaatggaggaataatgtctacccttagggctgctatgagaatgtatgggaaagcacttggtacaattcttagaacatgacagtcattcactgcaatcatttggcagatatctacagccccacttgtgtgcagatctttttctgggagtacagtggtgagcaaaacagatgatgtgtgttcctttcccatgtggagcttgctgtctgatgtgagataaaagcaataatccaattatcacacaagtaaatgtaaaatgatggctgtgttaagtccagtgaagaagaagtacacgaggccaggagaatgtaacataaagccttctaagagaagaccttcctaaagaactgacacttatttaagccaaaatctgaaggtcatgggagagttagccaggcaaagcgtatggagagggaagatctttgtaagccaaagcccagaggtgagaaggactttggtatgcttgatcaacagggagaagaccagtgtggcttagaatagaataaaagggtactttcttttctgcctacttccaaagtgcacttggagttcagagaaggcagaacttgtacaaagttcagcgaaggaagagactgcatcctataccgaagagatatgtcaccatgacagaaggcttgaattggtggagagggaaattgtgtgagtaattctattgagtcttggctggttaggtggcatgtcattgtcttacatgtgtggactggcatatgccaagtcgggcacaccaggaagaaagtttctcctccatttctgtgtggctttgagcatgctgattaacttctctgaatcttggttgtaaaaaaaaaaaaaaaaaaaaagatgtagcaccacragtttgtgaagtttgtgggaatgggaagatataatgcatgtgaacgtggcacatagtgtctagtaagttagcttagcttattttattttctgctcctcataacctttttctccctgtactacactttcctttcattgtagtgaacctctcattatgatacttgctaactgagatcacatcacctgtgttgctcacagatacagattttttatagtagtttggtgatagcsgaaacatttctcttgcttggcatgcaaatgctatcattctcgttcatgaactcattgtgtaaaatgcacttagccacatctggctgctgttcgcatgaacagaggtgactgctggtgagtggacaagatccttcacaagctttagatggtaatttcgtcggtgctctaatgaccataacacttagttgttattgatttgtcctcagtggagagatgtacttttctgcctgatcttaattatggttcataatattagatcatttcaacactgagttagcattttgcccttgtaacaatttgttttagttccatctttgtattgacttataagtaaatttagacactattaccaaatacttatcagaaaaagatagtgggggtagagtgggttatttttcagcaagatgctgagttatcctttattacatgctttatggcagtaaatcttggactcccttgcacccttttattactaacctgcttttctgtgtcccttgagatcttaagtcttctacttactagattatgagaaaaactcccaaatttccctccaaccataacctcacttccaaactccagtcctatatttccaaatgcctgctggatattttcaccctgaaaatcccaacatcaccgaaggagcaagaggaagaggtggtttccaggatgcagagtgaactgtggctgtacaagaggagagagaacgtccttttgcagaggaacgaagcccctgcctattgacccagcagggagggaaccaggaggagaagtactccagcctctcttttcccaccctcttctaatcattcaaatggaaactcaccccactcccaaaatgagctcctgccattgctggcccttatcttgttttgagaactgctatcatcccatcactcaggctcaaccttgaaattatttgtaacacctccctcccctgtctgcacatctagtcaactgcagtatccaatagatgcctctctagttatatttccctagtgtcttttaaatatggcacttcttctttgttcctgtcaacaccacccgaattctagccctcatcgcctctcctttagcttattggaagtgcttcttaaccagtttctccctatctagtgtgcctcctctccattctgacatagagctggtggattcatctttcggaattatagaactgatcccatagttcccctgtaaagaggcattaaatggtccccctggctatagtaatgtgctggatattcttgatgtccctccagttccacccagtacccctttccactttgctgtgtgccccaggaatcagatgtatatgggctgtacccataaatgggtcccttgccatctggcttcttgttgggttctgcatcctgcggtagctcactcagggttgtttgcccatcctttgtgagttgactttaacctcgcccatcccttatgctattgtttgaatgtatgcatccctctaaaatttgtatattggaacttaaaccccaaggtgatggtattaagaagtggggccttttgggaagtgatgaagtaatcagggctctgccctcatgaatggactaatgctcttataaaagagattgaagggagttccttagtctccttttgtccttccatctcctctgccatgtgaggatgtgaggacacagcctcagttttgtctttgcccccttctgccatgtgaagacacagaaagaaggcaccatcttcaaagcagaaagcagtcctcaccagacaccacatctcctggtatattgattttggacttcccagcctccagaactgtgagaaaataaatttatattctttataaattacccagtctcaggtattttaatatagtgacaggaatggagtaagaatcttaaaaatggtccctttttaaaacttttctgtattcattccctttttaatgtaccatctgttttcttctaagtctctgacaaggatgagaaatcagagaaaactccttagtgaagcataaaggccctccatatctaggaaccatcctacyttcctgtcttgatttccatagctactgtggcataaccaaaatcccattcaaaatgaaagcattcctattctgtcccctattccaagtctgctgccctgacgcctttacaccagtgtaaatgtttaacaactggctctccaaaaaggtaagccctcctttttgtgaccaattttaagctaccagtgtgatgtctctgaactcagatttggaaagaaatgctcacaactgactcagaataccactgctttgtgtacagctccccacctcccctgccactgccctcagtgccttacacagaagagttgctcaataaactattctaattcatttctatcattcctgtgggcatttggaatggtacagaaacctacttactagccacatgttgatggtaatatttgtgtacccagaattttttggtgagtgccaacataggtactagctggatttttgagacttgaaaacgctgaagwgaaaataaactaactacttgctcacattttgtgctaagttgctgaagcatagcatactacttaatgttgcttaattctccaataaaataattctcattttctgatcttgttttcaaaccatgtcttcattatcctcaattaaatgtaatttgaagtaataataaaccaccattaaaatgtatttcctcactattataaccatttgaatattctatagtttatgtccccttaaatcaaaaactctacagaaatttttaaggtacatgttcatcctagacatatatgattgcactgcaatttactctaaaatttattttattaagaaataaccctttcttagtctttctaagagataactttaattttgcttcatataaaaaatttctatattgaaagttcaaaatgcaactacaatttctattagaaaaataggaggtaagccaataaagatgatcttatcatagcattggattcttttgtattttaatggttatgaaggacaatatggatattcaactaaaattattctttttacttttaataatgaacmtattagttgaagagctattatagaatgcactatgatttataatgcattttaatgttctcagctgttcctttgcaccatatgattacacaagcctagactgtgtaattaaggaccatccactaatgtgcactggtggatttatggtttccaggtcatcgatgatctgagcactttgagtattggaccattagtttcaaatgcatactaagataggggaacacattggcatcaaggaaaatctacaataagaaactctttcaaattcagggatgtaactttcacctgattttaatttaccaaaacaattaaaaaacctgattaacagaaatcctaattaactagatcccctccaccctcagtccacttttagaagaaaagggaagattggaagaaaataatttaaccagggctttcaattaagaaaaaaaaatattccaatatgagttcattattagggccttgaagaaaactatgtcttagtaaaaaatatataaccacccttattaaaggcaaaaatataggtattacaatttgaaactataaaagctttctaggaaaccttcagtcaaacagaaaattaaatttgcacattccctgagcctaatgctctagttaaccaaggtttcgctctacaagttagctttcttctacgtgtctaaaagaaggctgcaatgtactcttggggtccaataagacaattaaggcaggtggtatcacagaaaggccctgtgcaacgaacttgactttaacttcagctggttcacttatagctgcgggaattgtgacattacttgaattagtcatgatttgccagagaaagagaatgaataggatgggtgattgattgattgattgataagatagataagatacgatagagagatttattacrggaattagcctacgtgattatggaggccgagaagccccaccacctgccatctataagctggaaaactgatgttctgtcccagtgttgtaagaatgtaagtaaagcacctttcacagtttctgttttgtattctgctccccatccctgtctttggccacttccttaaagactcactgtggcccccaagctttcagaggaaaggtttcaacaagcaggcacacctctacttcattttcttgyggcgattaaaaatgtctagttctttaagtccttattagaaatagtcataaaaaatagtttagaaaaggaatttgaaatcaagtttattttaagagttcaggggcagatggcgttactttgcttctttaaaaaaagatggcattcaatgtggttgagttctatcaagtcaaaggacaagtactgtctcattcacccaaacactgctgtctttamccttgactagcgggaacttctatgttaaatgtatgcacacttctgtacatctgccttcaaattttaaaggaacattttaatgtggaagggatatgttcttgacattttcttagtctaaagtttaaacagcacttcgtcttctaattaggaagccctaagcagtcaggctctttagagaaatatcactagatcagagctaaaggctcccgtcttaaggacattggatgttagttttttttttttttaaataaaaatgttgttaaaatgtcagataattagtacagattactactggtttaaaaaatataacaaaagacagcgcagagctctagatgagcagagaaaaatgcaataaatgttctgaaatgaatgtgaaaatgttagccattttcttgatgaggagaattatcctcaccattacaaactaaacttaattcagtctgggagaaaagcaaatctgatgtagtctaatggaattgcttgacttgatcagcatccaaaaatctatggctcagtattagccgcctacatgttggcactttcagtgcccacagtgacgagtctattttttcactggtgtatgtgtagtgttgaatgtacaatccggaaccattgtagcaaccagttccttatgcaacacttactaacagggcatggcgaaatctgtccgaagtgagaatacccagtgctatactgtgaaagacttaaacagaagtaatgcaactgggccttccaggcatattaagcctgccaaagtaaagatttggcatttaacatttaatcatgcagctaattacaaagcaattatttcatatagacatattacagggagagaattaaaataatctgtaaaagactaaaattaattgatttcatggtagtttttaataactacacttgctggtgctgaaaaggagcaataaaaacagcccagttgttggttgatgttttgttctgtgctgggccttctgtcagtttctcaattcaataatgttaaattgccactttcatgattccagctatgcaaatagtctatttcttaaaaagaaaaaaacaactttcttgatcttacaagtgatttaaacagaaaaaaatttttcccgtcgtcctactttctttgcctgtcatagaatcttgggtttaaaagggctgtgaaagactaaaggctcgagattcttcaaactgtatctggtgtgtgactttcaaaacatgggaggaaaatgattttggcacagagctaaggtatttcttgaataattataagtttagcctgctgggtcctagaagaagttataaagatcatagagcttaccacagcttttaaagttaaggaacaggtacctctrtctccctatctgtaggatatacaggcaacagtagaaagcaaactcttttcataatcagttgtgtgtagtaagagtacaatggggagaagtagggtaaggaaagtcaggactctaagtatttgataaaataagcattcatataaaaataatttagatggcagttaatacacwtattaattaactactttactttwwtttttttgagacaagagtctcactctttcacccagactagaaggcagtggggtgatcacagctcacttgcagccttgaactcctggcagtcctcctgcttcagcctcctaagtaggtaggactataggcacacaccgccatgcctggctaatttttgtattttttgtagggatgggatctcgctatgttagcaggctggtcttgaactcctgggctcaagcaagcctcctgcctcagcttcccaaagcactggaattacaggtgtgagccaatgtgctcagcccaatattaactactttaaaatcttacacttctttagtttactagggctgccgtggcaatgtaccacaaactaggtggcttaaaacaacagaaatttattatttcacagttctgtaggctagaagtccaagatgaaagcatcaaggtgtcaacagggccatgctccctctgaaacctgtaagagaataagtccttgcctcttagcttctgggggtttgctggcaaactttggcattcctttgtttacagctgtggaactccagtctctgccttcattgtcacatggtgtttttgctgtgtgtccctgtcttcacatcattttccctcgtctttaaaggacaccagtcatattggattaggggcctagcctatagcctactccagtagtctactcctcatctaaacgaattgtatctgcaatgaccctgtttccaaaaaagggccacattctgaggtccttgggattgggacttcaacatctctttttttgaatccacaatccgtaactaacaagcattttgacccagatcatgggatacactgatggtaaatggtgtaggcattttgtgcatattaactcatttcatctttttgacaaccacatgaggaaaggatgctgacactactctcaaaggaagacacagagactagaaaagtatcatgtgtggagctggattttaatctcaaatctgttgactccgaagcctatgctcattctcgtattctaaagagctgccttcccagggatcctgttttcccattctcttttgttgttgttgttgttgttggaaaatctagagataatttcctgagttctcaaaaaccatgtctacctttctcacaataatattaatttgccctgctagtttttagaattacttttacttcatatgttctgtaattacattgtccaagaatgtgatctagaaatgacatatatttttaataggaagtaactaaaatgcctaaagtacaaaacacctaaaaggcatatttgtgcattcaacagtcattttcgagtacctgctctagggctagcattctactaggccctgtctagcaaatttgccatcaaaagctcttaatttctaaaaagtttcattcagccttttctttagggaatatggtgggagtcatggcctttcatacagggctgaacattttttgtttaagttattttctatgtaaaccgctcttcatttattcaaatacaataaataaggagagcaatggtgtactctgatacttgaaaagaggagatctattctgatggaaacctttgcttgcttccatcctaagggtttaggtaaaagaattcttatgtatttccttctggattcaaattacatgaactttaygagtccatacacctgtttcagacaggctttgttctcgcaggtatagcgagagaaatgcaataaatgaagaaaggtctaaatatactttgtgatgtactctggttgttgtttcattgaacacttgcaggctagtcactgtgttaagtgcagtacctaccaggatgaataaaacataaccttggacttcaagagtttgagtcacctctgagaacactctgatgagtgactggaagaatgaaacagtgtggcttagagcaaagccatggctacctctgtctttgcagttaccaggccccagctgacatgcctgctggatcctctgagcctgtgagtggtggcaggtcagagccagactaaggctggaatctttttaaacgtggtctgcatgacaggactctggtgctttaaaaaatatacagatattcccagaccccatcccagacttactgaatcaaaatctccatgaggcatgagaatgtgcattcccttaaaacgatctccagattcatgaacaactaagtttggagatatagggctgtgcatgcctagtgtggtggccactggttacatctggctatttaaatgtaattccagtcaattgaaataaaatgtgaaacctccatttctcattcccaccagctacgtttcacttgctcagtagccactcaggagctaccatgctaggcagtgcagactgaatatttctgaagttgcattagatagtgctaatagagcaaacacaaattagtaactctcattcctccctcccaaagatccacctatctctttactcctcccttttgacatgtaccttttctttttttttgagtaacttgtgtacttgtcttatacactccccttaagattagaagctgtttaagggcagggtctggtcttcctggccctgtgacacagcaaacactgaatgtatttttaattaaatcagtgtgaytcaatttgcaccattttattggatctcttttgcmtttcarctgacactagatttcatcagagtctagagaaaaggatggatcacagaacaggtttgtctcaatcacaaacagtaggatggatttttgctaaattgcaaggttttcttaagcacaaaatgtagaaaagacccaccagagctgtgagtatttgcaagcctaaacctattgtcatatttgggtacctagaaagcacatttgaattgattcagctagctgtttgatttatctattgagtgcccactatgtagatgccagactcattgcctcaccctggaatgactcagagtgaacaagacagaaacgggttcctcactccatgagatgcacactctcatatggcatattgaaatattggcaaggagtctccctgcccagacggattgggatagaaaagcgatgcgatttgggttctggcatcagatgcctggattcacatagaacctcaaccactctgctgtactagttccaagaccttgggtagttcattttatttttctgagtctccattccatcacccataaaaataggaacatgatggcattcacctcatagcgttgcaagcattccatgaaataatttatgtaaatgattcaatgcagtgcatgttgcataataagagcttaataagaactaactgctgttactcttacaactactactcagccaaaactaccctgcaattaacattaagatgtaaaaaattaggtgtctgcaaggttagaaaataactcattatttggaaagggtgttttctgtctttcttgagctagcagtttaattcctgtagcttactatttacatccttgcatcctaaatcactgagatggatatataaatgttttggtagatgcctatctcttgttttattttttatgtttctttggtgaaggatttaacttgtttgaaacacttctttccagacaattaagaatagggaaatgcttcaggtgtcattcaacctatcttggtgtagagagatcacaaagaattctttaaagaggcttaccattaaactgcaaaactgaaatcctaataactagaatgcaaatatttaattagcatttctcattaaaataaatgtgtgactttttttcttaccttcaaaaatgacatggcctttgaaaatacatactggaaatgagctgggaagagaagggttggattttgaaggcagccacttgatactggggagtttgcaagttgagccttcctgagtccttcccattctttcatcggggggagaagaagactttgctgtgcacctgtatataatagtgaaattaatttcaaatccaggacctgctttattcttacctcagattccatgaaacctgctttaaactttttctaatattctagaaatctactctatccttacccaagggatagaggatatttctgtggcacccaagctrttcagtgaacagatgaactgtcccagggtcttcactgtgattggaggggctcaagtcatttgggaaaaatcggtgttggcttcaagagctataaatgctcccaggyagccagactatactattgatacttcattcatttgattcaaaattgggggtttttgggatgactgtgtgtcctgtgggaggtggtacttagagcatgggctttgaaaccaagacgatttcatttgattccttccttcatcactttctagatgtgtaccttgagcaggtatatctctatgcatctatttcctcagtgtaaaaaggggacaatcatagtacctagctcctggggatgttgtttaaaaaaaaaaagaagaagaagaaggttaggttaaaagaagaaaagttccagataattttcaggagattgttttcaggacataaattaattttcttatcggaagagtagatattaacttaggttttcagcacctgactctaattgtcttaagttgacgccaaaggaaatttgttgaaatcctgctatgatccactgctcaagacatgttatctcatttaatcttcagaacatccaaatgaggtaggtataactatgcccatcaaaaagagggggaaaccagggcttagagrggtggagtcatttgtcccaggtggcataggtagtaccaggatatggacccagctctgtctgcctcttgagactgtgcctttctttttaatttttttttaaagctaaacacagtttctcttaaaaatctgggagcaagtgttttgctcccaatcaagaagtgctgcttaatgggtacctttaagagcagaaacctgaacaaagcatcaaatactcaatacctggagctggagccctagtttcagcccagcctcatcatttagaggtaggaaagatggctaacatgcactgagctggagtcaagaccagaggtaaggactcaggtcccctaactcttggtccagtgctccagcccctgtaccgtgctgcttctcaaactacctgagagtcagataggactcagaaccagacagcattcaggcatgggccctatgtccatgacttactagctcacttgagacaaatgagttgacatcattgtaaagaatagagatgatcataccatatacacgtaagtcactcagtgtagtggttagtacatagtcttttattaaagtgagtttactagtagagttagttacattcatattattcatgagggctttcctatcttgaatgtccaactccaactcctaattattttaaaaatctatgcacttctttcacttgaatttctatgccctcatagactttacaggcacatgttctatcaccaattaagagaaatttaacttacacattttacaacttatacatgcaatttggctgwgcttatacagcacagatcaacattacaatcaatttactgccatgttaaaaaaraaatcagtgaacattgttcggctgacctgactaattttttgaaataagttggccatcagtgtaattgattgagctatctgtacaacccccaacctacctaagcaaaggtcaaaatggaggttattraagaaaaccagccactgaactatccctaaattgagtgatgttttcctgtgctactgataaatgattcattgatggagcactaaagactaatgtcattcaaagaactgtagaccctgccctcgtggcaaagaatatgaatttaaccttagacaaagcaaagcaatgtgggattgtctatctagagtgcaggacagggtgcttggagagtggagcttggcctccaaatatgtgacctcacctctctgaggtgtcctctgcaaaatgagaggttattgtagatgtgtcctgtgatctgtaaggccgtctctacctttcacagtttgcgcatctgtatatttcacagggaggctagcctgcttgcttttgatcagttgaagtcaaatcagactctgaggtcgacgttattccctagggctctttcatagacacccttcccgtctgtcccaagacaccttcctgggtttggattcatgccagctggcactgggcttttggcttttcatttttcttttgctttttacattttctgttgtaattcttaagtccatccagtccagcctaccctgcttcccatgcctggccaaccctcctgaaagggctaaagtgccatccatgcccagttcctcttaggagctgaatgaattgtgaccccagcttttatgctcgacttggagaccagctgcgcctttgggcttttcccagagatgttggatgagactgcacctgcagtgtgatggatttgcccttgcctgaaagaggaaggaaaatgagggagaatcaaaagatcacttgtatccatccccttctttgtacactagtacatttatatcaccagagaatttttgtctcgatgaattaatagtaataacatacaagaaaaaggagaaaaggaaaagaaaattagggggaggacaatctaattttctctgggagccagtaaaaccaccccagaaatttaacatggtcagattaggaaacactgaatttgggagcaaggcactcgagtttcattttgttcccctgacaattaactgggtcaatttggatcacctaggggatctctaaggtcctgactaccttttaaagtaggtcttctgaaagaaaggagtgtaaaatgaatttttggaaatgtaatgcttcttaaagcactaaagaagttttcttctgagcagagagtcacaccataataaactgagtttataattatagattttcacgtatggagtatttgccaataatatttgaaaatttatatctaatcatctagttatcatatattccctttagctcaccattatagatgctatttttatacttatattcagaggttgcaaactggccatgggccataaagggactctgaaagcaggtaggttctgtttggcctgcacagctaaaacattttgggttgccttttggaattcatgcactctccagccttctacatgactactgcttcttrctgtgttagaatcaactccctacacctacctggccctagaaagcattaagtttgagatctttgtcacaatcaaactccatccctccaaaacaatttaataacacaagaggaagaaaaaagaagggaagaaaggaagagaaagggagggaggaagcattgcctctctgaaaatgattggaagtaaagttttccatgacaccagaggaaagggctgatgacttcctgaggttcctttaggcctgggaagctatgactacttaaggtaagaaaaataaaataggatacaaagttacatgacttgttcaaggtcgtccagaaagtttatgctgaagccaaaattaagaattcctttcttggcgaacatccttgttctgttgcctggcctattgagatgtgtggccgccctgcttggtgatgaataatgtgggcttttaggaacagttccttatgcaaaagagcctcaggaagatccattgtgtccttgcaaggggatacactatattgtttccttaatgcattacggagactattatagctcttcctctcatacgaccctccatctgtgatcacttaacacacactacagagtgttggctttggataatgtgtgaaccaggaacataattttggaaaatggttggagaaagaaatctaagagtcagaaagggtcaggtgccagaaaaaagtctaagaaactaatgtttttaaaaagagtctgtgcagattcagcgttcagatcgtatgtgcaaggccctctttccttcccaagaggaataaaatacatcctcaatacaaaatttactgtaatttctctctttgacccccctgtactggctagctacattatttaaggtacagaacttgtactggatcataccacaaaaggcattctctactgatttcaacgatctatgccttactttcatcttcaacacccatgaaaaagactcagattcaatacgagacatcaatcctgtaaataatagtagctaacatctactcggggcttgccatgtgcyaggccctctgccaaaggctttacatttaacagttcattctaattctctcacagtccttataaagcaggttttataatctccattttcttaaagaggaaactgagacttagaaagtttcaataacttacccaaggtcacagagctgaatttgaaaccaagtctgtctctccagaagccgcattcttaactttatgctatactcttgtttcagacatctgaaagcccttgttaagtatcacaatcagcactggggcctgtagctgaaggcagagtggccttcagggacaggaggatccttctgggaggtcagtccacacagtggagtctgggtccatcttgcctcatggagtagctacaggcaatgttggtgttgaggcaatctatttttcttaaactctgtaaggcaagaaggaaatcttggttgaacaaaaatcccatttccccattattcaagccattcctaaaagaaaggaagcaaatttgaatcctgcatttgccatggatctatttggagcctgagaaaaagctaaaagaatgatgttttttgaacattatctacatgatatggatttggccaatccagaaaggatacataaagctcatgccctcagaaggcatttttcttcatttggggatcaaaattttagttctttgctgtgattatactatctatgagatggtgataatttccaggttggaggtttgtgttttataawttgcctggatagggtttcaatttagctttaatacaatatttggtctctggattttattaatttcaatgataatggttgaaaatataatagaaatgacaaataatattgataataactctttaccaagtatctgccatgcccaagggccttaaagagatcattcattactcccaataacaagatgaaaatgaaattcaaaggcaaatctgatagggttccagaggttcaaaaataagtatttgagggctcactatgtgctggatattttcccagtgtgttagggttctcttagagggacagaattatatatatatatatatattatatatatatctcccattagtgtatgtgactattatatatataaaggggagtttattaaaccaatcacaaggtcccacaataggctgtctgcaagctgaagagcaaggagaccagtctgagtcccaagactgaagaacctggggtctgatgttccagggcaggaagcatccagcacgggagaaagatgtaggctaggaggctagacccgtctctctttttcacgtttttctgcctgcctttttttttgctggaaggtgattagatcgtgcccaccagattaagggtgggtctgccttcccactgactcaaatggtaatctcttttggcaacacccacacacacacacctaagattaatactttgtatccctcaatccaatcaagttgacagtattaactatcacaagtccatcccttgttaacttgaacacacatctcctgagatcatacattaccttaaatagagacaataatgaggtcataattacacctaacataactatccttcccacaaccggaaacacactaatccccaacccaaatactgttacataaagttaacaatacttaaatgctgatatgaagtcaataaatcttatgtcacatgataaaggaaaaaaatgaagatattttcttagtacaggtatatacaggcacaaacgtgtttttaacaaggaggaaatactcatgacagttaacagtccttgtttctgcacttgtttctgcagctggtcatgtgatcgtagctggtattgatgactaccttcttgtactacccattctatattccctttgccttcagcaagcacctcagcaggttgtgttttcttttctttctttttttttttttttcctggtggagtgacccaaaccttcattcctgaaaggtctgggccatttgtagtcctttctggattgggctgttgtagttttccattgaccttaatcacaggacattgtaatactaagagatatcctaatggatctcctgtattccatgcatactctcccttacttccatcataaagtagtagactgattccattttgataatctgggtcaatcacaccagccaaaactgtaactcccttcttagcctgttgacttaaaggtagagggagcccaaagtgtccaggtggcaatcttccagtttcatggaatcgttgttatgtctcctggtggcagcgttcctcctcctggaactaagatgtctagggtagcagaatgtaatgtcgtgggaataggaaacaaaaattttgctagtggatcactaggggtgatggtgagtggcgccacttccacctgttgattcctggacccatgaattctagctatgggacaaacattaccatgtattggatgctgattcagagcatacacagccttctggagaactttgctgcagccctgcaaatattgtcacctagttggcattttaattgtgacttcaaaaggccattccactgttctgtcaatccagctgcttcaggatgatggggaccatggtaagaccagtgaattccatgagcatgagcccactgccacacttctttagccgtaaagtgagtgtcttggtcagaggcaatgctgtatggaataccatgatggtggataaggctttccgtgagtccacagatgttagtcttggtaaaagcactgcatgcaggataggcaaactcatatctggagtaagtgtctattccagtgaggacaaacctctgcccttttcatgatggaagaggtccaatataatcaggtagctggctgatcatcccgaggaatggtgctttatcgagggctcagtgttggtctctgctgctggcaaattgggcactcagcagtgtctggagccaggtcagccttggtgagcagaagtccatgttgctgagcccatgtktaacctatatccctgccaccatggccactttgttcatggactctttgagcaacgacaggggtggctggggaaagaggctgagtggtgtccacggaatgggtcatcctatccagttgattattaaaagcctcctctgctgaggtcacccattggtgagcactcacatgggatacaaacatcttcacagtttttgaccactcaggtcaatccacatacytcctccccaaatttctttgtcaccaattttccaatcatgtttcttccaagtccctgaccatccagccaaaccattggctacagcccatgaatcggtatatactcacacatctggccatttctccttccatccaaagtgyacaaccaggtgcactgcttgaagctctgcccactgggaagattaccctccaccgctgtcctttagggatgtcctaaaaaggggctgtagtgctgcagctgtccattttcaggtggtgtctgcatattgtgcagaaccatctgtgaaccaggccctagtcttctcttcctctgtcaactgatcatagggaactccccatgaggccatcagggcaggctgggggagagaaggcagggtggcctgagtggagaccatgggcatttgagccacttccttatgtaacttacttgtgccttcaggacctgcttgagcccgatcatgtatatamcacttccatttgatgatggaatgctgctgtgcatgacccactttatggctagatgggtcagaaagcacccagtttatgatagttcaggttgcatggtagcttggtgacccatggtcaaaygttcagtttccaccaaagcctagtaacaggccaagagctgtctctcaaaaggagagtagttatctgcagaagatggcagggccttgctccaaaatcctagaggcctccactgtgattcatctatgggggcctgccaaaggctccaaacagcatccctrtctgccactgacacctcaagcaccattgggtctcctgggtcatatggcccaagtggcagagcactttgcacagcagccagggcttgttgyagagcctgcttctgttctggaccccactcaaaactggcagcctctcagktcacttgataaatgggccggagtaacacaccccaacgaggaatgtgttgcctccaagatccaaataggcccactaggcattctgcctctttcttggttgtaggaggggccaaatacagcaacttatccttcaccttaggagtatctcaccaggccccacaccactggacccctaaaaattttactgagggggaagattcctgaattttagtcagatttatttctcatcctctggcacgcaaatgtctcaccaataagtccattgtgtttgctacttcttgctcagtggatccaatcagcatactgtcatcaacgtaatggaccattgtgatattttgcggaagcaaaaatgattaaggtctctctgaataagactatgacacaaagctggagagctgatatacccctggggtaggacagtaaaggtatattgctgtccttgccagctgatggcaaattgcttctgatgggccttatggacagaaatggagaaaaaggcatttgccatgtcaatggctgcataccaggtaccaggagacgtgttaatttgctcaagcaatgaaaccacatctgctgcaattggagtcacgacttagttaagctcatgataatctgctgtcattctccaagatgcatctgtcttctgcacaggccaaatgggagagttgaatggggttgtggtaggaatcactacccctccgtctttcaagtccttggtggtggcactaatctctgcaattgctccaggatgcaatattgtttttgatttactatttttctaggtagaggcagctctaatgccttccatttggcctttctcaccataatagccttccagtcagggagaaaatgtgggggttctgccagctgccaagtatgtctatgccaattatgcattctggcattggggaaatgaccacagcatgagtcaggggacccactgtaagttggacctgagctaaaactccatgaattacctgacctgcataagcccctgctttaactggaggaccacaatgatgttttgggtctcctgggatcaacatcagctcagagccagagtccagtagtccccaaaatgtctgatcatttccctttccccagtgcagttaccctggtaaaatgctggaggtctcctaggggaaggatggaagaaagattcactgcataaattgttggtaatgtagtggggtttttccttaaagggacccagcctccccttcattcaagtggttctggttccataaactggctccagtctggaaattgagcggtcatgattctctgtttttataattcaaattagtattttgtccatgtgacctagaagttttctgtttgtgtaatttaagtaggaatgcagtaggcttcctatcaatttcacttctaggaacaccgtgattaattagccaatggcagagctctacatgagtcagattattctgattgctgctttgcctctgctgtccattacagtagctatgcccactttgcctttgacagttgagtgctgccacttggcccctgccaccttgggatccaattcttcccactgtatttaaattttgtagttgagtgactgctgttcccaccgttagatctgacatacagagaagagcaattacagggctcttcagagatgcaggtgctgccctcacaaatctattttgcagggcattggtcaaggctatatcttctgggccctcccaactgggatgagtgggtctaaagtgactaatccactccaccatctcaatctccctaggcctttggatcccttcctctacattaaaccaagggagatcaggcatttccagcttgctcactgtgggccatcttttaatccatacttcagctaaccaagcaaataaactattagaatcttttcaacttcctgagctgcaacattaaatgcagagttcctacttagtcggcccaaatcaataagttcagcctgatccagctctgtattccttccaccattatcccatacccttaatatccattcccaaacctgttctccagattgctctttatataattagagaattcaaacagttcttttctagtgtagtgcagctcctcgtgggtcacactctcaacctcacctccaggggcccatcgggattttagttataggtctagaagcaaacaggggtattaggggtggctccggaggagaatcaacattattttgcctggcaactgcctcaggagagaggccatcactgttgcctcaggcagcgcagggtttgtctcctcagacaaaggcrgaaaggcctatggcagcatgtgttggggaggggatgttgccactactggggatggggaagctgtttcttctggcaaaaaaggtgcatcagagtttacaaacrtagtgtccycagcttcatcagggtgctcccacacatccccattccaagttgcagggttgcattcttttccaatcagtgccctcactttaacagtagacacttggtgaggctgtgcatgcacctttcattgcaggtcacccactcgcatgataagagtttgtgtctgtttttccacartttcagctctttctgtacagaagacaagactctcactcagggcaatcttagcagatttgaggctcggtatctgcttctgaagccaggagacagaatccctgagtccatcattttccatcattttctttcatcactttgtccactgaacttaggagcaaccaaccagcttcattgtgttcctcggttctccacatatggtcaaaggcattatgtatagagtcactgaactccttgcctcttacaagcagtgaatcaggagtgtcaaatgcatttattttgcataagtctctaaatagtttacaacaacgactatcagtgttctccatactattagaagtacagtccttagcatttttgggtctaatcatattaagcagccaactccagaaaccccaaaaccaatgaaagaactccatcctttaatattctgttcctttagaaccactcctggtaccaaaatctgtattagcgttctcttagagggacagaacaggatatatatatatatatatatatatatatgatatatatattattatacatattatatatcatattttatatacattatatatataatatatgtaaaggagagtttattaagtattaacatgcatgatcacaaggtcccacaataggctatctgccagctgaggagcaaggagaaccagtctgagtcctaaaactgaagaacttggagtctgatgttcgagggcaggaagcatccagcacaggagaaagatgtaggctgggaggctaggcccatctcttcttttcatgtttttctgcctgctttatattcactagaagctgattagattgtccccaccagattaagggtggatctgccttccccagcccactgactcaaatgttaatttcttttggcaacaccctcacagacacaaccggggttaatgctttgtatccctcaatccagtcaagttgacactgggtattaaccatcatacccaggccctaggctgaatatttttacataagtacttttttgttatcataatttacatgtatgaaccatatatacttagccttaagtttagctatggaaactgaggcacagagaatttaagtacagatgcttctcagcttatgatagggttacgtcctgatacacccatcttaagttgaaaatatcattatgtttaaaatgcatttaatacacctaacctaccaaacatcatagcctaccttgaatattgtcagaacatttacattagttttattgggcaaaatcatctaccataaagtctgtttgctaataaagtgttgaatttctcatgtaattgaacactgcagtgacagtgaaaaataggatgctatcatataggtactcacagtatggtttctactaagtgtgtactgctttcacacctttgtaaagtcaaaaaattgtaagttgaactatcgtcagttggggaaggtctacagcttgcacaaagtgacacatctagtaagtggagaagcataattcgaatacagaacacttgattcctccagggtagaattctttctccaaccccagagctgcctgatttttttttttttttttttgcagtaacagaaatacaaataactagcttgttactgtgagtatatatttctttttgcccaacttcataagaagttaatgcatataaatcatagagctaagtcccaccgaataatgtcattctgttaaactaatatcctatctgacacaatgctatggggaaagtgagagtctccgccaagtgcagtgatggtgatgatcatgcagttcatttccttcagaattttatactcagaacagagtgtcccaaacatatcgtgttggaaaaaaaaaaagaagcatcaaatgtaatgtataattgtttgtgggactcttgaaatgcatcccgtgccaattctgggccttaaagccatgttttgttaattaaaggattgtttctttaaactgccagacttctttgtggaacatcaccctggtaattagcaggacattttcttcttacatttgatagatctagtcagtcagccctagaagaaagcaatttcacttaaaaaaaaaaatctattccagccatttcttatttgttgcagaatttaagataattaatttgtatatgttataaaagttggcctgaattattatggcttcgctttttttgtggtaaaaacacttaacattaaatttaccatctctcaattttaagtgtacagttcagttgtgttaagtatattcacattattgtgtaacagatctctagaactttgtcatcttgcaaaactaaaactttattcctattaaacactaattccctctacctccaagcccttggcaaccacctttctactttctgtttctatgattttggctactttatatgaatggaatcacgtactattcacgctattgtgaatggcttatttcataatgtcctcaagattcatccgtgttgtagcatatgacaggacttcctttttaaagctggakagtattccattgtatgtacacaccacattttcgtgtgtgtgtgtttgtgtgtgtgtatgtagtagtggtttttactgattggcacaagatcacggcctgtgcttccaatacccttccctcctatgcagctcaaatggaaggaaactgattaacacataggaagcaatagcatgcttacaggtttaaactcctttcgtttttacaaaaaggagtgggatatggggggtggtacaattttaggggtagtagcaaaactctccctagactacagtgggtgggcctgtctgtcccctgttgctggtaccacataagaaggttcatcagtaaaggaaaaaagggttacatgtggttggcctgctattaagaggggaagataggatggtatctgctgtgtacctgtgttgggccaaacctgggactggaccagtgcccctttcttcttggcccacctacacaacccagctgtactgtctcctgcacccatgggaaggaggtgtgaaggaagctgagaacatccgccttgagaagatgaaacaggaaacctcactttcctttcactttctctggactaaattccactcccctcagctctggaaagcactgcaaaagtcttccttaggagtgctgtgaagacgctggggaagatgccrgcccaggcaggtggccctgagtgkgcaaaaagaaaaacttgactttccatgcagtatcaagcaaggttactttgtaaacaaacaaaactggaaaataagactacatactaagtccttgagagcatttggattgggggcaagggctttattactccttcccccccccattttataaccccacaccaagtgtcaagagctttaaggaccacaaccaaccccaccttcccttcaagcaccattccttgggttcctcagttttgttgagctcatttggggttattcctgccaccctcttaaaaaatgactcagcctgctggttggtccattttctaccctttctacaattatgaaacacactctctaaataggagatacataagccctcactctatagtccaaggaactaggtgatataatgccaggaaggctaaattgtttgctttcctgggtaatcctgatgtgaatggacagcagcagggttctggtgggatcagagcagtctagtttgagccaccgcaccacatttttttttctttttttttaattaattttaatttttttttttaaagctccagggtacctgtgcaggatgtgcaggtttgttacatgggtaaacgtgtgccatggtggtttgctgcacctatcaacccatcacctatgtattaagcccaacatgcattagctgtttttcctaatgctctccctcccctcaccccaccacccaacaagccctgtgtgtgtcgttcccctccctgtgtgtccatgtgttctcatttttcagctcccacttataagtgagaacatgtggtgtttggttttctgttcctgcgttagtttgctgaggataatggctgccagcttcatccatgtccttgcaaaggacatgatcttgtttctttttataactcagaaataagacsacccatctacaaccatctgatctttgacaaacctaacaaaaacaagcaatggggaarggattccctatttaataaatggtcctgggagaactgactactcatatgcagaaaattgaaactggaccccttccttacaccttataaaaaaactaactcaagatagattaaagacttaaatgtaaaacacaaaactataaaaaccctagaagaaaatcaaggcaataccattcaaaacataagcacaggcaaaatcaccaaaagcaattgcagcaaaagcaaaaattgacaaatgggatctaattaaaccacattttccttatccattcatttgtcaatggacatttgggctgcctctccctcttggctattgtgaataataataggtgcaatgaacgtgggtgtacaaatatctctttaagattccgctttaattcttttggatatgtaccctgaactgggacataatygtatggtgattatattttcaattttttgagaaatcactatattgttttccataatggttgcaccattttacattctctacaacagtgaacaagggtkacaatttctctacatcctttccaatgcctgttattttctgttgtgatagtgtccatcctaatgagtatgaggtgatatttcattgtgctttttatttgcatttctcttatgattagtgatatggagcattttttcatatgcttgtgggtcatttgyatgtctttggagaattgtctatttaagcccttcacccattttttaataaggttattttgttgtaggagtttataatatattctggatattaaccctttatcatatatataatttaaaaatattgtctcccattctgtaggtcatctttttttgctgttgattatctcctttgatgcacagaccttaagtttgaaatcatctcatttgtcttctgttgttgttgtcgttgcctgtgtttttggtgtcatatctaagaaaccattgccaaataccctgaagctttttccttatgttttcttctaggagttttataggtttaggtcttatggttaggtctttaatgcattttgagttaatttttgtatatggcataaggtaagagtacaacctcattcttttcatgtagatatccagttttcctcacacaatttgttgaagaaactgtcctttattgtatagtcttggcacccttgtcaaagatcataaagagcatgtatagaaggctttatttctggactctgttccattggtctgtatgtctgcctttatgtcagtaccacaccatcttgattactgttgccttacagtatgtattgaaatcaagaagtgtgaagtctccaacattgttctttttcaggattactttggcaatttaaaatctcttgatcttatatgaattttagatttttttcctgtagaaattaccattgagattttgatagagatggcattgattctgtagattgttttgggtgttatagacagtatgacaatattaaattttccagtctataaacatgggatgtttcatcattgtgtttatatcatctttgatttattttggttatctcttaacaattttcattgtacaagtcttttgcctcctcagttcgattcattcctaagcattgtattctttctgatacttttgtaaatggggttgtttccttaatttccttttcagattagtcattgttagtttatggaaatataactcatttgtgtgttgattttgtatcctgcaaatttgctaacatcatttattagttttagtgggttttttgtgggatctttaggattttctgtatatatgagattatgtaatctgggaacagataattttacttcttttccatttgaatgccttttatttatttttcttgtctaattgctgtgactagagtttctagtactgtgttgaatagaaatggcaagaataggcatcctttccttgttcccattcttagaggagaaactttcagttttttgctattaagaatcattttaactgtggacttttcatatgtgacttttattatgtgtaggtactttccttccattcttcatttgttgagtgtttttatcatgaaaaagtgttgaattttgtcagatggttttgtgcatcaattgagatgatcatgtgtttttacttcttcattctgttaatgtggcatattatactgatagtttttcacatatggaaccttccttgcattcctggtataaatccaacttgttcatggtatataatctttttaatatgagaagttttgcatcagtatgcattagggatattggtctgtagttttcttgttgtgataatggatttacatttaaacactattggcgagtagctcctgagaaatgccatacattgtaaacatctaaaatggcttaaggactctataataaagttgttctatgtataatgtcacattaaaaaagtttggtgaaatttgctaaagagaattcagaattaaatacaaatagaaatatcttaaacatctccttttttattaaggatgtttaattccttgctgccaaaggaatgtcttctaggatgtggagaggaaattcttatacatacattcttatagaatgtaggagaaaaaaatgtcttcctctgtgcttgatctgatttctaacattctgagtttccatggttgattggttggttagttgcttgaaaaaggtatgtgtgtatgtcaaagaaaaatttgaacatttcaacacagttatctcaaatcatataatttaaactaaaatgggggcattagctataataatgttgaacctatagccccataaaggctatttctcaatactaacagactgttttggaagtctctcacacaactttaatacatattttacttcttggtacatttccttacattcaatagaaacataaaaattagttgaggctgggtgcggtggctcacacctgtaatcccagcactttgggaggccgaagtggacggataacgaagtcaggagatccagaccatcctggctaatgtggcaaaaccttgtctctactgaaaatacaattaggtgtggtggcacgtgcctgtagtcccagctactcacaaggctaaggcaggagaattgcttaaacccgggaggcagaggttgcagtgagccgagatcgcaccactgcactccagcctgggcgacagagcgagactttgtctcaaaaaaaaaaaaaaaaaattagttgaaattctgtctcagttatgaaaggtagctttattcttttggttttctattttgagttatgactgagaaataacctgtggcagaggttttcttaacaatgtattgtggccagtgcacctgtttcaagattactctaaacagaaacaagagtgaaataaatttgtggagttaataataaaaatgttattctctgtggtatgttttcttttcttttgtttttttaagacagggtcttgctctgttgcccaggctggagtgcagtggcgccatcttggctcactgcaacctctgcctcccaggttcaagcgattctcctgcctcaggcccctgagtagctgggattacaggcacgtaccaccacgcctagctaatttttrtatttttagtagagacagggtttcaccatgttggtcatgttggtctcgaactcctgacctcatgatctgccccctgccagcctcccacagtgctgggattacaggcgtgagccaccgcgcccggcctgtattttttcatttcatagaatttccagataaaagtcagagtcaactagttttataatactgaaaagttttgcaaatacaagcatgtcacttaatgatggggatgtgttctgagaaatgtgtcattaggtgattccgtcattgtgcaaatgtcatagagtatacttacataaacctaggtggtatgtagcctatatgatatatgtggcttatatgatataccctattgctcctaggctgcaaacctgtatagcatgttactatcctgaagtcaatgggcaattgtaacacaatggcaagtatttgtgtattgaaacataagggtatagtaaaaatatggtactattaatacaactgtatgggactaccattgtatatgcggtccatcattggccaaactttctttatggtggcacaagactacataataaatggtaaagtaaccagacttggagatggggaggagggagaagaatgccaaatgtatgtttcctcccacagactagcaggcatctagtatcaggcaacacacttatacaatcatttcctactcctttctcacacttgccagaatctggatttaattttttttttttattgttagaccagtaatgcagttttcatattttgtataacaaaaaagttgtaggacttttccttcttactgtgaaaatatgactcattaaatacataacttttagtattggccatttgtattcttatactcttagtcacaaagataactacgttttacaaagtcgaaaggttaataatagcagctagcatgaattcagagcttgctatgtattgagcactgggtttaaacacatatgctctattttattaagtccttatagtaggaaagtgaagaatacactagtcactgaagttccttcagtgctcaagactcaagtgcactatagcaagacaaacaccaggaaacatgtaactctgcttcgaatactttagcaagtgaatggcccagtttgggaaagcaagacaaacactggatccataatggctttttacacctgattggaatgcagaaaaaatggaaccactaactactaatattatctttgccagcaggtgagcagtacatacctgacttcagaggattttattgaaaccaatagatgatggttaataaaaacaaatatcctcagctttccttcttttacttgtcatctgacaaccactatttagctaaaactaaaatggattagagatacaagatgatgaataacaattattaacttttgtgagcatataatgtgagtcagctactacactaagaactttacatagattcccttaattttctcaataatcctatgagaactgtccttgtatgagcaaccccattttatagctgaagatacttgaggcttcaagaggttatataaacatgttcatggtcaacagttattaagcagtgagtgacattctcacgagattaatgagatcatctgtgtgagatacaaatacatctattgtgtatgtttgtgtttttaatggagaccaatggtatgacagaatgaagtccttttatcagtcagtcaagatctgatgtggctattcaaatataggcaaaactgatgttttccttttttagttaagttaaatgtamtatttaaataactgtgaatatttagaatattcacagaattgtgcaaccatcaccacaatctttagaatattttcatcatctcaaaaagatactttgtagcctttagcacccttcccactgtrcccccmcccatacccctggccataggcaactactaaattactttctgtccctgcaggttgtcctattctggatactttgtatatgtggaatcataaaataggtgatcttttatgactggcatctttcaagcatgtttttgatattttcatccatgttgtaggatattaaattaactttttgcataggaataactgagctagaaaagcatkggctgaatatgtctgcagaatgtagcatttagaaaagaaagacttccaggagacaaatgaggtagtaactaaaatgtaaataactaaaaattagctttgagtctttaataaactacctttcatgttttgctttcactaggaatgaacttttaattttttggagctataaatacatgtagtttctaaagacatctttgtttttaaagaaaagacatctgcaggctttttcttagtgttcctattaagtatgtatgagtgtgtgcatttgtgtgtgtgtgtgtgcatgtttagtgactttacatgtgtatacatacaaatgtacacagtcatatatgactagtggtacatggaatctcaatttaattgtaaaagtgaaggagttctaaaactagttttagtatagtaagtgggatatagtaagaatgtcctacaatttaaaagcttatttggttatcttcaatggattttgaatgtattcaatactagatttgcgagtgactatgcctttttagtaaacaaaagaaaggctataatgtagaaagtatatggaataagcataacatctgtcctaatctaattttcaggcacatctccagacttcaatttggctgaaataattcatgccacggacctgtgcacatgcctggaattgagagacacagttaaaagactccaagttgctttctgccttttgaaaactcctgaaaaccatccctytggactctggaattctacacagctcaaccaagactttgcttgaatgtttacattttctgctcgctgtcctacatatcacaatatagtgttcacgttttgttaaaactttggggtgtcaggagttgagcttgctcagcaagccagcatggctaggatgagctttgttatagcagcttgccaattggtgctgggcctactaatgacttcattaaccgagtcttccatacagaatagtgagtgtccacaactttgcgtatgtgaaattcgtccctggtttaccccacagtcaacttacagagaagccaccactgttgattgcaatgacctccgcttaacaaggattcccagtaacctctctagtgacacacaagtgcttctcttacagagcaataacatcgcraagactgtggatgagctgcagcagcttttcaacttgactgaactagatttctcccaaaacaactttactaacattaaggaggtcggkctggcaaacctaacccagctcacaacgctgcatttggaggaaaatcagattacmgagatgactgattactgtctacaagacctcagcaaccttcaagaactctacatcaaccacaaccaaattagcactatttctgctcatgcttttgcaggcttaaaaaatctattaaggctccacctsaactccaacaaattgaaagttattgatagtcgctggtttgattctacacccaacctggaaattctcatgatyggagaaaaccctgtgattggaattctggatatgaacttcaaacccctcgcaaatttgagaagcttagttttggcaggaatgtatctcactgatattcctggaaatgctttggtgggtctggatagccttgagagcctgtctttttatgataacaaactggttaaagtccctcarcttgccctgcaaaaagttccaaatttgaaattcttagacctcaacaaaaaccccattcacaaaatccaagaaggggacttcaaaaatatgcttcggttaaaagaactgggaatcaacaatatgggcgagctcgtttctgtcgaccgctatgccctggataacttgcctgaactcacaaagctggaagccaccaataaccctaaactctcttacatccaccgcttggctttccgaagtgtccctgctctggaaagcttgatgctgaacaacaatgccttgaatgccatttaccaaaagacagtcgaatccctccccaatctgcgtgagatcagtatccatagcaatcccctcaggtgtgactgtgtgatccactggattaactccaacaaaaccaacatccgcttcatggagcccstgtccatgttctgtgccatgccgcccgaatataaagggcaccaggtgaaggaagttttaatccaggattcgagtgaacagtgcctcccaatgatatctcacgacagcttcccaaatcgtttaaacgtggatatcggcacgacggttttcctagactgtcgagccatggctgagccagaacctgaaatttactgggtcactcccattggaaataagataactgtggaaaccctttcagataaatacaagctaagtagcgaaggtaccttggaaatatctaacatacaaattgaagactcargaagatacacatgtgttgcccagaatgtccaaggggcagacactcgggtggcaacaattaargttaaygggacccttctggatggtacccaggtgctaaaaatatacgtcaagcagacagaatcccattccatcttagtgtcctggaaagttaattccaatgtcatgacgtcaaacttaaaatggtcgtctgccaccatgaagattgataaccctcacataacatatactgccagggtcccagtcgatgtccatgaatacaacctaacgcatctgcagccttccacagattaygaagtgtgtctcacagtgtccaatattcatcagcagactcaaaagtcatgygtaaatgtcacaaccaaaaatgccgccttcgcagtggacatctctgatcaagaaaccagtacagcccttgctgcagtaatggggtctatgtttgccgtcattagccttgcgtccattgctgtgtactttgccaaaagatttaagagaaaaaactaccaccactcattaaaaaagtatatgcaaaaaacctcttcaatcccactaaatgagctgtacccaccactcattaacctctgggaaggtgacagcgagaaagacaaagatggttctgcagacmccaagccaacccaggtcgacacatccagaagctattacatgtggtaactcagaggatattttgcttctggtagtaaggagcacaaagacgtttttgctttattctgcaaaagtgaacaagttgaagacttttgtatttttgactttgctagtttgtggcagagtggagaggacgggtggatatttcaaatttttttagtatagcgtatcgcaagggtttgacacggctgccagcgactctaggcttccagtctgtgtttggtttttattcttatcattattatgattgttattatattattattttattttagttgttgtgctaaactcaataatgctgttctaactacagtgctcaataaaatgattaatgacaggatggggttcccctgtgcttttaccagtagcatgaccccttctgaagccatccgtagaaagtactttgtcctccaaaaagctaacatayggttttgaagcagcattgaaacttttgtagcaatctggtctatagacttttaactcaagaagctaaggctagacttgttaccttcgttgaatgatgttagttgactgtactgtaatgttgtatcaactgaattgaatgtttgcctttaaacaatgaattttctttttctttcctttttttttttttgttgtaatagttaaagaggcttagaacaagctaacaggcaatagaaatatgtatatcagattttttaatgtaacaaactacatgttaattgttatcttattctttttatctttagtagacacttttaaaagaaaagacaaktttgttgtgtttaactcaccaacacgtggtgtataatgaagacagaactataataaattagttttgttctgattttttagaacacttgcaataatgtatcatttatagttcttgctagttgcagtggtaatatttttcacatccataaaaacaactaccaaaataaatcagctgtagcatgttgctttttaaagctaggccctaaaaggttttaattctttttctaagggaagaaatgtctattttaattaagatattttaatgaacaggatttctgtattttaaatagtactgactagcacctaatgggcagtgggagggtggttcatatgaagaaaaaaaggtgtattgttgtatcccatgcataaataaaggtaaatatatatatacaccaatatattcatatatactcacacacatcccaacctgtcacacacaatgcgtgtgtatatatatatgaatatattggatatgtcatttctgtaagagttttgttaaaacctgattttcttttgtagtatccacattcttcatcaaagtacaaaaacgtctgtggagtgtcacaaactgtatgacatgttatttctttttaacagttgtctatatgcttagacccgtgttagtctctatatctgtgtggcaatatctgctgagacaagtaaatgattaatagaaaacaaaacaacttccgtacagttsamacttttcatccaaatatatatagacagttttggagaattgtttcaagattatagaggaaacatgtaacatttagagcagatggaactaggtttaggtagaaggccagttccacaaagggcagagggagggatgggatttaataggtaaagaagaacccatttgaaaataaaggttgyttcaaaaggcagctgccgccaggcacacagcattccatcagacaggtgccagacaagcaaaagcaaggaagttggcagaaagaaagtccaggtgatgtaggttgaggtatttctttctttggcagtatcttgsttttgtgaatcactttattaaaaaaaatcactttcttcccattcttaaggggttttggcaaacagaatttyagatcttgaaacaaatgagctgcaacagaaaaataagtacctgagctcgaggtatcccttcccaaagccttcacttattggtgagaaaaacctgggcccagggagggcttgcagcttacccagttcggactcctgccagttcagcgctctgcactccattgattgttctaggcccggcagcctgttaggttcctgtgcagggcccctcttttgcagttctgaataacctctagtgcccctgcttcaaaaatgcagtacatcctcaagttcccatttactcaggatacattttagcacagggcagatcagacggtgtctctactgttagtattgcaaagtatgtatgggaaacacagagaattggagctgcgttgaatgcaaacttgaggtgtttcccttgaggaattcttgtcttcaaacgtctgcagagtaatggaccatgttacaactttcctgttcatctgtgaaccatgaaaatggatggcactgatgcattagaccctcagcagcctgcaattgcaaatctgcgaggtttcattcggcccataaagcaaacatttgaacttacacagaatgagcacttaaatacgggtgcaataaatgaagggaaaaacctcagccgtttctccattctgaagatatagcaagcaccgggaaatctaagatttttcatcaacaatatcttctgccagcccagtttggggggaaaaaccccttttacatttttcttcagtaaagtactggaacttacttttccctgtctgtgctaatgagctgattttcagctgatagaaaacaaaatgatagagtacttttttccttggccaagtattttctcatttgtatttaatttcataaattagacagccagtgaaattagacmtcaaactaggtcctgatggataatgaatgttatgtcacctttaacagtgaagtggttattataggtcactttctaatttcatattttcccttttgctttctgctgccttcagggtatatagtgtatctctaacctgatttttcaaggttatttttggagcagtttcttaaaacaggcattccctaacttgctcatttaattaatgaaaaattgaactgatgccatggatataaaaacaaatgcaatgtttgattgtcagtgtttctgatttggcaaaaaggaatcatctctatttttttgcaaacaatatcaaagtgcatattttctctcatgtggtttctatttattcaatcattcatttgtttgctaaggacgccatagtcaaccctttacttggtgtttgttttctatttctgtattcattttccaaggcattttcttttctttattactgttttcaccattggtggggtagggggaagcattttatatctccaacagtttgctgggaaaaaccacactttttccctttctattcactggaaagggaaatgtaactacttctgaagcattctaagtacaactggaaatgctttcttcacctcagttctttcactctcgccttgcttgcaaatagacttttttattgttattcaaaagggattagcttggaagaaaaaaaaatgtttctttaaagattggtgattcagaatcaccatccggaggtctagaataattttggcctggaatctctgcaggacttgatctaatctggtgtggacagttcccctgccccaacccccacttcccccataagcactgataccagcttctttagtaaaaaggagatgctgagggaactaaggatttttatgtctgctggttcaacattgcccagaacaggtaaacagaactaaatgggtttctcatattaaagaattcctaggagacttgacggcgggagatgacaakgaaggctttctttatgtcttcaaatttatttatcttttcttctttaagaaaccttatatgctgggaatcttgaggtacattccaaaactatacttatatcaggctaaattttaattctaatcttgaactcccccatactattctctgttacacactcctaaaattttgaaatgtatagatttttgtggagaagacaccaaactctttccttagcaggaaaccatggaaagcttttataaaattaatgacaaactcaagtgtttagctccaaagcttaaatgcggaaatgtgaagttcatataaactgagcaatttgcaagggtacctgacatgcctgaaaacacagggaacagccagacaatggctcttgcataattaccaaattgtggagtttgtggatgtgtttatatttaggaaatcatccagtccccctccccagtttatayggatgccgtaagacattaaagtggcattatgcatttgccctcctgacagcccattatgtcagttatatattaaatatgaagcaaatccagtatcatgtacctcatgcaagyagttctggccrcaaagtgcgtcagatcatgcctctcctttccacctgggcctccctgtctccctcccataagattagatggacaaagtaaatttcagcctgggccctgacagagtgatcatgaattyctagtaaggggtgggggtgtcctgaattaataaggtagcattttaatgcatcagtctgcgtattaccacgtctcattcatataaacaagacagtggtcatgaggagaagggaaacaaaccatgtaattggggcagaaaggactacatttttacagctgtgacttaagtggggagaagcatttgttgtgcatctaaccctctgctaggagcttcacagagattacttacattgaatcctttcagttgcccatgtcgtccctatgttagagaatagtgtttactcagcctcacagagccaagcaacttgcctgaaatctcacagctggtaagaaacaactgagacttaactcaggactgactgactaaaaccagtagttttccaactgtataatggtccacaagctaaatctaggtcaggaatagagagcacataactcccaaatattcagcatttgagtcaggaacaatggagaagagggagggtctaatttaagactcaaacctgagatcaatatacggaaatcacaagccaaagaggaaaaagtaaaggacaggtcttcyatggttgtgacaacaaatccctacattgaactggaagaacctgaagctgcaaaagaaaagcaatcagtcaaaatgagagtgggtgggagtaaaagtaggtcccaaatatggccgtattttgagcacttgtgcttcagatgccgtactgagcgcttggcctgtattatcttgtggaatcctcaataactctgtaaagtaggtatattcctgtccccatttttcacatagagaaactgagcctcagttcatcactgataagtgatgaggccaagcagccctggctatcagattccaaggcccaagactaaccatgaatctatsttctaactgaaaaggcactcagagtactgggctggccatctcattggcctgatggatttagttctttcctgagaatgaggaacaaagaaaagggtaggtgtcataatcttgcaagggacctccccacagaaggcttgttcatgtggcatttaataccacagccttagataagaaaggaaatgctaccttgctgcttttcttttttaaccattaaggttagtctcccattttaatcatataccacatcatccagagcaaagtcttgttctgatgctgtaagtaatctcatcttaactttcctatagaccattctgggggctgggggtgctaggaggataaactccctggagaactgttagtgaagagttttatgactaatcctgtatctttgtgatctcaatagcccttaatttaaaaatatattactttcaatcttgtaagaggcagactggtttaagtatctcctgtgctactgatgaaactaggaaaagaaggtgaccatgaatatgaaccaaaatatatgctttcatattattttctcacttatcagagcaccacacacctattaacagtacttgattttaccaaatttttgttctaactagcttaggggggctcccaccatcataagatggttcgtgtttgcaactcatttaaaaatcgcattttttcttctgattataacagtagtatatgtttactatagagaatctagagaaaaatatttattaaaaatagaattcaacaactcaaaaccagatgagattttggtacacttccttctactctcttttttctctgtgtatgtatttatatatgtatatatacatataattataaaaaatatatacctttatgagtatagaattggaatcatggtatatatagctttgtacacttttttctattatgcaaaatgtaagcatctttttatattattaaactatcttggaaaccatggtattaaaggctgtataaccatctatcatatggatattcagtaatggaacaagtccttttggaagcattttgcctcttccacgtcaaacaccagggacataaagatgagcctaccctgcccctgctctccaggatgtagtcacagaggaagatagacatccacgtaaaggaccatccagtatgataactacacggagaagatgaaacagcaggacagcacagggaagaagaaccctggtcagactggggagctcaaatttcagatctcactacttaagctcagaatgaaaagatgagccgagggcttcacaagcaagcatccagagggagggcatcctaggcagcgaacaaattgctgtgatcacaggctttctaaggaagtggaagaagtcttcccggaggacttggggattctggaggccttctgataaaagggaaagggctcctaaaaatacagggtaactacattgggagctgaagtaggagagaaactacagcaagtttttgtgcagaggggagagggagaggctggattgtatgaggagcctatggtccccagatgaagctttattcccagtttgattttttaagccattccacataatcactggggggagtgccttcctggtgagataagagaagctcacaagagcaatttgataaaccttccaagccctggggcctcagtgtggaacctcagctgtggtaatatgtaagacataagcattaaacagatgtgagattgccctaattgcttaagactatcccagtcagtggcttgcacttagtacaggttttctttggtgtctgtggtgtcaagaaaataggaagtgcgtgtttggaaaattgaaactgattatgtggtgtttagaagcacaaatgaatcctcttcagcttgtcctttgcccactaaatacaaatatttctagttcacttgcttagacaaaattctgatcctttttttagtgtaacaaacaaggccttagacttggaatagtaataaagaaccatacttggatacatgtacccccagactcacatattgctcccctccctttgtttccaaaagtaaaacaggtcaaagacattgtagtataacttaatacaaaatacctctgaatctagattttattcctatgggattttccttgggtttttaattggattgattttctgatcatggaaattcctgatagcaaaaagagattgatagaaaaggttattttccccaattctgctcttaacaagtatatgggtggacattatacgtcttgttgttttgatcattaggagatttgtccagggcagattccatcaacacctcctctgaattattggtctctctctggagaaatactcaactgaccatcttacaaaacgcttaatttcaattcatttccccagacttacaagttatagttagcttcccattaactacataaattgagaggagcagtttgtaagcagtgaaaaacactggaccatccaaaagccaatagaggtttgttgaatgaatgaagtcattcacaactttgactttggagtgaatagtaagtttttgctagaagcaaatgcattcatctccctggttatactttgttttgtctggtaatagatttctggactgttgcagagagcaagctggcatttggttgatttaggggaacagattgtatttcttaaattttctttttttttcttccatattgagacctgggaaatttcccttaacttcattccaagtttgtggaaatcatacaacccaggacatcttgcttgggctgagccacttgtaatgatctgggattgcttggatttgtgttcagctccccaaggtgctattctgaacacacaacacaacagcttacattttctgggcacgtagcaactctcagtagatttggtcagatgagtacctattctttatagttcaggggggtacactttcacagttcctcaaactctggaagccttattcaaaagagtacagccatcttwttttttaccccagcaaattttgcactttggagatgaatactgggaattaacacacaatcttcctcttgtagcacaactaccaaaggtcaggttagggagaagtttgggaaagagtaatgacaccagaggaggaagggaaagaaagccacacagccactgtggaaatgtcaaacagtggagatggtgtagtcagaaaatactgcttaggggcagagtggtagacatctctctctccctcaaagctctgtaacatgagatcctggtgggagtggacaaattataactcaaagtttgctgaaagaagagccttttaaactggcctcttargaaacagtctctccttttccctcttctttttcactttctctaagcaaagctgttcagaatttctacaattacttgtaacacctctctcatttggattatcttcttctctgtargcaacatccattctggggagtgaggaaagctcgaagttggatgtagaagagtggaggcaggggtctggactctaargatcctaaagttttctttttaagttgtcctggccagttccccagggcatacggaaaaaaggcatccagaataaaagctctgtccatgcattcttaaaaaaaaaaaatgcatatgataggcttgaccatcccttgattagccatcctgaaggtgaaagaatgatggataaagtctagaatggctagcagtcagagccaaatggctcggtcagttcatttctaaccctagtcctttctcttcctccatgaaaagtattaagctaattaagctacttatcttttctaatttactggcttatacttccacatccctacttcttgttctctgtattgcagttccactagaatgcttttcagaaccttggtcgtaccttctcacattcacatagatctctcactgaaacacctcctcctttttcccctgcttaatcctcactctttccttggagctttttagacaaagccttcgaagcccagattaagttagttttgcctgtcataccttcttatattaggctgttctctccttcttagcaaccgttatggctgctgactttattcaccaccggaagatatttgccttattcactactgcatgcccagggcctacaacagtacatggccccaggtaacttctcaattgttttctcccccgtttctaaataatgagtaaatgtatgcccaacttctgacccaaggactgggcacttaggaaatacaattttaggagcagccctgcaaaatcttttctctcaccccagttttttcctgctattctccctcaccacaatagcatttctacttttccttagagagcacagtccttgtatttatttgctggggctgccataacaaagtaccatagactggatggcttaaacaacaggaatctatttcatcacagtcctcaaggctagaagtccaaggaaaaatgttggcagggttggtctcctctgaggctcttctccttggcttgtagatggctgtcttccccttatgtcttcacatggtcttccttctgtgtgtctctgtgtcctatttcctcttctttttttttttttttttttttgtttttggagatggagtttcactctcgttgcccaggctggagtgcaatggcgcgatctcagctcactgcaacctctgccttctaggttcaagtgattctcctgcctcagcatcccgagtagctgggattacaggtgcccgccaccatgcctggctaatttttgtatttttagtagagacagggtttcaccacgttggccaggctggtctcgaactcctgactcaggtgatctgcctgccttggcctcccaaaatgctgggattacaggcaggaggcaccgcatctggtcctatttcctcttcttataaggacactagtcatattgtattagggtccaccctaatgacctcattttaacttgattttctccaaacagaccctgtctttaaatgtagtcacattctgaggtactggcagttagggactttggggagacaattcaaccacaacaattgggagttctgcttggatgartatgtccaggtagttgactgtcattgtgaatcctgggtagggcatacccttcacaatgacatacaaaacaagttctgcttttctcactcgccaaatgggtgctcccaacccgatatgtctcatcaaggcatattgataaaagtttgaggaacctttatagaccatttagttcaatacccttgttttgcagatggagaaactgaggcccagggaaagagaataatttagccaggcactctcaacccgtgagtggagaagctgaaactagargtaaagcctccctacatttagaaataggaaaacttaagctttcccccaaaattttctcaccctgcattatgaggaaaattgccttaggctaatttcattaagtctgttgaggaggaataatctacggacatatatatttctggctatatatattgcaccttccagcagccaccagtgagtgacagtcttgctgttagctcctataatgtgtagaagttccattccgttttcaccccaacaccctgcctagatcaattgggctgagcaaaaccacaggcagcaatcctcaagcccatttctattcttctggataaaaaagacattttttttttttcaaaatataggggatgtcatctttttcccagccatcttgtgagggaagaagatagcaagacagaaataactccttataatcttttcaaataccaaagcattccacttcccatgcaatcattttgaacctctaacacgagcaaaaactatagctgttatggagaaaagaactcttagtttgaaaagatcgagtactagcatatagaatcccccaaaccactttaaattaatgagtcatacaatatatctgacatgttaccaaatcctccccagacccaaggctcaacagtttttgaaatctcaacacacattttctgaggaattgcagtttggaatgaaactagggcttctggtggagtgatctgtacagtagtcacaggatggtcctttcactgaataaatactttttgagcaactattatgtgttgggcataattacaggtggtyctctttactggttagagtcagcatggtagagcggactgacattacctcatcayagaagcccacgggaaaagaagacacatcccccagacctcacctaagtgggagtccagagagcctccttgatttaagtggctgtggctttcaaaaagtgttaaggaattcaaaaaaaggagagatctcttagaactgtagagggaaaaacagggggaagtatatttttgtggaaggatttagagatgaggtgacactgtggcagggcctcagagaatggggagcatttgaacttgggaaagtcggggaaggaaaagcatgaactaaaggaagtctgaaggaaaatgtcaatkatggggtattgcaacaaaaattagtttagttgctggactagttcaggagggagaagtggtaaaaataacaaacttttattgagcctttacaatgttccagggacaatggtgagcactttatatgaataatttcattaatcttcaaaacaatcctatgagacaggttctcttgtttcctccattttatacatgaggaaacaggaagcttagaaaggttaagcaatttgttcaaggtcacaagaggcagaatcaggtatttaacccagaatcaatgctcatcaccacaacactatcctaggattagattatgaggaaaactgtgctggagtgaaggcctgagactatcttcttcaagtagaagggagccactgaaggactttgaacaatgagaatgacataatcaatgtcattctttaggagggtcaaggtaataatacaatgatcaaggatcaagcrtccaaaatacatgcaagaaagacccccaccaagacttcttacaaaagtttaaaaatataaaataaaagtgcagctttcaagcaccaaggtaatttccctgcttcagctaccattaaagaactgaggcagttaataagagaaagacagtcttcatctttccccacctgtatttcatgaattgcttcaggacgtcaggctatggggcaccagtacagaggaggctagagrgacaaatgaagyaaatccccaatggtggctgttggaaggtgcaacacaaaagtttcttcatctttaaaacctgcatggaagtaaagatcaattacccatagaagtatggggactacctgtgacaaaatgattaatcccagtgggtggccctactgccaccttgctccttttctgcctgcagtggtatgagacccttagctctttggatataaagagatggatataaagtggatgatgcgctttttatagcaatgtaacacaacaaaatgtgacaagatatggagcagaaaaaacagatataaaaattacttcaagggtgcagtgctcactcttgtaatcccagctgcttgggagactgaggcagaggaatacttaagtacaggagtttgataccagcctgggcaacatagcgagctcccatctctaaaaaaattatttttaacttagctgggtgtggttgcatgcacctgtagtcccagctacctagarggctgagacaggaggatcccttaagcccaggagttcaaggctgcagtgagctatgatcatgccactgcactccagcctgagygacagagccagactttgtcacaaaaaaagaaaaaaamaattactttgcaaaaaaaaatctacattctcaattatccatttcactgatactaggtgtacatgctgaagctccttaagaagattgtactgacacatgaagtattcacttttaagcatctcatgccaacttatttatttgttgtctacagttgatatcttaaaaatcacatgcatggcaaattgcctattggctatggaaattcaaatgttcatgagcaattataagcatcttagcaaatgtgctcawattctatcaaaaaagaatagcaaaattgtatcatggattttctaattcattaattaatctcyaaataagtctttattgagctcctaccatttgtcaggggatacaagaaaacaaagcagacttgtttcttgccctctttgaatttatgtttttgaaggacaactagataataagttaaataattagttaatttcagtttrtgataagtactataaaaaataagagtactgagataagaatactttgtgtgagagagagaaggtagcctattccttcccccgcctycccaaccctccctggcccccacccacggctatctacagcacattctagatcatgctattatgaaaagattcagtcccctggtgctggctttgtagcaatagctgactgtactctgatgaggatgctttgytacttaaatatcttcctagcagaggactcacagcagttttcaaatggcatttccattcatcactgcagcactcctgagaggcaacagaggttcaagcctcattacttctatttaagaaagaggaagggcaatgactggagaactaccctctgccaaatattaaggagcaaagcagctgtggggttgatgttgtggctcagctcagatccccctgttgctagctttttacattagaccatttaattctatccttcagtgtaagttgggaactaacatatgcccgaaggttttagaaataaaccaactcaatcccaactcaacaaacagggcatatttgttacgctaagtaaattgttttcaataattattaatatgaagtttatttgcctaaactcataaaatttcctgtgtgagaaaatctagtcaacagaatcacaaactgaataattttgttgactgtttcagctggctttttcttcctttaaaacaacaaacaagtaaccttacaatggaaatttctttcacatgaattcatgaccacatcaagtggaatttgttataaggcagccatcatgagccacattcagaagaacagactcagttatttaaatactcaaagaacatatgagaataataaattaatgttctggaagggttaaagaagaatcacttatatcaagcccttaacattccagacatggtttaaagccaagaaaagtgaaatcacttatcaaaggtctcacaacttttgagmaagactcaaattctgttttctttagtccaaatcctgtgctctggtacaggtattaggaagtctccttaatagtcagtacatccttgggtttcccaattgacatatatagacagagatatcttggcgtaagaattctgagggcacttcacttatctcataatgacacgatccatcatggaggtaagcaagcacaaagacccaatgactcaaaacaccgtacaatttttgtgcttttaaaattttataataattttaaagacattcaggaaaattacaagaataatacaaagaattctcatatactttttacccagatcttccaaatgttaacattttactacgtttgtttcatttttctctctgttctgaactctttaagagcaagttacaaacacgatgtccatttatcgttaaatacctcaatgtgtaattcctaaaacaaagaatgttctcttacatgaccacagtacaatttacaaaatcaggwcaaataatatgaatataatactattatctaatctacagcccttatttggatttatctaattgcctaacgatgttctttatagcaaaakaaaaaatctaagattaagtgtttcacttagtgttcatgtctttttagtttctttcaatctggaatagttcttsagtctttctttgtattttrtgacattgacatttttgaagagggcaggccaagattactgaatgtccctcaatttggttttgtcagatcttttttcaagattagattccagctacacacttttggcagaaatatcacagaagtgatgctgagttcttctcggtgcrtcatatcagaaggcacatgctacagatatatcccatatcccataagccaattaggtcatttggttaaggtggcatatcaggtttctccactataaagttattcttttaccctttgtaattatctcgtgagggaaatgctttgagactatgtaaatatcctgttactcctcaaactttcacctactggttttaagagtcattgaatattcttgtctggattagttattatyatgatgtttgccaaataatgatttgataatttcatcttcctttctatatttattagttggactttgactataagaaagagttttccattttcatttgtttgttttttgtttatctatggactcatggattcttataacactttattcaatacattataatcctttattataattatttattttggttcaccagttgtctcagatttggctattgggagttccttcaagctggcacctgtgtccttttgacctgtccctttgtccatcattatttgagcactcaaagaaattcactcataagaatttatagaagttaggcaactaagctataggaagcagaccctgagaaaaggatccaaatacgagtatttggatttgggaggtaattctgggagccatggggaaggaaatgaggcagtgaaatgggaaagggaaggaaatcaggaaagggtatttattgagcaagtaaccaatatgaacagctagggctaaatttcacttggagaccgtgaaaaccgcagaacatatgcttcagttacacacttaaagaatgaggaaactagaatattcatacattgtggtaagcagaataatgtccaccacccaccaaaagatgtccatgccgtaatctccagaacctgtggatatattaccttacgaggccaaaggaactttgctgacaagattaagttaaggacattgatactgagatggtgagattagattggattagcygggtgggcccaatgtaatcacaagggtccttaaaacagggaggcagaagagtcagagtcagggaaggaaatgtgaccgaggaagcagaggtcagagcaatatggagccacagaccacagaattctagaagctggcaaaggcaagaaggcagattcttccctccagaaggaacacacccctgccagcctgttgagatagcctggcgggacctgtgtccgacttctgacctccagaactataagataataaattggcagagtttgaagccaccacgtgtgtggtagtttgttacagcagcagtaggaaactaatacatatgcccactctcatcagccatttttaaaggaccgtttcggggatgtttattcaccagcacttccactctgcaggctgtgactggaggaagcctcaggcaaagagacacaggtgtagacatctatactcagactggtgtaaattcaacaacataagggcagagcactgactgcctgtactaccagacttcctaatcccctccaaccctstcttctgttacaacaattcagtcatgaaataagcagtgaggagcattaccgaaagaggccaaagcagcacactttgatgtgtctctctgtggatctcacctcaacgtgttactttcttgctgtgggttcttggcaatttgagagatagaggaccttgtctattatgactaaaaaaggccccagagaaagatagaggcttataaaattttggtatcattggtaaaacttagcttcatcatatactctgcaatatttaacatagttaacaactatcacagataagaccaaaggtcagtttacaaacatctacactgcaaacccaagggaaagtgaatttatactagaataatgaaacactataaaaatgttctttaaaaaacttggagaatgttattttatggaattctctatagaakaaaatacaggatgtaagcagtatgtaaggaaacaattcaaggagaaatgaaggacaagatgggtttgaaatatccactaactctcaacctctgatcactaagtcagatgcccagtgtgaatccctgaagttccttttgagcatcctctgcttatccattgtgccttcttctacattttgccttcattttacatgcatggcaggagggaagtataatagtgagatagaataggcgggctactcctttattctaaaggctgtaattcttacagcaaccaatatatgtataaaccattgtacttgtccaaaaatgccaataaattttaataaataaagcatgatcacttccagaaattcctgaaagagaaagtgcatatttgattggaaacttaccactgaatctagtttctgtttttaagtcaattaagttcatgttattgtattagtccattctcacactgctaatgaagacataccagagactgggtaatttataaagtaaagaggttgaattgtctcacagttcagcaaggctggggaggcctcaggaaacttacaatcatgatggacggggaagcaaacacatccttcttcacatggtggcaggaagaagaagaaagagagccaagcaaagggggaaaccccttataaaaccatcagatctcgtgagaactcactcactatcatgaaatagcatgagggaaactcccccatcattcaattaccccccatctggtccctcccagaacacatggggattatgggaactacaattcaagatgagatttgggtggggacacagccaaaccatatcggttattatctacccaacaccagcctgactctacatgggggtttaagaaaagtaaagagcatattgtccgatcatgttattctcctgcttaacaacttgtagttatttcctactctttataggatatagtctatcattctagggatactatattaggcccttcacaatttgacccctgtccacagtcatcagccttatttctcaccattccccaagtggctcccttattcttcctcccatctcattctcataccttcttaccttgtataytctgccctcagccaaaccatcctccttcatgcaccatgctgctgcaaatgcccatccctctgctgggatgccttttgcctcccagctcctgcttggaaacttatttgtacgtacagaagtctgggaggattctgtacacaccttcgttaatgctcatgcctgtaaggatgagttttcaagggactgagataaggatgcytcatgcctgagcycttgagatgcgaacatattcctcttcatacttcagtacctagtacatgtgtggcacatagaaaacattctgacaatgtctgttatatgaaggcaagagtaaatatttcaagagatgtttaaaatctaatttggaaggcaagaggcaccttgatctagtatccaaagtcttagtctgagtgtgagcagatctgccctctaattctggtgctgccacttacctgctgtgtaactttaggcaagtcatttatatgttccaggcctcatcacacttattccaaaattgacyacatagttggaagttaagcactcattagcaaatgtaaaagaacagaaattataacaaactgtctctcagaccatagtgcaatcaaattagagctcagggttaagaaactcactcaaaactgcacaactacatggaaacggaacaacctgcttctgaatgactactgggtaaataatgaaatgaaggcagaaataaagatgttctttgaaaccaatgagaacaaagacacaacataccagaatctctgggacacatttaaagcagtgtgtagagggaaatttatagcactaaatgcccacaagagaaagcaggaaagatctaaaatagacaccctaacatcacaattaaaacaactagaggagcaagaacaaacaccttcaaaagctagcagaaggcaagaaataactaacatcagagcagaactgaaggaaataaagacacaaaaaacccttcaaaacatcaatgaatccaggagctggttttttttaaaagatcaacaaaattgatagactgctagcaagactaatgaagaagaaaagagagaagaatcaaatagatgcaataaaaaatgataaaggggatatcaccaccgatcccacagaaatacagactaccaccagagaatactataagcacctctatgcaaataaactagaaaatctagaagaaatggataaattcctggacacatccaccctcccaagactaaaccaggaagaagttgaatcctgaatagaccgataaaaggctctgaaattgaggcaataattaatagcctaccaactaaaaaaagtctaggaccagagggattcacagccaaattctaccagagataaaaacaggagctagtaccattccttctgaaactattccaatcaacagacaaaggaggaatcctccctaactcattatatgagtccagcatcatcctgataccaaagcctggcagagatacaacaacaaaaaaagagaattgtagaccaacatccctgatgaacatcgatgcaaaaatcctcaataaaatactggcaaactgaatccagcagcacatcaaaaagcttatccaccacgatcaagttagcttcatccctgggatgcaaggctgcttcagcatacgcaaatcaacacatgtaatccatcatataaacagaaccaaagacaaaaaccacatgattatctcaatagatgcagaaaagacctttgacaaaattcaacagccccttatgctaaaaactctcaataaactaggtatcgatgggacatatctcaaaataataagagctatttatgacaaagccacagccaatatcatactgaatgggcaaaaacagtttccctttgaaaactggcacaagaaaaggatgccctctctcaccactcctattcaagatagggttggaagttctggacagggccatcaggcaggagaaagaaataaagggtattcaattaggaaaagagtaagtcaaatggtctctgtttgcagatgacatggttggatatttagaaaaccccatcatctcagcccaaaatctccttaagctgataagcaacttcagcaatgtctcaggatacaaaatcaatgtgcaaaaatcacaagcattcgtacacaccaataacaaacagagagccaaatcatgagtgaactcccattcacaattgcttcaaacagaatagaatacataggaatccaacttacaagggatatgagggacctcttcaaggagaactacaaaccactgctcaatgaaataaaagaggacacaaacaaatggaagaacattccatgctcatgggtaggaagaatcaatattgtgaaaatggccatactgcccaaggtaattcatagattcaatgccattcccatcaagccaccaatgactttcttcacagaattggaaaaaactattttaaagttcatacggaaccaaaaaagagcctgtatagccaagacaatcctaagccaaaagaacaaagctggaggcatcatgctacctgacttcaaactatgctacaaggctacagtaaccaaaacagcatggtactggaaccaaaacagagatatagaccaatggaacagaacagagccctcagaaataacaccacacatctacaaccatctgatctttgacaaacctgacaaaaacaagcaatggggaaaggattccctatttaataaatggtgctgggaaaactggctaggcatatgtagaaagctgaaactggatcccttccttacaccttatacaaaaattaattcaaaacggattaaagacttacatgttagacctaaaaccataagaaccctagaagaaaacctaggcaatatcattcaggacataggcacgggcaaggacttcatgactaaaacaccaaaagcaatggcaacagaagccaaaattgacaaatgggatctaattaaactgaagagcttctgcacagcaaaagaaactaccatcagagtgaacargcaacctacaaaatgggagaaaatttttgcaatctacccatctgacagagggctaatatccagaatcaaaaaaaacttaaacaaatttacaagaaaaaatcaaacaaccccatcaaaaagcaggcaaaggatatgaacagacacttctcaaaagaagacatttgtgcagccaacagacacatgaaaagatgctcatcatcactggccatcaaagaaatgcaaatcaaaaccacaatgagataccatctcacaccagttagaatggcaatcattaaaaagtcaggaaacaacaggtgctggagaggatgtggagaaataggaacacttttacactgttggtgggactgtaaactagttcaaccattacggaagacagtgtggtgatttctcaagggtctagaaccagaaataccatttgacccagcaatcccattactgggtatatacccaaaggattataaatcatgctactataaagacacatgcatacgtatacttattgcagcactattcacaatagcaaatactttgaaccatcccaaatgtccatcagtgatagactggattaagaaaatgtggcacatatacaccatggaatactatgcagccataaaaaaggatgagttcatgtcctttgtaggaacatggatgaagctgggaactatcattctgagcaaactatcacgaggaccataaaaccaaacaccacatgttctcactaatatgtgggaattgaacaatggaaacacttggacacagggaggggaacatcacacaycagggcctgtcatggggtggggggaggggggagggatagcattaggaggaatataattacattatttacctaatgtaaataatgagttaatgggtgcagcacagcaagatgacacatgtatacatatgtaacaaaccagcacattgtgcacatgtaccctagaacttaaagtataataaaatacataaataaataaaatgatagacttggacaaatgatgtctaagctctcttagttccaactttctaaaatcttagcattttaggaaatcttgcagccccaaaacctctagacaccatgaaatcaaatactaaattgtgtaatctagattcctatattggtagttcagaggaagagagaatggatggggaattttgcagaaataaaaagaaaacatcaaatgcggctcttcyatgacctgctaggatctgcttctaccaaatcatggatatagaaataggcccagctgcacaccactctaattatcctgttcttccaattcctcttttatgcattttttttgcccactctctctcraaacacagtagctctgggagttgaaaattaagttttaatgaagagattaaaagaagtaagtttattcctaaagaaataaaattgagagacagcaaataaccgtactgatgtaagaatagatggcagacttctgcactgcacattttcagyaaatcctatttttcacaaaaatgatttgcaaagctggcatcttgaaacacgagagatgcccraaatgagagttctgtatttaaaacccccattttagtagctgcattcttaggattatgggctctggagtcaaactgtctagggtcaaatacaggctctgccagttactaactgagaccttggacaagaatttaacctcatctgcaaagctgagataataatagtaattatccctatgggatactactataaaaatctgaaagaaaatgaatgtaaaataaccaacacagagcctgcttataacctatatatctagccaacatttatcaggcatgttctaattttgaggtactgagctagcctttggagatgcaattataaggaagactcatctttccccataaggaatccatcctttaataatgaaaacacctatgttccctactataatatgatgctatggtcaatacaaatataactgtatatgcagaatgccttggagagggaaagcagagactgaataattcaatgaagacaatgagaaggttcaaaaaggagattattttattactggtcctttaagaaaagcagaatgtcgctgtttggaaatgtaaggatgaaattccagttgacagagcagtacagccaaaggacagagatgtgtaagtaaattgtgtgttcttggacatgcagatagtctggcatgactacagcatggatttcaaggtggggagtgttagaaataaggctgtaaaggtaggcttcctctaagtagtggcaaattgactgattgattcagcaaatatttattgagtacctgagttagatcagagacgtactattatctcaatttacagataccaaaactaacattcaaaagattaaatggtttgctcaagggcataagcaaattctcctttcagcccgcttttttatttcaatttttattttagatgcagggggtacatgtgcagggtacattgtgtgatactgaggtttggggcacgattgatcccatcacccaggtaatgagcacagtacccaataattagtttttccgccattgttacccttcctcaccccctcttatagcagtctctggtgtcttttgttaccatatttatgtccatgtctattcattgtttagctcccacttataaatgaaaacatgtggtatttggttttctgttcctgtgttaatttgcttaggataatggcctccagctgtatccatgttgctgcaaggaacatgattttgttcttttgtatgcctgcatggtattccatggtgtatacataccacaatttctttatcccatttgccatttgtaggcatctagattcattccctgcttttgctattgtgaacagtgctgcaatgaacatatgagtgcatgtatcttttggtagaatgatttatgtttctttaaacatgaaaaaaatgatcaacatcactaatcatggagaaatgcaaatcaaaaccacaatgggatagcatctcacaacagtcagaatggctactatgaaaaagtcaaaaaataacagatattggcgaggctgcagagaaaagggaacacytatagactgatggtgtgtatgtaaattagttcaacaactacggaaagcagtttggagatttctcaactcttgaatagaggacagataatccactaggccagcctgggaagaagtcttgtttgggaaatctaggaggccttcacttttggtgacacctacctgaattacaagtccagtatctgcaaggaaccaaccagttcccaatctaggaatgaatgtactttgcaaagtacattttgctgagtaaagataaacatcacaatctgaatatcactgacaatagcsgaaacttaccagttacatcctacattcaaggcccttagtgtaaattatttcctttaatcctcaccacaatttgataaaatagattaagatgccatgcaattggaaggattgctactattaactctgtcacacagatgagaacatggagaacaaaaatagatttagtgatttgcccaatgtcacactgaaagtggagaaaggtaggttggatataggttttctgattctagaactgaaaactttcaccaatgggccatgttccctctggcatctctgcaatcatgtggcttcacaaccttgagacccaggaatattataagaacacaatttgttctcaactgacaaaaaatcatgagcagtgccaactctgtgtggtgccaacccagctctttcccctgacccagtggggaaaaggtatttatggtagttaggtgaagataaaggcatttaaggaaggaatagggttctaaggcatcctatgcttccttctacttaaagacctttctcctccccccttctataaacaccccaagatctggctttaccccttactactagttcttattacaggcttctacagatccctgtcactccccattattcctggagatcttaggtcctgacttactgctgctttctccagtactactcctgtcatcattcctgatgtgtttaatattgatgtagagaatccttccagttgcatggcatcttaattccttgacttccttcctgtcttccaatgaccttgtcccacacacaatctcagccacttacccgacagtcattctctggacctcatcattcctaacaaccctccatactctcaatttcaaatattccactctggaaagcagatccattgcctcctatgattcttcattcccaaccaggacaagcagtccactattctaaagccattttcctgtcctttaaacctcgtatgtcctcacttctttattacccagcttctatgtcaggtgtgtcattccttgatgtgtatacaacccccacttctttgccctttattgttttcatattctccaaccaaacgctactctaggtaaatccaactttttaccaaccctgaatttatacctgtgtagctgaaatggctggggaaagaaaactacaaccattagaaatgttctgcctttaagttaacgattgtgaaccccaaaagggttatagcagtacccagtaatcctactgcatcccccagtgcattccctctccccgtttcctaagagaggtatttcacgctttctgtttcccctgacatcacaactcctcccattcccttactcccagctaatgaatgccctttctccttatttcatggagaaaatagacacaatcagaagagaaattctgtatgttctcatagccacatctaccctcccacctgcatttgtgtccatatgccctgccttccctcctgttactcctgtttgcttcctggacttgtccttgcttctacctaaattaattccccacaattgtgcagtagatgccatccmctcttgcctacttcaggatatttccctagcaattggtccctctctttcatgcataattaaattttccctctctactgaattatcctcgtcagcattcaagtgtgctgtaatttcttacatctcaacaamaaaaaamaatcttgacccacttttccctctagctaccacctcatttctcagctgccctttaaagcagactctctagtttatcccctcccataaatccacttttgaatcyacttccctgaaactgatcttgaaaaagacaccaatggtttccatgctgctaaactgaatgattttgctttaaaggcctcatcctacttgaaaggtgagcagcatttgacacagttgatcattcccgcctcctggaaacagtttcttcccrtggcatctgggactccacaccctcttgattttccacctgccttacagaacagtctttctcagcccttttgctggtttctccttatctccccaaactcttcgctgtggagtactccaagactcagtccccacacctccacccacacacactccagtctcagggctttgattgtcaccagcacattcatggttgaaatttctacctccagttcacacctctctcctgagttctagtctttaatatgcatctgtaccctcatttctaataagccttttaaggttaacatgtttgaagctgaactcctgatttttccccaaaacgtactctacccccaaacttccccatatctgttaaaggcaaatccaccttcattttgtctgagtctcaaatcttggactcatcctggcctcttcttttcccttcatatcattcatctgctctactggcaaatcccgttggctctaacgttggtgcaaaatcagaatccgacactttcactacctccaatgacacaaacccaatccgtaccaccatcacctctcacttgaaatattggtgaattctcttggctctgccttaaaaatatccagactctgattggtttggatcaattcactatcatctcttgcctggttgactacaagggactcctaaatggtccccttgctcctgcccttgaccctaagctagaatgatccccttaaatgtaagactaagcatggaattccctagctcaaaaccttccagtgatttcccacctcactctgagtgaaagcccatattcttacaactgcctttgaggcctagttgtgctcctatcattgccagctacctctgagacttcacgacctccaattctctcagtcagtcctctactcttactgtgccggtcttcttgccrctgttcaaacacttcacaccctctttcctctgamagcctttgtgcactggttagttcctctgtctatccaatagaactctctatcatgatggaaatattctagatttgtgctgttctagatctgctctagatctgttttaggtacagtagctaccaggcacctgtggcttttgggcacttgaaatacrgccagtgcaactgaggaattgagtttttaattgtatgtgttttatttattttaaatgtaaacagccacatgttgctagtgcataccatattagacaaagcaggtctactgtgctcttccttgagatatctgcrtggctcattccctcacttctttcaggtatctgcttaaatgtcactttaatagtgaggctttcctgatcaaagtacttaaaagagcaagtcaccgccacctggcactcttcatccaccttccctggtttgcttaatttctccatagtaattagaaacataagcatactatatgtttttgtttgctcatttatttgtaatctatatctccaaactaaaattaaaagtccatacaggcaaagattttagtctgtgttgcttttgctgctataccaccagtgcctagaaaaatacctgggacatagagctcaggaattgcttatagattctaaaatctcctttccatcactaamttcttggctggtcttgcacaagtaatggtccatctcttggtttcagcttttttctttctcctaatgtcctctaatattgagccctgtttgtttccttcttagtacttacaacaatttataaattctgtttgtttacttgcttattgcctgtctcctcactgaactgtaaactcccaaatggcagtgactatgttcttcttattaatctaatgtcatcattgctcaataaataaagagtctttctgggatgtgaggcaataaaatctgccacccaawargtgttcacccagtatttaagatttgcattaattatttaatattcaaagtgaagagttttaactatttggaatgtaatcaactagttggattagaggcctactatctaccactgtatcagtgagaaaatgtagttatattaatccatatttggatgcttttttaagatctgtaggatgctactgaataggtgtccaataaggatttgttgaagattgcattaattatttcttcttcaaacatgggtcaacataatggcacagacagcagaaaaggccaactctagagtgccatactcttgtagaattgtgggctctgaggagccctggaggctgggagggtcctcaggaagggttggcattgtgcccacctgtcagatgtgactgggggcctacaatctggcatttttccattttttcactctcctggctggtttttgttgtggtggtgttttgtgatagtggttttgtgaaaaggctcgggagggcatttctgcactgttaatacagccatcttcgtaacacctgccacctgtgttaaacggccaccctgcccagtcccttgccctcattcggcccccatccacagctccaatggggcagttcctattaaaaggcccttcctttctttactacacgaagcattagaactcggcagagacaggacactaaatcagcagtaaacttgtccattcacctttaacatttcaagtccataaagtatcctttactgctagcagagagtggggagttttcctattggcttgacataattttttacagggatttaacattttctaagacatccgctaagctctcaatagatcttccataaaaaagaactgagtyctaagattatcacctttggttagaaacccagtttatcagcatcagtattatcacttgcttaattgtttaaaaaaaatgtacaatcacctcccagtcattttactttaggaaaakttacactgggcctcattttgatatcttccaaagttacctttcttcttcttatgaccttaatacttctagcaagaatcaataattaaacagatatttgtgatgtgttttttttagtgtcaaaatttaactttatacattgctaagttatgtttctaattctgaactgaggctctcactttttatcgttaaacctgtctatcaaaagctcaaaatttcaaggagcctaaattttgtctttgatgctgtactgatgaattgcaatgtaaattttcagagacaacagaaaaggaccatcacttatacatgtccattttcaaagggtaatttctgcagctctccctcttcactctgagagtctgagtgacagtctatgcccttggttaaccaacctcagggatggttgttagcacttccagttatttactgtcactaaagtgaaagccgtctttaaaaaatgtgtccttataaatccagcaggaaatccaagtttcctattggtcctccttctgattcttctctgatttcttattctgaaaaattackgatagtagtgtactaattaagtttttagsagggagacccttaatgatgaattaagatagcatttttgcagtgttgctaagtggctttagtctacaatggactcagtgatcccaaaataaatttaatcttgtctctcactgaaatagttgaaatcttggtgcacaatgtaaatctggaaaaaaagaaaaatacctgtggttccagctacttgggaggctaaagttggaggactgcttgagcccagaaggtcaaggctgcagtgagctatgatcatggcactgccctccgtcctgggtgacagagtgagaccctgtctcaaaaaaacaaaaacaaaaacaaacaaacatagaaagaaagaaaaatagataaattacagaatgtaattaataattaggatcttcttattttcaagggtaataatataaattgaagttctaacagtattgccaggcagagaatggatcaaacctactataatgaaaactcaaaaaccacctgtaattagaaaatgaattttcttatatcacatggaaaaatttgttcttttccaggcaccacaactcatcacaaattccttaaaactcatcacaaattgtggggacaagtgcctaaggttttaccttactttgcattagcttcttggtaggtttcctaactgaatcggctacccaggagacatttcaacccccttagcctgacacagggaaagaacagaaggtggggagaaagaactggggaggcggaactgtcaatgagtaaattcgtatctggcakactacacttatttagcatgtctcttgrgctttttttttagtttatattcatgtaacacatcaggacagggtcaagagagatggtatagtatagtgaaaattaccctggtttcatcaggagaccttgactctagtccctaacaggctctcactgccctgtgactcagtgtcaacatctggctgccatttccctcatctactaaattagagaggttggaaaatctattctctaaaagtctcttttgaccctaacattccatgattcaatgaaatataattactaatgtaaaaatacaagataattcattcaatcaaattatattgcctcaatctaaatgattttgcgtttcaaagttcaaatgtaattacagagaaatgaagaggacagacatgagttgccactgaaagctaacaggcatcacaggcagcagctcgctttctggaaatgcacattgacaattagcaattaacgtcttctggagacaagcaaatgatcaggaagcctcttggcagaagggagtcataaagtttcatcgtaccacttaacagatattttatcatatgataaattaggtacttttccatccactgtaataatatattccctacaataattaaaggtgattccaggcctgatgcactctggctgggtgtgatcctgatcgtttgttcaatcagattttggtaggtttgtgccaaaaagaagaatagaatcatgatctcctcttwtcttttggtgctcagaaacagaaaactgaaccctgcaaaaggaacacatgcttcaattatctgcaaagttsagccgtaggccttgacctcagacagggctggattcaggggatatcacaatgtcagtaagacacagtccttccctcttttggctctcctctgttctgtgttgttttattcccagattccacaagcagcaatgtggctgactgctacaagctctgagtctgcatcttcccaggttcaatttcagtgcaaatgagtacttgttttcctccaaagtcagaacaaaaatcctgagcctcattactactggcctgaattaaatcacatggtcaaatctgaaccaagcactgtggcccaagaatacaataagctgatcagcctggtcctgggtcccatgccagccctggaggtggtggggggagcagaggtcagccaccccaccacacacaccctgccaagtgagagtgagggtttcctcagggagtaaccttagctagaagctgggggatggcagagttataagctacagatctctatttcatgcctgaaataacatgagaccctagagtacagtcatcaacttagaaattatcctaaagatctgagtcccatctctttatgtaaggctgaaaatgcagagtcttgaagaaactgaggcagtgaagcatagtggttaaactcataggctttggaatcagacaacctgggctttgagttctgattctgccactttactagttttgtgtctctgagcaagttactttacagactggaacctggttctactcatctgaaaataggatgagttgtggtacccagctcacaggggtgatgtgaagattgagataatgaatgtatagcacttagcagactacctagcactcagtcaaataaatgacagccattactggtaaagagaggaaaacactggcccaaatgcacatagctggttcatggaaaatctggaactaaaatgggatctcttgacttctggttcaaagctagtagtgaatcaaggtgaaatttaatagcacacaagacagttatatccaaaatatcacagaaaacatcagtcttttttcccaaattgctacctggagcttcatggatcccatttcacagagccrtataattttaacatcaccagaccttctttaaagaagtcaagacaggcctgtcattttactccgctgactatgaccagatgcattcaagaaagacacaattgacctaacaaacacaagttgagacccttgggaagatacggccactggtctcagcagccaagtatttgctaagaactctctgtgaatccaaaattgtgtggaatatgaaaatagaaaatacattctctgcattgaaaggccttactcttgttgggaaatgggtcaagtggatggtagagactaaaagtgttgaaagtgctaaggcagaagggatcgctgtgggaaatgcatggctgactggggcagatgtgattaaggaggacacaattgggaaagggactccaggtaaggagtgcagcattagcaaagactagcaagaagacaagtgggagagtaggaagaggagcacccaggacagaggaaggagaaggaaatcaagccaggcagtacaatggtggctctggattgaggactgaagaggccacacatgagtggatgaaggctcaggcatgcaaaactgtgaaagcaatgactccaagtcactcatctctttaaaacattaattgggtctccagttctttaccttggtccccaagaccttccctgtactgacgccatctcccacttcattcttccttctcctcatgcccacgactctgctcactctttgcaaaacgtgtctgagacactgcagtcttttctcatttccatgttccatttctcatacttaaaatgcatttcctctctcacgtctgcctccatagttctacagactctaatgcccaagtcatgtaaccctatttatgattaatcataccttgaaattgatgatagaaagtacagttaatgaaggccttccattattcactacctcatgtcaggagacttcccagagtccttcacattccaaactagtgatctctccctcctgtgagtcccaygtagtagtagcagcagaaataataataagagtgataataccaccatttaataagcactaagcactttacttatattgtctaatttaatatttataccaacttcatgaacagttctggcattcccatcatgtagataagaaaactgagactcatarggagcaagtaaattgcccaaggtcacaaaactagtaagtagcagagcaaaggttggaactcaaaagctaggttcttaatccattgtactatcagagaaatttgttcctctctaatggtatggattacatattgtctttgatagttgcagtagtcaccatttatccatggggaatatattgcaagacccccagtggatgcctgaaactacggataggacaaaaccctgtatatactatgcattttttcccctgtacatacatacatatgataaagtttaatttataaattaggcacagtacaagatttaccataataactaataataaaatagaacaattagggacaataaaggctacttgaacacacaagcactgtgatactgccatagtcgatctgaccactgagatggccactaagtgactagtggatgtgtggcagctacggcatggatattctgggcaaagggaggattcacgacctgggcaagatggagctggaccgtgtgaaacttcatcatgctactcagaacagtgcacaatgtaaagcttatgaattgtttatttctgaaattctccatttaagatttttggactgtgattgatctttggtaactaaaactgtggaaggtgaaaccaaggataagggagaactgctgtatttatttatgtcttaactccctaagacttcaagctccttggtggtgtagagcatgtgttattcatctgtattaataataaataacatttgtctagcaaattagtaatttacaaacccctttaacacactagtgcatggaattcttactacaatctcgtgaagcaatgttcttgtttccacttcgttcataagaaaatgaaattcaaaggacttaagtgatataatcaaggacctattgctggtaagttgcacaacatccccacctgcatttctcaaccaaaatctgatggttttggagttgcttcataaataccccagctctctcactcttccagggagagagcagggaggtgtgtgttctacgctagttcccggagttctccggtaggaatgagcttcagttacccacagtggtaatttctttaatcgcacagcctttactgactccttctgtttttctcttccccacgtctagactactgtttcctgggatcaccttccaaatcaactacttgtactcaatttctttcctcagagtttgcttccagagaaaccaaaattaagacattcttctaaaagcactgtttctcctaatcggttggatgagtgaggttaaggaggaacctaaataaatcaggaatttttgactatgtgatttccattttaaatttttcaaacaaaagggagagggagctgctataaagagaacagtcatttaatagcctgcagcctgttaaattcattgcaagtccaaacttctgcttaaagggacccaggtatcaaattggcagttgccttggaatctaaaatagaattggttagtatggactagagaaaaatattttgcatttctctggttatttccattacagacagaaatattctgacacttgctcctttgctctgattacagcttaaggcaatttcagaaattcttaaattgaactggaacccccacttataccaagtagcatagctccttctcagtgtctcaaagccttagcatgaaatcaaggatttggatgtggtcaaggggtattaacagaaaaaaatgagaacaattaaatttgaagaaggagtgttcaaggaaacagagataaaaatgcgtgggcataaatgcatgcacagcaacccccaagtccgtagaataactaacgttgttttgagttcacagggcattttcattttttgtccaggaaattgtctgaatccaatggtggcttcattattctcataacatttctgggcctctccccagaggggaaagctgcaacacagaaattttaagtcaagtggcaaagctaggctgatgccttaaggtagatggtttatgaagattacttcaggttttgagaaagcatattcctcaaaatcttggcctaattttctattaatgaatgaggaagtactttcatatctaaaaaggtgctgtataactataaatatttttattttatatggtttgttaaatcatctgtccaggtagagtcctattcttaattggaggtcaggaactggttaggagcrctggttaagatgtcaaagatgggcagggcgtggtggttcacasctgtaatcccagcactttgagaggctgaggcaggcagatcacaaggtcaagagatcaagaccatyctggccaacatggtaaaatcctgtctctacaaaaaatacaaaattagctgggcatggtggcgcacgcctgtagtcccagctacttgggaggctgaggcaagagaatcgcttgaacacaggaggtggaggttgcagtgagccgagatcatgccactgcacttcagcctggcaacagagagagactctgtctcaattaaaaaaaagatgtcaaaagatgaaagatgatggtgactactttggagaagagaaggcttggcacggagctgacaggtggtgttcatctggccctacagctgagccagtgatasaactgagagtaaaaccttcatatcttcaaaaatccctgggatagcctggcaaagagtgagagattttgtaccctgtgactctattaaaattttgaatggtatcagattctaagagatctttattcagaggattatctcaacatgtgatggtttcatttattctcrggatatccctaatgggtaaactatggataaaagacagtacttttcccctccaaggaggaaacagggaagagaaattgcaagaaaactatcatggtcccaagtgggagtgtgaatrgcagagtcatgaaggtcttttttttttttttttttttaactgctgacactccatgtcaccacaagccaaaaattcttaattctggaaaaaaaaacagaaaaagaaggatttgggaatctagaaaagctaatgtcagagaaaaggtaatttttttctcattgtattctttggagagataaaagaagataaagcaaatgtaacttgctcaaataaagggtttattggtctaatctgtgttctgccatgctaggatgggctttgtttatgatgggcatgcccaccatgggcaaagccaagcctgtgttatgggaaatgttgaaggcatactcttgggcacaccttgtattccctcactcaattatcctcagctgaatagkttaacttaaaaatgacctgaagcttttctcatcttaagcaagatactctctgtcttcttccataacttacagagaactgggaagcaggagtcagcacttacataaaataatctaaagaaatgcatctaaaggctactgtcattaagaggaagccctaacagagttcaaacatttcactcaaaaccagaatggttttctcagtcttatcatttattaaatttatgtttatcatatgaggtaagctggttaggttacactactttcattttagaggtgacaaggctatggcttatattaattaaaagataccaagtaatttcttaggtttaattacacctagctgcatagaaaatatcttttactaaactgggaaaaaacatactgtttttttcattttttagctaccaascagagaaggcaaagaaatgccctagatggttgatattgacatttctgttcttatcataggttgtgatgctggctctttccatcactgacttctccacctgttttcaaaggtggacttgtaayagtaattgccaaagtaattcctctattattgctctgctcttttgggtgcccttttcttcagctaaaggttattgcacccactaatcagaaatacggaaaatgccctcaaaggtcatttctgaaactttgtcttaaagagcaatctcttttgcaacctagtcaggatattttgccagttttcccaagaaaagagttttacggaaattgttcttacttgtgagaagtttccaatattaattgaaaaattttttatagggggagaatcaagttgggagtcaggaaacaaggtgctatggtctgaatgtgtccctcaacacaaaattcatgtgttggaaatttaatccccattgcaatagtgttggaaggtggggtcttttggaaggtgtttagatkatgagggctctgccttcatgaatagattaatsctgttataaaagggcttgatagagagagttttgttcctttttgcttttccaccttgtgccatgtgaaggtgcagcgctgtacccctccaaaggatgcagcattcaaagtgccatcttggaagcagacagcagcccttatcatatgccagagtcttgatcttggacttcctggcctctacagctgtgaaaaataaatttctgttctttatcaattaattaatctgtggtattttgttacaacagcacaaacagactataacacaaaggttctagatttacagctgccacaaatagctatatgttgttgggtaaggcatttaatcactccagttacaaaatctttcatttgcaaaataagagaattggaatggataatctctgaggtatattccagttctaaatccattataattccatggcaaataatgtcaggtaatatttttaaagaaaaatatattataaaaatttttatttaaatattgagataaaaaattattgcctgtctcttgggctatacaggcttttttatggtgagggttttctccacagacagaagaacaggaagaagggaaagtttgggattggataaaaggaagatttcttttcctcaccttggttactaatcctttacctagttggtaggtgcttcattcaccctggagatctttgactaaaaggcaggcattcaggaccaagcataatccatctcttgcataaaacatgrgacgctttggaggatgcctggtgttcaaaatggtaatatttctacccctttgtcaaaagtaacatcatattccatatcactgccccccctccacctgtsagaaggggattagaaagggtgttgttccagaaaataaaagtttcaaaaccaacaaacccaggtcagatacctataaaaccttataagacaagaacaaattgcaattaaagaagacgcccaacaaagaagaaatgaaatgaaatattgatagctgtttaagggagttcacattctatctgtgtaagtgggaaatgctcaacctcctgagactcctcctatctctaaaattctaccactctgtgcctttatgataattctagattattttttaattttcatttttttattatacgtaagttctgggatacatatgcagaacgtgcaggtttgttacataggtrtacacgtgccacggtgttttgctgcacccattaacctgtcatctacattaggtatttctcctaatgctatccctcccctaaycccccaccgcctgacaggccccagtgtgtgatgctcccctccctgtatccatgtgttctcattgttcaactcccatttatgagtgagaacatgcagtgtttggttttmtgttcctgtgttagtttgctgagaatgacggtttccagcttcatccatgtccctgccaaggacatgaactcatccttttttatggctgcagagtattccatggtatatatatgccacattttctttatccagtctatcatcgatgggcatttgggttggttccaagtctttgctattgtgaatactgccgcartaaacatacgtgtgcatgtgtctttatagtagcatgatttataattctttgggtatatacccagtaatgggattgctgggtcaaatggtatttctggttctagatccttgaggaatcgccacactatcttccacaatcgtttaactagtttacactcccaccaacagtgtaaaagcattcctatttctccacatcctctccagcatgttgtttcctgactttttaatgattgccattctaactggcatgagatggtatctcattgtggttttgatttgcatttctctaataacctgtgatgatgagcttttttttgtatgtctgttggctgcataagtgtcttcttttaagaagtgaatgctcatatatttcacccactttttgttggggttgtttttttcttgtaaatttctttaagttccttgtagattctggatattagccctttgtcagatgggtagatagcaaaaattttctcccattctgtaggttgcctgttcactctgataatagtttcttttgctgtgcactgcagaatttcttcagtttaattatatcccatctgtcaattttggcttttgctgccattgcttttggtgttttagtcatgaagtgtttgcccatgcctatgtcctgaatggtattgcctaggttttcttctagggtttttatggttttaggtcttatgttcaagtctttaatccaacttgagttaattttattataaggtgtaaggaaggcatccagtttcagttttctgcatatggctagccaattttcccaacaccatttattaaatagagaatcctttcccatttcttgtttttgtcatgtttgtcaaagaccagatgattgtagatgtgtgacgttattactgaggcctctgttctattccattggtctatatatctgttttggtaccagtaccatgctgttttggttactgtagccttgtagtatagtttgaagtcaggtagtgtgatgcctccggctttgttctttttgcttagggttgtcttggctatacgggctctattttggttccatatgagatttaaagtagttttttccaattctgtgaagaaagtcaatagtagtctgaaggggacagcattgaatctataaattactttgggcagtatggccatttttgtgatattgattcatcctatccatgagcatggaatgtttttccatgtttgtgtcctctcttatttccttgagcagyggtttgtagttctccttgaagaggtccttcacatcccttgtaagttggattcctaggtattttattctctttgtagcaagtgtgaatgggacttcactcaggatttgcctctctgtttgtctattattgttgtagaggaacacttgtgatttttcatattgcttgcacattgattttgtatcctgaaactttgctgaagttgcttatcagcttaagcagattttggctaagaaaacagggttttctaaatatacaatcatgtcatctgcaaacagagacaatttgacttcctcttttcctaactgaataccctttatttctttctcttgcctgattaccctggccagaacttccaataacatgttgaataggagtggtgagagagggcatacttgtcctgtatcagtcttcaaagggaatgcttccagcttttgcccatttagtgtgatattggctgtggatttgtcataaatatctcttattattttgagatacattccatcagtacctattttattgagagtttttagcatgaaggggtgttgaattttatcaaaggctttttctgcatctattgagttaatcatgtggtttttgtaattgattctgtttatgtcatggattgtttactgatttgcatatgttgaaccagtctcgcatcccagggatgaagctgacttgatcatggtggataagctttttgatgtgctgctggattttgtttgccactatttcattgaggatttttgcatcaatgttcatcagaaatattggccttacattttcttattttgttatttccctgccaggctttggtatcaggatgatgcaggmcccagaaaatgagttagagaggagtccctctttttgtcttgtttggaattgtttcagaaggaatggtaccagctcctctttgtacctctggtagaattcagctgtgaatccatctggtcctgarctttttgttggttggtaggctattaattactgcctcaatttcagaactcattattggtctagtcagggattcagcttcttcctggtttagtcttgggagggtttatgtgtccaggaatttatgcatttcttctagattttctagtttatttgtgtagaggtgtttatagtattctctgatggtagtttgtatttctgtgggatcaatggtgataccccctttatccttttttattgtgtctatttgattcttctctcttttcttcttaattattctggctagtggtctatctattttgatattcttttcaaaaaaccagctcctggattcactgagttttttttgaagggtttttcatgtctctatctcattcagttctgctctgatcttagttatttcttgtcttttgctagcttttgaatttgtttgctcttgyttctgtagttcttttaattgtgatgttagggtgtagattttagatctttcctgctttctcctgtgggcatttagtgctataaatttccctctaaacactcctttagctgtgtcccagagattctggtaggtcgtgtcttcattctcattgatttcaaagacatttakttctgccttaaattcgttatttacccagtcrtcattcaggagcaggttgttaagtttccaygtgtggttttgagtgagttttttaatcctgagttctgatttgattgcactgtggaaagactgtttgttatgatttccattcttttacatttgctgaggagtgttttctttccaattatgtggtcagttttggaaaaggtgtgatgtggtgctgagaagaatgtatattttgttgatttgggttggagagttctgtagatatctattaggtccatttgctctagagctgagttcaagtcttgaatatccttgttaattttctgtctcattaatctgtctaatattggcagtggggtgttaaagtctcccactattattgtgtgggagtctaagtccctttgtaggtctctaacaccttgctttatgaatctggatgctcctgtattgggtgcataagtatttaggatagttagctcttcttgctgcattgatccctttaccattatgtaatgcccttctttgtcgtttttgatctttgttggcttcaagtctgttttatcagagactaggattgcaacccctgctttttttgctttccatttgcgtggtaaatagtcctccatccctttattttgagcctatgtgtgtctttgcacatgagataggtctcctgaatacagcacactgatgggtcttgactcttcatccaatttgccagtctgtgccttttaattggggcatttagcccatttacatttaagattaatattgttatgtgtgaatttgatcctgtcattatgatgctagctggttattttgcccattgcttgatacagtttcttcacagtgtcaatggtcgttacaatttggaatgttttgcagtggctggtactggtttttcctttccatgttcagtgcttccttcaggagctcttttagggcaggcctagtgttgacaaaatctctcagcatttgcttgtctgtaaaggattttatttctcccttgcttatgaagcttagcttggctggatatgaaattctgggttgaaaattcttttctttaagaatgttgaatattggcccccactctcttctggcttgcagggtttctgcagtgagatccactgttagtctgatgggcttccctttgtgggtaacccgacctttctctctggctgcccttaacatttttccttcatttcaactttggtgaatctgacgattttgtgtcttggggttgcctttctcgaggtgtttccttgtagtgttctctgtatttcctgaatttgaatgttggcctgtcttgctaggttggaaaattctcctggataatatcctgaagagttttccaacttggttccattctccccctcactttcaggtacaccaagcaaatgtaggtttggtcctttcacatagtcccatatttcttggaggctttgtttgtttcttttcatttttttctctaatattgtcctcatgctttatttcatttagttgatcttcaatctctgatatcctttcttctgcttgatttattcagctattgatacttgtgtatgcttcatgaagttcttgtgcatgctttaggaagttcttgtgctgtgtttttcagctccatgaggtcatttatgttcttctctaaactggttatcctagttagcaattcctctaaccttttttcaagattcttagcttccttgcattgcgttagaacatgcttctttagctgagaggagtttgttattacccaccttctgaagcctacttctgtcaatttgccaaactcattttccatccagtttttttcccctgctggcaaggaattgtcatcctttggaggagaagaggccttctggttttggaattttcagcctttttgtgctggtttttcctcatctttgtggatttatctacctttggtctttgatattggtgacctttggatggggtttctgtgtgaacgtcctttttgttgatgttgatggtattcctttctgtttgttagttttccttctaaaagtaagtcccctctgctgcaggtctactggagtttgctggaggtccactccagaccctttttgcctgggtatcaccggcagaggctgcagaacagcaaagattgctgcctgttccttcctctggaagcttcgtcccagagggtcatctgccagatgccagctggagctctcctgtatgaggtgtctgtcaacccctactgggaggtgtctcctagtcaggatgcacaggggtcagcgacccacttgcggaggcagtctgtcccttagcagagctcgagtgttctgctgggagatccactgctctcttcagagccagcaggcaggaatgtttaagtctgctgaagctktgctcacagccgccccttgccccaggtgttctgtcccagggagatggtagttttatctataagcccctgactggggctgctgcctttctttcagagatgccctttccagagaggaggaatctagagaggcagtgtggctacagtggttttgccaaggtgtgttgggctctgcccagttcaaacttccaggcagctttgtttacactgtgaaggaaaactgcctactcaagcctcagtaatggtggatgcccctccccacacccagcttgagcatcccaggtcaacttcagactgctcttctggcagggacaatttcaagccagtggatcttagcttgctaggctccatggggatgggatctgctgagctagrccacttggctccctgacttcagcacyctttccagaggagtgaatggttctgtctcactggcattccaggygccactggggtatgaaaaaaaactcctgcagctagattggtgtctgcccaaatggctgcccagttttgtgcttgaaactcagggctgtggtggtgtaggcacccaacggagtcacctggtatgcaggttgcaaagactgtgagaaaaacctattatctgggctggaatgcaccattcctcaaggcttcccttggctagggaagggagttccctgaccccttgcacttcctgggtgaggcaatgccccatcctgcttcagcacatcctccatgcactgcaccaactatctaaccagtcccaatgagatgagctgggtacctcagttggaaatgcagaaatcacccaccttctgcgttgatcttgctgggagctgcagactggagctgttcctattcagccaccttgtcagctacccacttctagattacttaatggatgaaatggttacaattctttggggacaatgtgaatctaactatagctcccttgttcattcagacatatgcctcttttagggtatttttttgttggccataaatcactagaataacaagacaatagatttaacccaaatacattaatagtgtgaattttcaagtcattccctgtaaagttgaagctatacagaagactcattggcctaagttcatttatcatatttactaactccagtgatccattttacaaattattattacccgtcgttttaataatccagttgatttgggtggtattttccttagttagttggaaattcaaacttagatctcagagcaaaggctcatatggtgcaatagcytgattttctataataaagtagataattatcctttggatactatttagcatgaactctgattcagcttttctctactttgtcctaataaagtgaaacagtcccagattttcagttttccttaaagtttctttggtttgctaataccattttaagaaggtttttaagaatgtttttaacagtgttttatatatttaaaagtaaaatatataaaaggaattgcattgtcttgttttaggctaggaataaattagatgtttgtgaaagccattgtaaatggtagagtacttcaccaatgttaattataataatttgacacaatgtagggtagtggtcaatagcataggttttgaagtcagaacaacccagwcttgaatcttgccttgcctgctactaactctctaactttggcaagtttttcaacgcctgagtactccctttgctggcctataacatgcaaacatgcaaataatatcaatatctacctcccagggtcatctaagtgctaagtggagagagtatatgtaaagtacttatatagtgcctgctcawtatgttaaatattattattaattgtattagctcaataaatgtttgtttagagtaaatctactggttaattaatcactggattattgtaaggactaaattagaaaatgtacacaacagacatagcacaaagcctggacaatgccctgtttcattttttctaagaaatcatccattataagatgyaccgttgaggcatgtgcttctacaaaagaaaaaaattatgtcaattaattgtaaaaaaccatcaaacatgagacaaagctctattgcagagaagtaaaaatgtgggggagaaaaagcaccttagaatcaatgaactccaacagctttaaataactagtacaatgataaaagatgaaggagagaaggaaaaggcaaaataaaaaatactcatcaaactaatttctcagtgttcttggagctatttgtgaatttttatctcattcacataccccaaattatcattcttgttagtgaggaagaaaaattaagaaacttgccacagggagccaaaaaagaatcataaaataagatcatagtgaattatgataaatctcccataatattcatggagtccttgcagrgaatgagaacttatcagtcattagtcccctttcttacccaaagcaaggatctcttctacagcacctctgaagtgtaccaacgatatttattttgcatttcatttcagggcccctttcaaggagtcttggagttgctcttgtgcaaatgcagacccctttacacagtatgacgctagggtaggcggggaatgagtggcaggatgtaggggtatgctaatcatcactgtcaaccttgacgggaaggtgggtgacaaatggggaagtagcatttgaagtataatttagaaaagatctggaaaacaaatgacagaagaggagaaagagctctcatttatttcagaaaactttcccactaacagcaataggtggcagagaagaggatgaagatgtgtgggaaaaacaggaatgtctttgagtctttgagcaaaggaactgagggaaaacaaagcagttgctgctatttggggggaaactcagcaactgaaggtcgcaagttttttaccctaccagtcagcacatcagtcttgaaaagtcaatgatgaccaagcacataaaacctaaacatgtagaagccaccagttctttttgattagctattcaaagccagacttttccttccttgggaacaattcttattcatttctatatttcaatcactcytaaataattattaccaacagtttttgagctcttactatgtagaaaatttaatttacttgatcctaagaaaagaatttttttgtgaggtactattattatyattcccattttacagatcaagaaatcaagccccctatgagataagaaacttgtttcaagtcccagagccagaatggtacccagagaggctatattcctagccactatgtcacactgcctccaccttgacttcatttctgtgatcagtgcagactatatatattggataatttggaataaatgtacatcatcccagaatggtgttcaaaaagaattattcaggcattaattatctctataccttaactgttcttactctctctttacattgtctgacatttaactattggacgtctacaaagtctgaaaatgtgaattttatatatgtttatgtgcacacacacacacacagactgaagttgtcctgaacaacattatattcattcattctcctgtgcttctgaacttataggcaccctgtattttcccctaattgggggcagttacactatacatagaattcaggggtcaggatggagagtatctgataataccactgtccttcaacaattatagttatttggaaaatattaattacacttgtggttcactaggtgttttctctgcctctaagtttctctgcattttatttaattttatttttattttttattttattattgttatactttaagttttagggtacatgtgcacaatgtgcaggttgcttacatatgtatacatgtgccttgctggtgtgctgcacccattaactcgtcatttagcattaggtatatctcctaatgctatccctcccccctccccccatgccacaacagtccccagagtgtgatgttccccttcctctgtccatgtgttcacattgttcaattcccacctatgagtgagaatatgcggtgtttggttttttgttcttgtgatagtttactgagaatgatgatttccaatttcatccatgtccctacaaaggacatgaactcatcattttttatggctgcatagtattccatggtgtatatgtgccacattttcttaatccagtctatcattgttggacatttgggttggttccaagtctttgctattgtgaataatgccacaataaacatacgtgtgcatgtgtctttatagcagcatgatttatagtcctttgggtatatacccagtaatgggatagctgggtcaaatggtatatctagttctagatccctgaggaatcgccacactgacttccacaatggttgaactagtttacagtcccaccaacagtgtcaaagtgttcctatttctccacatcctctccagcacctgttgtttcctgactttttaatgattgccattctaactggtgtgagatggtatctcattgtggttttgatttgcatttctctgatggccagtgatggtgagcattttttcatgtgttttttggctgcataaatgtcttcttttgcgaagtgtctgttcatgtcctttgcccactttttgatggggttgtttgtttttttcttgtaaatttgtttgagttcattgtagattctggatattagccctttgtcagatgagtaggttgygaaaattttctcccattttgtaggttgcctgttcactctgatggtagtttcttttgctgtgcagaagctctttagtttaattagatcccatttgtcaattttggcttttgttgccattgcttttggtgttttagacatgaagtccttgcccatgcctatgtcctgaatggtaatgtctaggttttcttctagggyttttatggttttaggtctaacatttaagtctttaatccatcttgaattaatttttgtgtaaggtgtaaggaagggatccagtttcagctttctacatatggctagcctgttttcccagcaccatttattaaataaggaatcctttccccattgcttgtttttgtcaggtttgtcaaatatcagatagttgtagatatgcggtgttatttctgagggctctgttctggtaccagtaccatgctgttttggttactgtrgccttgtagtatagtttgaagtcaggtagcgtgatgcttccagcttcgttcttttggcttaggattgacttggcgatgcgggctcttttttggttccatatgaactttaaagtagttttttccaattctgtgaagaaagtcattggtagcttgatggggatggcactgaatctgtaaattaccttgggcagtatggccattttcatgatattgattcttcctacccatgagcatggaatgttcttccatttgtttgtatcctcttttatttcactgagcagtggtttgtagttctccttgaggaggtccttcacgtcccttgtaagttggattcctaggtattttattctctttgaagcaattgtggatgggagttcactcatgatttgactctctgtttgtctgttttggtgtataagaatgcttgtgatttttgtacattaatactgtatcctgagatttgctgaagttgcttatcagctcaaggagattttgggctgagacaatggggttttctagatatacaatcatgtcatctgcaaacagggacaatttgagttcctcttttcctaattggaaaattaggaaattatttccttctcctgcctaattgccctgggcagaacttgcaacactatgttgaatgggagtggtgagagagggcatccctgtcttgtgccagttttcaaaggtaatgcttccagtttttgcccatttagtatgatattggctgtgggtttgtcatagatagctcttattattttgagatacatcccatcaatacctaatttattgagagtttttagccctaaaagagctcctgaaggaagcattaaatatggaaaggaacaatctgtaccagccactgcaaaatcatgccaaagtgtaaagaccattgaggctaggaagaaactgcattaactaatgagcaaaataaccagctaacatcataatgacaggatcaagttcacacataacaatattaactttaaatgtaaatggactaaatgctccaattaaaagacacagactggcaaactggataaagagtcaagacccatcagtgtgctgtattyaggaaacccatctcacatgcagagacacacataggctcaaaatgaaaggatggaggaagatctaccaagcaaatggaaaacaaaaaaargcaggggttgcaatcctagtctctgataaaacagactttaaaccaacaaagatcaaaagagacaaagaaggccattacataatggtaaagggatcaattcaacaagaagagctaactatcctaaacatatatgcacccaatataggagcacccagattcataaagcaagtcctgagtgacctagacttagacttagactcccacacaataataatgggagactttaacaccccactgtcaacattagacagatcaacgagacagaaagttaacaaggatacccaagaattgaactcatctctgcaccaagcggacctaatagacatctacagaactctccaccccaaatcaacagaatatacatttttttcagcaccacaccacacctattccaaaattgaccacatagttggaagtaaagcactcctcagcaaatgtaaaagaacagaaattataacaaactgtctctcagaccacagtgcaatcaaactagcactcaggattaagaaacactcaaaaccgctcaactacgtggaaactgaacaacctgctcctgaatgactactgggtacataacaaaatgaaggcagaaataaagatgttctttgaaaccaatgagaacaaagacacaacataccagaatctctgggatacattcaaagcagtgtgtagagggaaatttatagcaccaaatgcccacaagagaaagcaggaaagatccaaaattgacaccctaacatcacaattaaaagaactagaaaagcaagagcaaacacattcaaaagctagcagaaggcaagaaataactaacatcagagcagaactgaaggaaatagagacacaaaaaacccttcaaaaaatcaatgaatccaggagctggttttttgaaaagatcaacaaaattgatagaccgctagcaagactaataaagaagaaaagagagaagaatcagatagacgcaatagaaaatgataaaggggatgtcaccaccgatcccacagaactacaaactaccatcagagaatactacaaacacctctacgcaaataaactagaaaatctagaagaaatggataaattcctggacacatacaccctcccacgactaaaccaggaagaagttgaatctctgaatagaccaataacaggctctgaaattgtggcaataatcaatagcttaccaaccaaaaagagtccaggaccagatggattcacagccgaattctaccagaggtacaaggaggagctggtaccattccttctgaaactattccaatcaatagaaaaagagggaatcctccctaactcatttgatgagaccagcatcatcctgataccaaagccaggcagagacacaaccaaaaaagagaattttagaccaatatccttgatgaacattgatgcaaaaatgctcaataaaatactggcaaagmgaatccagcagcacatcaaaaagcttatccaccatgatcaagtgggcttcatccctgggatgcaaggctggttcaatataagcaaatcaataaatgtaatccakcatataaacagaaccaaagacagaaaccacatgattatctcaatagatgcagaaaaggcctttgacaaaatatttaattttaaatatatgaaattctatggattttgaactcagattttagcaccattgatagctacaaagggagaaaacatatagttgggaatcaacaatactgcaggtgagccaggcatgagacatacttatagtaaaaataattatttattgtttatctgaaattcaaatgtaactgggtattttgtgtcatgtctggcaaccctagtagaagtggtaatgtgtgatttcagagcctgggtcagaaaatgcactgtggcttcctccttctctcttggatcactcactctagcagaagccagctgccatttcgtgaagacattcaagcaaccgtacggtgaggcccatatggtaaaaaaaactgagccctccggataatggctagtgaggaactgagacctcctatcaacagccactctcaagtctttagatgactgtaacccaagctgatattttgaccataacttcatgagagacactgaaccagaaacatctaacaaagcagaattccagactcagagaaactgtgagatactaaatatgtattgtttaagctgctaagtttgggggtaatttgttatgtagtaagagaaaacraatacagccatattacttaagtagatggacatttattcagygttctagtcaatcttcctggcatacaattaatctttttgttcaaagaaaagttttcttgcctttcgtttgaaagtgtcacatctcctgtgaaatagcccttaacctgatatggtttggctgtgcccccagccgaatctcatcttgaaatgtaatttccataatccccagcgtgtctagggagggaccaagtttaaggttgacggcatcatgggggtggtttcccccatggtgttctcacgataatraatgagttctcatgagatatgatggtttttataaggggctcttcctcctttgcttcacacacacaccctctctctctcacctgctgccatgtaaaacatgcctttgcttctctctcaccttgcaccatgattgtaagtttcctgaggcctccccagccatgcagaactgtgagtcaattaaacctccttcctttataaattacccattcttggtatgtctttatagcaatgtgagaagggactaatcacagccctaccagaggaagacccaatatagcactcactgaggtaatttaaggaacatttgatagataatatgttttcagaacaaattttaagtaaacaaaataagaaaattataatatataatagaactgcactgtgacttatagattgcaawctttcacatttatcatgttatttgattattaaaataaagtaagagtattacctagcttttacaagtgaaaaaaacaatagaaggtaagtttttagargtttgatgatatctccaaggtcacagagctaatcacacagctagaattctaacacaaatcgtcttaacacccagtttcttctaaggttctgcctctcaaatatgaacagtgttatctctttcattctgacactagtcattgatcttaaatggtgttctgttgcaggtggttttcaatatcaaaaatgtcaaaatgaagggtggaaaaatggtcatcaggctgggcgtggtagctcatgcctgtaatcccagcgctttgggaggccgaggcaggtggatcrcaaggtcaggagttcaagactggcctagccaagacggcgaaaccccacctctactaaaaactacaaaaattagccgggcryrgtggcaggcgcctgtaatcacagctactcgggaggctgaggcaagagaattgcttgaatctgagcggtagatgttacagtgagccgagatcatgccactgcactccagcctgggcgatagagtgagacyccgtctcaaaaaaaaaaaaaaaaaaaagtcatcaatcatctgacatgaaatcacaaaagtgagcatcttttgacctctgaaaaatgagttttaattgttctcattaattcaacagccatggttgacaataccatttgtggttgactcaatcattcagcaagtccwgtcacactatttgacttcacatttcccaamatgagaaatgattctcaacaacaacaaccaaaagacaaatattgggacacatttatcacaggcaggaaatgcaacacaaagaaaagcaaggcaaaaagtggaattctcatacttccactcataggaatctaacacatgactcctcaactccctgcccaggaatattgggtgttgatcaaacttaaactgtgttcgttttgctataaaactcatcattagttgttcatcaattatactactaaacccccagttaagagtccatattggaaccttatttttgaagtcaattccaggaaaagttttgtttcttttgtaaaagcgttacrttttgaaagggcagcattataaatagaaggggaaataactgtatacaaagagggaacgatatcaaagtttggtagtagaaataagaagagtaaataaattcagttaaataaattcaggtcaggagtcatggttaaataaggaaataatacagtgggattaatcaaagtaactttgggatggtttccattcttttgactaagaacacagtatgaagctgaacaaatgaaaatgtggtgtttgctaaatgcttctctctggatacttcattcctgcttgtcctggcattaaaataagaaaaaccacatgccaataaagcaaacagtaattagaaatggagccacagtgatctagtatctccttcttgagaaaaagtctagggaggactttgggagatttaaaacttcaggaaggagaataatttagttatatacaaaaaagttaacttgatatcatactattaagtggatttctagattctgtagacctgttgtttctctcactgatgctggttaagtcattttaggcaaaaaataaggtcattacaattcagattctttcatctatttcacttgttagcattgctacttgaaaagaaatcccagtagcctaggattagaaaagggtgaatactcactcatctggtgccctgaataagttcagtaaaatgaaacaattgcacaccctgccattaccatttcccaggaatgstgtgtctgctctaaggtggggaataagggatagagccaacactggcttcttcctttctggcaaggaaagtgtatcaagtggtcacaaaacctcaaagatcctacatgttgcacttctctcttttgaggaaactgttacaagaagatgcttactcagaggtttggcatgctttttccactagaccaggtcgaattagccacacctggttgaactggtgttctatatgctgggaaataacctctagggttacttgacttgagaactgtgcccaacagaaatgctccatattgaacagtgaccaacaattccaaccagttctcctttcttggggaagtggaatgcaagatatacatagagaattgtcaatcaactcagtaagggagtagaagtaaactgagagaaaaaatctgaaccatgaaggcagctgacttaagggttattcttgggttactaaaaccgccatatacattcaagctacgaacaaggcatgcctctacagttactgacaaggtttccactgttttcttgccttctggaatattctaacagtaaaatatcacaggaagtaaaataaatatgtatccttcttgccaccagaaggaaactggggaatctcataatttttagtgaatctcataatttttagtgttgccatttttgtcttggcaaccaggaagctcttagccaaacttatgtttaacaactatataaaatccagtggtcacagttttgctgcttcttccatcttgatcctcattttatattccctatatataaagtttgagtgtgtgcgtgtgtgttwgagacatcaaaagtttcaaaaaactagtttctcagtctttggagggtcaggtagctaagaaaccaagacatccagcctttaaaggtacctcctaaaatctgccttctcagatatttttatgttggccttcaaatgtcaaggtctttcagttttagcaatttctaatttatattacaaagaaagaaatggaagtaaaagtaacaaacatctttccaaagttcagacacaatcctacatgaataattctgattccagacaaagatgggtgatgactaaatataagaataaaagatggatacttgcttatcatcccattcttagccattaattgttgagttgagatcaaaagccttctgcaatgctgttttagttataaatatcatggtaatcaggtaagtttacatctatattatgcattgttctaaggaagggagtaaaatctctgataatttaataaggcttttctttttctttccttttttttttttttttttttttttttgagacagagtctcatgccgttgcctaggctggagtgcagtggtacaatctcagctcactgcaagctctgcctccctggttcaagtgatttttgtgccacagtctgtcgagtagctgggattaaaggcatgcaccaccatgcccagccaatttttgtatttttagcagagacaggkttttgccacgttggccagactggtctcgaattcctgatctcaagtgatccacctgccttggcctcccaaagtgctaggattacaggtgtgagccaccacacctggcctaaaaaggcttatcctaaacatttccataaataggatttgaaatttttctagttcaccttycttttctctttgctgtgtctttacatgtcatttgatttcacatgtcatttatcagagagcagggagtgctttatcactctccaaagttcatagcctcctcattaataatcaaacctgaaggggtgatagcctaaacctgaaaaaaattataccacatatttactatcaggcactccaaagaactcacatattttcaaatacttctgtttaatagagggccagctattacctgctttcctcaagcctcagtgctaacttggatgaaaacattttactgaacacaactattaccttgtttcagccatgacttgtcaaatgtccccagatagctgctctcagtcatcactgtaggcaagaatgggtgcctctcaggaccagaatcagacacagaaacaagcaaagcccaaagtatgtaagcgatccactgaggtgagttcacacataaaaaagaagaaaataaaatgcatgtatactactctgcaatccactctcaggtcatttgaaacraagtcaaaggagagaaggagttagggggatgatgtataygactgtggattctacaaaaattttatttgatataaagcattcaacgcatctaaagtcatagaatgttataactggaagagtcttagagacaaagcctagcatcctcactttatagatgagaaaggtaaaaaaagagccaggaaataactgtccatgccaccatgctggtaccaggaagagctttggggtttggcaatctggggtgaggttccaactctgccacttattttatcccacttagcttcaatttcctcccaggtaaaataaagatcctaatcatgcctagatgacaaggtgagtgtaacaattaaatatgacatgcacataaagtaatcatcacaatgcttggcacatagtaagtgctcsataaatgttagctattagaatgattatccatgatagagatccatcctagaamacaaattggagccagccataatatgtggggaaatcctccccttcagttcacctcctagacactgggccagaataggtcctggaggcatgaggtgaagatggggaatgggatctggctgtatttccaaaatcttccatatatagacctgaaagctgaaaccgaatgctaccctatgagattcatctcagagttccctggggatattagaaaataacaatcaccaaatttgaaggtaaagagactgtaaatcatagacttttatgctgaaaaatatctcaggtatcttgtagtctaacataccttgattttggaatcctcaagagcaagaccttgctcctttattattatttagtttttggagaggcagagatcccattacaaggttatacatacgtcgaactcaatgaatgcttgtgcaaggtgggaagatcatcatttattggtctttaagccttgtctctgttatatggggttacctttgtccatgaattttgtgaagcaatcattcagtagcacattctaagcttgtattgatggtaacaatagccagcataaagtgggcagtttctaaccaggcaatgagcaaccactttacatggaccatatccccacaacaagtcactcactaaggtcatacaactagtaaatagtgatgccaggattcagcctagggaatcttgggctgattttgtgctcttagtacatttttggtctctaaatatgacaaaagaatttataatatttctcatactttcttactctggtaaccttctgcagtcctttttccttgaccagaatttatacccttactcaataaaataggttgtggataccacagtcagaggtagttacttgaaacacctgtgtgcatgagtgcgcacacacacacacacacacacacacacacacacgcacaagttatagcacatggggcacaatgagaacaaagagagaatgcagtaaaacaattgccacaactgtacattgtcttctgtcaaaggaaatcaaccaagtcgagagtacttgcaaaagcacagcaaagccatgtgtttaccaacacttgggaaaactgaagtttaaacccaaggccaggcattaaatattattatgtaaggcaccagttctgtatcaagtcctttcaaggcttaacagccaaattagcaataaaytctgatagccccatctatcagctctgttcagccaatccaatggcaacactgtgtttctttgcaggtccagggaacacacgcttgcaaaggaaaaaaatgcacttgattagatttggttttgaataattggttcattgaaattcttgagctgaagaaaaatggcatttctaatttatagaaatcacaatttgaaatatagttatgactgctcagagaacccctagaagtaaataaatttaagtcagcacatttaagaaagccattaagaggtaactaatgacagccccaccaattgtctctccaatagagcctgtgtggaaccctgccaaaagccagctcccttgttctcctggctgaggctgtgtgtggcttgatgcttgagagctcagctttggtgtatcaaggccacccacctagcaagcccaggaacctgatggggcctgacatggtttggctgtggccccacccaaatctcaacttgaattgtatctcccagaattcccacgtcttgtgggatggactccggggaggtaactgaatcatgggggctggtctttcccgtgctgctctcctgatatgattaastctcatgggatctgatgggtttatcagggtttctgcttttgtttctctcattttctcctgctgccaccatgtaaaaagtgccttttgcctcccaccatgattctgaggcctctccagccatgtgaaactgttaagtccaattaaacctctttttcttcccagtctcgggaagaaaagcagcatgaaaacggactaatacagaggctaagaaggagaagggcagcacattctggacagaaaaggagagaaggaaaaatcgcttccattagcaactccagcacctctttgggaggaatctttcataggtgcacactgcatgcttgcaaatayccccactaacctgcactgggtatgctgggcactcagttatcctagcatcttagagagccaggaaagactactccagacctgtctgaccattgcaaggcaaggtggaatgttattatgtatgatatctgartgacaaaggagaatctatgcttctcctccagccttgtttcatgggcacattagtgtggtttagattgtgtaatatctcttaattattacatgcaaattcaggcaagcagtatgggacagaaaagatctccaggtcactttagtaacctaggcctctgcagatgagtcagtgagtcagccaggatccctgaatgagaggagtaaacttttgacctcaagaagcttactgtgatctggtgattaccacagcagagcycaatccatcagctttgaaaaaacaatgaactctggtgacctggtttggccaaacctcactgctgtgataaaaagcatgactcctgtcttttgatacaccatggcccatttttaaaattgcttctgagaaagtaaatgagaccycagtttgaaagaaatgaggccagactgaaagatgtccttccataagcatttggcaagcatggaaatgacatctgtgggcttatcattcccaggcccctatccatttcactcaaataggtccctgctcaccacttttagtaacacccactggacacaaactaggatatgggtagaattgggataccggcagaatttgcctttggcatcactgtggtagacatagaaaggcatggtccaggcccccttcaaggaaggccttgcttccctgccacagggagtrtcaccagcagacagcctccagctgtcascctctgcaggaccaccttagctgcagagagctggctcamagaggtcatgcccttcccaggatagcttttatccactggctgagaaaagtggggctagacaggtcttgccattcagcctgtagcaggacactatgcagggcaatgctcactgcagcactccctgccaacctggccatgggtttcttgggcctgcatcacagtttaacttattcctctgtacaattttgcttgctgttcccctttgcaggtgttgaaacccaagaaatgtcttgcatctcaaactccattttagcatctgcttcttgagaacccaatctgtgacaatcacctttttctgttctgtgatcttaactcctcttaattgcatccccttcagcccaacactccaaaataagttgataaaaaatacttaattggttggaagtttctggtcctacttttacatattgtccaaagcatgatgtagtaacattaacacaggctttggaaacagagctctgggttcaaatcccagctctgtgttatctgggtcatggtacctaatctctgtgagcctaaattttctcctccatcaagtggagatattgccatctacctagtasgtttgttgcaggaattaaatacaatcacatatacaacacacctaacacaatgcctcrtacacagtaggtgtctagtagttggttatatattgttatgggtcctttggcacttcacatgtactctacttgtawtctaatttaactttttgggtatttcttccttgcttcttctatgaaactctgaattcctggagagcaagwaacatgctatttacttaatctggattttctatataatgctctgatggttaatactcagtgtcaaattgattggcttgaaggatgcaacattgatcctgggtttgtctgtgagggtgttgccaaaggagattaacatttgagtcagtgggctggagaaggcaaacccacccttaattaggtgggcaccatctaaacagccaccagcgaatataaagcaggcagaaaagaatgaaacacttgaggaggcagtctrcccattctcagatctccagctgcatgctgggasaaccactacactcttcaaagctgtcagacagggacatttaagtctgcagagtttactgctgtctttttgtttgtctgtgccctgcccccagaggtggagcctacagaggcaggcaagcctccttgagctgtggtgggctctacccagttcaagcttccaggctgctttstttacctaatcaascctgggcaatggcaggcagccctcccccagcctggctgctaccttgcagtttgatctcagactgctgtgctagcaatcagggagactctgtgggcataggaccatccgagccagrtgtggggtataatctcctggtgcaccattttttaagcctgttggaaaagtgcagtattagggtgggagtgatccaatattccasgtgccgtctgtcacccctttctttgactaggaaagggaactccctgaccccctgggcttcccgagtgaggcaatgcttcgccctgcttcagctcgcgcctggtgcactgcacccaccatcctgcacccgctgtctggcactccctagtgagatgaacccsgtacctcagagggaaatgcagaaatcaccagtcatctgcgttgctcatgctgggagctgtagaccggagctgttcctattcggccatcttggctcctcctcaagtgggtccctgacccctgagcagcctaactgggaggaaccctccagaagggrcagactgacacctcacacagccgggtactcctctgagacaaaacttccagaggaatgatcaggcagcagcatttgcggttcaccaatatccgctgttctacaaccaccgctgttctgcagccaccactgctgatacccaggcaaacagggtctggagtggacctctagcaaactccaacagacctgcagctgagggtcctgtctggtagaaggaaaactaacaaacagaaaggacatccacaccaaaaacccatctgtacatcaccatcatcaaagamcaaaagtagataaagccacaaagatggggaaaaaacagagaagaaaaactggaaactctaaaaagcacagtgcctctcctcctccgaaggaatgcagctcctcaccagcaatggaacaaagctggatggagaatgacaagttgagagaagaaggcttcagacgatcaaactactccaagctacaggaggaaattcaaaccaatggcaaagaagttaaaaacattgaaaaaaaattagatgattggataactagaataaccaatgcagagaagtccttaaaggagctgatggagctgaaagccaaggcttgagaactacgtgaagaatgcagaagcctcaggagccgatgcgatcaactggaagaaagggtatcagtgatggaagactaaatgaatgaaatgaagcaagaagggaagtttagagaaagaataataaaaagaaatgaacaaagactccaagaaatatgggactatgtgaaaagaccaaatctacatttgattggtgtacctgaaagtgacggkgagaatggaaccaagttggaaaacactctgcaggatattatccaggagaacttccccaacctagcaaggcaggccaacattcagattcaagaaatacagagaatgctacaaagatactcctcgagaagagcaactccaagacacataactgtcagattcaccaaagttgaaatgaaggaaaaaatgttaagggcagccagagagaaagatcaggttacccacaaagggaagtccatcagacttacagcagatctctctgcagaaactctacaagccagaagagagtgggggccaacattcaacattcataaagaaaacaattttcaacctagaatttcatatccagccaaactaagcttcataagtgaaggagaaataaaatrctttacagacaagcaaatgctgagagattttgtcaccaccaggcctgccctaaaagagctcctsaaggaagcactaaacatggataggaacaaccggtaccagccactgcaaaaacacgccaaaatgtaaagaccatcaaggctaggaagaaactgcatcaactavcgagcaaaataaccagctaacatcataatgacaggatcaaattcacacataacaatattaaccttaaatgtaaatgggctamatcctccaattaaaagacacaaactggaaaattggataaagagtcaagacacatcagtgtgctgtatacaggaaacccatctcacgtgcagaggcacacataggctcaaaataaagggatggagraatatctaccaagcaaacggaaaacaaaagaaggcaggggttgcaatcctagtctctgataaaacagactttaaaccaacaaaaatcaaaagagacaaagaagaccattacatagtggtgaagggatcaattcaasaagaagagctaactatcctaaatatatatgcacccaatacaggagcacccagattcataaagcaagtcctgagtgacctacaaagagacttagactcccacacaataataatgggagactttaacaccccactgtcaacattagacagatcaacgagacagaaagttaacaaggatatccaggaattcaactcagctctgcaccaagcggacctaatagacatctacagaactctccaccccaaatcaacagaatatacatttttttcagcaccacaccaaacctattccaaaattgaccacatggttggaagtaaagcactcctcagcaaatgtaaaagaacagaaattataacaaactrtctctcagaccacagtgcaatcaaactagaactcaggattaagaaactcactcaaaaccgctcaactacrtggaaactgaacaacctgctcctgaatgactactgggtacataacaaaatgaaggcagaaataaagatgttctttgaaaccaacragaacaaagacacaacataccagaatctctgggacacattcaaagcagtgtgtagagggaaatttatagcaccaaatgcccacaagagaaagcaggaaagatccaaaattgacaccctaacatcacaattaaaagaactagaaaagcaagagcaaacacattcaaaagctagcagaaggcaagaaataactaacatcagggcagaactgaaggaaatagagacacaaaaaacccttcaaaaattaatgaatccaggagctggttttttgaaaagatcaacaaaattgatagaccgctagcaagactaataaagaagaaaagagagaagaatcagatagacacagtaaaaaatgataaaggggatgtcaccaccgatcccacagaaatacaaactaccatcagagaatactacaaacacctctacrcaaataaactagaaaatctagargaaatggataaattcctggacacatacaccctcccaagactaaaccaggaagaagttgaatctctgaatagaacaataacaggctctgaaattgtggcaataatcaatagcttactaacaaaaaaagtcaacgaccagatggattcacagccaaattctaccagaggtacaaggaggaactggtaccattccttctgaaactactccaatcaatagaaaaagagggaatcctccctaactcatttgataaggccagcatcatcctgataccaaagccgggcagagatacaacaacaaaaaaagagaattttagaccaatatccttgatgaacattgatgcaaaaatgctcaataaaatactagcaaagcgaatccagcagcacatcaaaaagcttatccaccatgatcaagtgggcttcatccctggaatgcaasgctggttcaacatacgcaaatcaataaatgtaatccagcatataaacagaaccaaagacaaaaaccacatgattatctcaatagatgcagaaaaggcctttgacaaaattcagcaaccttcgtgctaaaacctctcaataaattaggtattgatgggacgtatctcaaaataataagagctatctaagacaaacccacagccaatakcatactgaatgggcaaaaactggaagcattccctttgaaaactggcacaagacagggatgccctctctcaccactcctattcaacatagtgttggaagttctggccagggcaattaggcaggagaaggaaataaagggtattcaattgggaaaaraggaagtcaaattgtcctggtttgcagatgacaaggttgtatatctagaaaaccccattgtctcagccccaaatatccttaagctgataagcaacttcagcaaagtctcaggatacaaaatcaatgtacaaaaatcacaagcattcttacacaccaataacagacaaccagagagccaaatcatgagtgaacgcccccattcacaattgcttcaaagagaataaaatacctaggaatccaacttacaagggatgtgaaggacctcttcaaggagaactacaaaccactgctcaatgaaattaaagaggatacaaagaaatggaagaacattccatgctcatgggtaggaagaatcaatattgtgaaaatggccatactgcccaaggtaatttatagattcartgccatccccatcaagctaccaatgactttcttcacagaattggaaagaactactttaaagttcatatggaaccaaaaagagcccgcatcgccaagtcaatcctaagccaaaagaacaaagccggaggcatcacgctacctgacttcaaactacactacaaggccacagtaaccaaaacagcatggtactggtaccaaaacagagatatagatcaatggaacagaacagagccctcagaaataatgccgcatatctacaaccatctgatatttgacaaacctgasaaaaacaagcaatgggraaaggattccctatttaayaaatggtgctbggaaaactggctagccatatgtagaaagctgaaactggatcccttccttacaycttatacaaaaattaattcaagatggattaaagacttaaatgttagacctaaaaccataaaaaccctagaagaaaacctaggcaatatcattcatgacataggcatggggaaggacttcatgtctaaaacagcaaaagcaatggcaacaaaagccaaaattggcaaatgggatctaattaaactaaagagcctctgcacagcaaaagaaactaccatcagagtgaacaggcaagctacaaaatgggagaaaatttttgcaacctactcatctgacaaagggctaatatccagaatctacaatgaactcaaacaaatttacaagaaaaaaaaaccaaccccatcaaaaagtgggcgaaggatgtgaacagacacctgtcaaaagaagacatttatgcagccaaaaaacacatgagaaaatgctcatcatcactggycatcagagaaatgcaaatcaaaaccacaatgagataccatctcacaccagttagaatggcgatcattaaaaagtcaggaaacaacaggtgctggagaggatgtggagaaataggaacactttgacactgttggtgggactgtaaactagttcaaccattgtggaagtcagtgtggagattcctcagggatctagaactagaaataccatttgacccagccatcccattactgggtatatacccaaaggattataaatcaygctgctataaagacagatgcacacatatatttattgcggcactattcacaayagcaaagacttggaaccaacccaaatgtccaataacgatagactggattaagaaaatgtggcacatatacaccatggaatactgcagccataaaaaatgaagagttcatgtcctttgtagggacatggatgaaactggaaaccatcattctcagcaaactatcgcaaagacaaaaaaccaaacaccacatgttctcactcataggtgtgggaattgaacaatgagaacatatggacacaggaaggggaacatcacactccggggactgttatggggtggggggcggggggagggatagcattaggagatatacctaatgctaaatgaygagttaatgggtgcagcataccaacatggcacatgtatacatatgtaacaaatctgcacattgtgcacatgtaccctaaaagtataataataataaaatttaaaaaaaagaaaaaaaaagcattaaacaatgatgggcctagcctcccagcttacatctttctcccatgcttgatgcttcctgcccttgaacatcggactccaggttcttcagtttcggcactctgactggctctccttgctcttcaacttgcagacagcctgttgtgggaccctgtgattatataagttaatacttaataaactcccccttatatatatcctattagttctgtccctctaagacaaccctgacaaatacagatgccaagatkgattgatgttgtacacgatatataaaatttttgtcaattaaaaaaaattgagaaaagaaggaatgacttgaaatatagcaaaggtgtcttcaacacagtaaccaagctgaaacttggttcttggtgtgcacagttacaatagcaagcctagtacctactagtagatatataaaggcatcaaagtagattttgccttctattcaccactgcaagaccaaatacataatagctaataatggacagcagatagatgattggcacccgaagaacaattgcagaaatgattaagaaacctaagtagacattgcatgagtagactcatgtctatcccatcccacatgatcagtccaatttaatcaccctattcaatcctctgggggctcagctggtccaaggaggggcacgggtctttggcccaaacaractgaagagaaggaactatattatgtagttggctaggagatttttcttctctctcacattggatgtgaaaagcatgacgcttcaatttacataaagtctccaggagaaccagcaaaggatgaagctgatgcagaagatcacagagcagagagacgaaagttattgggttcctgtgacattgttgagctgctgaatcactgaaatataaagcctgcgctacctcttatcttcctgttatataagaaaataaatgtcctttaggccatttcagtgtaggattctattactttgaatttgcagcagaaagtatcctgagaggtaaggcaaatattcaatatacaatcacaactatccagggtttcttttatgcttagagccacatcagaatttttactttttttttgttttagcagaaagaggccacctaatctgaactcatttacggattaggaaactgaagttcagaaaggctgaatgagttgcctgagaaggcasaactcagaaatagtagagtcaggacttgacatccccaactcaggcattaatctgttcatccaacagcatttatgggtatctactatgtgccaggcactgtgctcttttgtcagcatcacyccagttccaaaaacatatcatggaaatgaactcttaatacagtatttgcaactggagccaatgaacaataataaatgtttcacaagaccctgttaagacagaagccacagatactcttcaccaaccaggaaataagagtcacgtaaggaagagatgggaggaatgtcaagctgattggagagatttatcagaatttaaaaaaaaaattccagtacacccagagaagacaggtatgtaataagattacctgggctcattcacttttttcctagctataaaactataaaatgtattcctgtaaaaatcatataaaaaatgaaagataaggaaaataaatgccattttactcaaggcatatgtacttgagctcaagtcaggagtgccacagtccatcaactcaactgaaaagaatttaggaaggtacaaggtgaagtaaaaacrgataccagtttttcagcaataacatcagcaaaggctgatatggagtcttgtcagttttgttagcataaagcatgrcatttggaaggcagaagtgcctcaccagaacagggagcagccaaacccattgtggcttcagctccatcagaagaatcttggtgccttgagcaaggccatctctaccacatgagcatgtgagagccaagttggataatactgaagtggtaggtcagtcagtgcttgcygcactcacagcctgttttgagaaaagcagttctttgagcagggaaggccatcttctgtacacatgaatagcctcactccagccagaactctgtgaacttgacccaaggtcagccaactcaaagactggccatcaatccatgaaggtaactgaacatggcttttgaaaaatgtaggctcctaacctctaccccagaaccatcagctcagattatctggagtggattcccaaactttctcttcagcaaggtgattgtcatgcacaaagctaaagttttaaaaatattgatctaattcagactgttcatttttatagatgaagaaactgaggcacagagaggtcacaaaaacaaaactacttgtttttcatgtatatttaccwtttctatcagagatactaccactgaacagatggctttccttgatggatggtttcattagcagtgtctgaatacttatcttctgtttgccatgtgtttctcttcctgtgtttgcgttttgcattcattcattcattcactatgtagttggctaggacacttattgagtgtccattatggaccaagtcttttcctaggttccagsaaacagaatcccaaaatctctgatcaagaaattatgtgttgcctccataaataaaattataaacaagatttatttctatttgtatcacccttcattctaaatacccacgtgcttacgatgtccttacctagcagtcttycaataagaattattgacagaacagatccactgtcgtgccgaatttcatcccccacaaaaatcaaaaactaaatcttgctgtgttcttacttagaaataggaagaaatatgtctccttacaatgaggcattcgctaatgcagccagattttaaactgttcacccagatttaagaccatctagatttctaacagagcaatggtcattaaacatctaataaccacccaggcacaaagaagaccattagctgtgcaaaccggcatgtatccaacaragatgatctgggcacacagtccctgttgctctcatttgaaatgtttctctcttttattgtctgaagatcatgataaaatgcctctaagcagtacaaaagggccatgatttttattaaaattgagcacataaagagaccaaaaaagaaaaaaagaaagtacttgccaatggaggcaaggaataggtcacagaaaaaactagacatgagggagaggacattgggagaggcacttagagggccgggatgctggagtaaaaactagctgtgactcaagtggaaggttctgaacataggaaggatgtaaacatgtcagtcaacaagatcaccattagtttcctcacagtttgaaggggcaggggtcatggaacagagacagggagtggatctgcccagaccttccatccgccacttactggrcctcattgttagaggaggktaaggggcataggaagaamagtactgaagaggaacgaaagtggcagggaagagaaaagtgttagaagaaaaatatagcctggtcccttgcataatttcagagggagcacaggaaatttaaactgtcgaagcaagaaataaaaataatacctacaacccttaaatatagcactttacattttgtgaagtgtttcagagccattttctccttgacactacctcctcactccatttttccttggccgccgcttatcatctctgggtgctgaagtctcttgatgtgaacagaatggagaacactttggtctttacctctcacctctacaccttttgtttcccaggaacagaggccacaaaagagctgtaagagcagagtgaagcaggctcatcctggtaatttgtagttttgcmgataaagaacactttcctcascacatgtgcagtggatcctgacaccagagcttcaaagaggtaatcctacaaatgatcccaggaaatctgtcacatcactggcaaaatcagcacatgacagtcattctacatttagggagggagcgcctctcaatgtgacacaataaatgagaaaagcaccatcaataaaccaccaaggaacaaaggaaacctgaatcaaaatgacagtcaggctgctcaagatcagtgaactatgaagccaagtatttaaatgtttaaagatataatgaaatttccctttcaatctacatagtctcatatggccaagaacatcacagaagtccttaataatagctgataggctttgcttgaaagctgggtcccctactttgtagtaatagagatgttactggtacatgtcacatcttcctcacatggacaagcttgcaacccactattctcctgccaccattaaaatgatagattgctaggtttttgtaattgtcataaaattccatgcctgaaatggggatgctgtcttcctattttcccactgactctattttaagtgactcttttaatggtatttctctacttgaaataattggataatctaaaactgagaaataagcactttcctttcctcattgttttatcttctttatctctcacagccccaggagatcacaaatatttggccttagggcaatatcagcagttaatgattcatgttcaaagctcaaagttgtctaattaacaaaaggcaatgttttacagaggccatttttgctttcaagttaatagcacaccrtacatacaaagggtggattgtatccaggtcttcaagcttgcagtctgctactaattgaagacgttctaatttcactttttttctgacccaaacttcaagtcattaaaaattaattattttcatttgtttcattctgayttatcagcacccgtgtagtacagttcacacatcacatcctcctattatgtgctcataaaaattacgttttggtgtttattaaaatatgcacttgattaatgaaaatattattagcatattttctgtgaattgtattcttaatagcatcagtcattaacaaaatcagaatctttaaaatgtctaaccatgttcttaatgtaaatggtggcctaggctaagtatttcctagtagcagaaatttggtaagatttctggtactgtatcaccaaaacatcatgaatttttatagagagggactgacattaaatactgacatttccaaaattatagtatgtatgcatgtttctgatgccaacggctttgatatcagcacaaaatccaacacatcagataagacttttgtagattcatcatgatcttgaatctcaaaacaaagctgattccaaggaagtaaatgcttgttcctctataatgcctggatactttgcayatccatttattataattgcttactttcttgtctgtgtccatactagcaagcagagagtctatcattgcatctttgcagtatagcacagtggttaagaaaataaactctcaactgaaggctgtcttggtttgaatttcggctccatgcttcctagtttatgtaacatggacaaggtacttaaactctaagtgcagctttcttatctgtaaaatgagcataatggtatccatttttctcccagatctgatgggaacaataaaagcattcagagtggcttatatytggttaatacccatcaattgttagctattattatttgcatttttagtatccacaaaccagggatgagaatatggtaactagtcagtgattattaaaagagtaaatagaygagttaataagacaaacactagtattcctatytatagatgagtaaaaccagcctccataaagaaaaaaaaatcattcccaatttcagtcaagtagtaagtgacagaatcatttttcaaacttgggtctatctacggctaaactacaggagaaggcttgctgtctcccagaggtccctgagcttcctattggttagacaacacctaaatttcaaaaatgaatcaggtgatttttttgttttaggaataatttaaaaattattgggcagaaatgccatgaacttcccctctcccatcactgccaattaatatactaaagagcaatagctatgaaattggaactttgttcccaaatactctccagaacacataaaaacggggggcagatgatattctcacagttaactttacatttaagtctctgccgctgtcaatctttgtcaaaatgtctttcttataattaagaatcatggttctcagaggagacaagtggcaactcaatagctcaaaacttactgaaaaatgccactgcatattgawgtgccacacacttgagcattcatacccatctctccaatcccaatggctttgctcagtgaagagagcaaggaagccatccatgcaaggacactttaagtaggtgttctcattcttcaatgataattacttgagttaccaccttttaccattgctatgaagaaaaggatattttatgagaaggaaatgagttcatttctaagctctasgtaggtgaaatcccttatatttgttcatcccatagaagttattactaagattgatgatcttaatatatagactgtaaggaagatccagttttcaccctgaaagccttgctgctttaccaccttaatagatacatgattttcttcataccgtctcaggcaagaaaagaaactacaaactacatgttagagtttttaattgtgcctgatctatctacattttacaggacttcattctcaaaatacatgcttataacacttattttttcctttcatacttagtattcatcaaagggaattgcactttactctcccagagctaaaaaagatgatctaattaaaaatattaaagaatgagccattaaagagttgtctgaaaaaatgtaatgtatggagttcatgcatgcactcattcaataagcaggctttgagctgctataaccctcaggsggcatgtcctagagataatgagatcttagtattaaacacctctgtaacagaaatattatcrtacaacaatgtagcaatatggctagacatttggaaattaaaaaaataattccagacctatcaaattgttttgttgaaggcaacaggcaacaaaagatgtctaaatattcaaatttcagaaaatatactccccaggtaccttgatcttagacgttattgggaagcaaaaacagaaccaaaatttagaatcaaaaagtcatcatataaaaaatatggcaagcataccaacctttcagtatccgtactctctctatacctttcytcctgttaataatatagtattcttatccctaagaaagcaacctcacctcmtcasaggcttttttctacaattaatggatctactgcatgatttccaacagcatgtaaacatggtctatatcacccaacaaaaaaaaaggtgtgtatatgtggtggttgcaggggcggggggatagattgcattattgttttcaagtgctcactatttcttcatttgtgyacattaccataggcagtgaagtgtcttacagaaggagtgtacttttctgcccattgacattgggcttgccatgtaacttgatttggtcaatggaatgtgtgtaaatgtgtagtatggcaaattcaagctgaagatttgagacattgcaaggcatggttctgtctctcacttcttctctcttctatcaaaaggatgtgtcccagattgggggagctctgtcagcttgtgtccagtcataagacacatggtacagggcatagctgacctctagctactgacatggaatgtgatcaagaaacaaaccaattttgtttgaagcttttagttggtttttgtcactgcagtataatcccatctagctctacacatccatgtttctctgctctctaagcggctatctctacttctccttctattctccctcaatcctctaaaaccaggcttctttcccrccaactrctccttccctttccaatgaaccactcttaacagggtgtcttccatatttccaactcaaatgatcatctctctcttcatctcttttgacctctcagmagtatttatcattgttgtccactccctcctkcttaaaatattcccttctcttgatttctcacgatttgccttccatatcactggccattacttcttagtcacttttgctagttctctctcctgtttcaatcattgaagtgtgaatacaccaagctttcctttagtcttcttttctgtccctacattcttcaaactctacattaatcctcatctagacctstgttttaaatataatatgtataacaaggactctctagccctgacctcttaatttagccccaaagttatctgtttagctaactgcttgacatcctcatctatgtgtctataggcatttcagtcttaacttggccaaartatgattgttgatttttcctgtgtagatctgtccctcccacaatcttccccatctcagcaaatggcatcactatgtacgtagttgattaagccaaggactgaaatcagggtgatggggctacaagccaaaaattatcaaaggttaacaacaaaccaccaaaaactaaggaagacgcatggaacaagttcttccccacagccttcagaagtaaccaaccctactgatacctttatcttctggcctccagaactatggaagaacaaatttctgttgtttaaaccacccagtttgtggtactttgttttggcagccctggaaatctaatacaagccccygttctgccaagttggtaggaggtggaatttcaacccttagggacatttccaccccycccycatcatgctctggagatgtctttagactccagtataaaaaccaggccaagccagrggactgaccccagagaagtgagcctagaaaaaagggtcacctttgaccagcttacctagggatcccagtctggacacaacaccattctctttccagatcctgctacttggcatgctgccaagctttatggtgctggtctccgatacacttgggacctataatgtcattctctgccccacttctactttagggaatttctcatctctctccctcttctgcctccccttcctcaataacaatcacaaaaggcaactagaaaaattattttcaagcagcttctactttaagtttgagaaatgcccttgacttgaagaacacaaaagatctggctaccttcagaaaaaaagaggccaagatttgtgaatatcacatatacagtgattctcattcttgctgtctgattcttttctttctcattctttctgtcactctgattctttcacatcagccaaaataaaacaaactaatctcttaataatttattttgtcaaagcagggatgtctatctaggtaaggcttacctsataacaacttcatgatacacagatggtatcatgtaccaagaccgtcaccctgtgatatgctcataaccaggatctgtctcataatcagcayagcaacctagccacaacacagaaaaatcttcaaaggattcaataagctgcagagcagaaagagttcaagttgtttctagagatccagtcacttcttccatcactacccatgctgtttcttcctcctcacagccttgtttttgaaattttagccaattttgaaattttaaccaattaaaagaggtcaaataccatgccctacattagcaagctttctccggtgtttgtcttctctgctcacaggaactccctatttactgtacatttcaaactccctctgtttcagcaaataaatcggtgtctgatggtacactcattatagtgctgttgtttctgagaataaggtcctccaagktaattaaataaggctggggagcttwcttatgaaacaaacagcccrctgctgcttctgctgataaataacaattttctcaataaaatgatgttgtatggatgctgcagttgggttcttgttatgctcatcagcgagctcctgaatgagtctagatttcccctcttcacataggtacatggcattaacggttataaaaaaaagggaagatgtatgtactgttcttctcataaagaaaaaatctattggatgggagcttaatgtatgtttcttggtagtatcaccagtagatgcactataactaccaagaaggaggtggccagttatattttatggttctcctttcaattctaataaggaagcatgtaatactcacaaagtacatattgcattgtttcactggaaggcatttatgaatggataaactgggtaatgagaattactggaaacttgcatattttcccacacagactttttatagtaggcatatgtaatctgactttcaatccctcatcttgcagcaatgagctgcaggagatttgaatactattcctactgtgcagaaataaaagtaggaataaattctgatgattctataatagctggagctgaaaagtcacagcattttccatttaaggggtccacatattagatccaaactgctcaagaagttttaaggttttcaaaatctgtcatcctcagagttaagatgaaattcaacttctcttggtttggggtggtcagttaaggtaacatatcactagaagaattggkattcatgatttctaaagaagtattaaagactataaagagcttttaaattaaaatatcaagaattataaaaggagtttttaaccataaagtcctctccaaggtataaaaaacacattatggaatgatgaattttcatactcaactgaagatatattctgagatgttttcttctctatggttgaagctttacacataacaaaagcaattagaataaaagaaaatattaagcttttctgacaacatcaggaacattaataataaatgtagatttcagttcagactattctcttcaaaataatggtttcagttatttgagactatttgctacttgaacacagccyatatttactgcacagcaatgatccataattaagctttaactttccatgtgcctagatatgagtccatttttagtgatattgataagatctatgatgcatcactacttttggaaaatgttgctgattccaaagatattagcactggatgctatctttgaaatgatgcagyattgagcagtactaatgtagcttaactgttggtgaaattgccagagtattagcatgtctatgattccctctgtctctcaagttgatatcctgcagagagcagagctcatgatcttctgtactagagagacacaatgtcatccagagggcaaaaaccagcttataaatccttayaaacccttccttccttccccattctatagatgtgtaaattgaggctcaaaactattaagtaatttcctgtagtcactgataaatggcagaaccaggatcagaatcaaggtttgtctttcaatgaaagtattaaactattggtattagactactgcaagcctcctcctatatttaatgtcattctatgcagtgctgcagatggagtggtaatacacatgagaggtaaaattgtaaagaagcatagttcatcctttttgtgtccccaggccactttcagattctcccagccttgatacttaccttcctttttgtctacttctcttcctcccatccaatgaactctgagaaataatatgacacctgtcatttatgaattagcatgaatttccatcaataatccagatttttgagctgcaaaggatgatagaaaccatttctgaacccagtcattttacagatgtggagacctagccacagaaaggttaagggacttacctgagttcacagagctaatgatgtacatacagaacagaagcaagaattctgtttcgtgactcccaactcacagttctattcattataccttcacaaaggtatttttttttaatttcagaggaatgttcttaccttaaagaaattttacacatcaaggagtaaagagaaaacatattgaaaaacaggagccctgcatgaaccccttaaaccatatttgttggtggctgcctactctcttcttgtgtaagaccagtcctgctgaagaagccactggtgagcatrgtgagcacctctctccagacagtagtatgcagaatatcctcccttccagacctttttccttttaaaacagcaagcattgcgtctctctgttcttctyccccayaggaatcaatgcaatcattgtgttaaggccccayggaaagctaccactgtgttaaaaatagaaataaaaaacaataaaatttcaaattgatcatttctagttactaaaagaagaaaatawtagactttcccttcctgattatgttcattaccatagatttcaatttgtctcaaattacaaggaaaagtagattgaaatctatagctagatccccaggtgtaacgtttcattttttaaaatcaatatgaaatggaagcattttgcagtaagtatttttggctccarctctaaagtactaaggctattatgatgcatttagtcatccagatagttgatcatattcagcctatacttgttttcactctcaatctttctgtcctgcataaacatgaggctctaaatgtcagtggtttttragagcttcttccctgtcaaaatagctgtgtatagtttgcttgggctgggtatttttggtgtttttctgtgtctgtatctacaaccagcagtgaaggtggaggataaggcagatcatctggacacttatggaaaaagatggctagaaaacagggaagtttcaagggcctgactattcagatcaaccagyctcatcattttagttttatgttgtaagtgttcagtttctgaaacaatatacagtgttacatgaaagtcagagctagaaggaaccaagtaagcagctaattcaacctcctcattttacaaatgacatctctaaggccgagagaaaggaagcaatttggcctatatcataacctaacttgcagagctgagactcagaactataagacttcctaatactgatattttagtttggatttccccaaaagcagagcctgagaaaaggggttgggtgcaggtggtttattttagaagtaatcataagaaatgggagcaataaagcaggaagatgaggccagaaagaagagaaaaatagatgcaacattgatttggttatcactatgggaaactagggccaaatctcactatggacccactggaatcatacaccacatacatcagcaatgtgccttcacaggatggaagcccacaacacttaaccactcattccagtagagggttgttcccacaggccttaacttccccaagttttcaggctatgactaagcaagcctagtgactttagaaaaagcctaaggacagaaaagcacagagacacagcctggcacttgagttagtgtactttaagcaactctccatcacagctgcagctgaaatcaggtggaacaagaggttgtgtcataggccacaaagaatctactacaagtggtttttaaastacgttgcctacaactttggggttgttctgcaaaaaggctccagagaggcctgagaaaggacctagtgtattagggttctcaagagaaayaaaaccaataggatatttatatatatatgaggggattactacgagaattggctcatgcaattatggaggctgagaagacccatgataagctgtctgcaacctggagaaccagggaaactggtgatataattcagtgtgagaacctggggcaggggtaggggctgctggtgttggwgtctgaargcccaagaacctggagctctraagcccaagggtaggagaaatatggatatcccagctccagaagagacagtgaacttgcctttcctttacctttttgttctatcctggcccttgattggataaygcctacccacattaatgagggggatcawctatactcaatctacctattcaaatagtaatatgttctggtaacacacacatccagaaataatgcttattcagatatctaggcatcatatggcccagtcaacttgacacataaaattaacaatcacaagtccctcccttgtcaaactggtactcatatgtatctccttacaccatacttactctccaattaaagataataacaagatcctaattccacctagcaggatgcaactatcctgcaaacaaacaaaaatgaacaaatcctttccctgaggataaaaagtccatgagtgatatttactcttctcctgatatcccataacttaaatactatgaggaaaatacttatacatacttacataagtcagtaaagggaagaaaacaaaggtatttccttcatatatgtatatatacacacaaatttacttataaaaawtagggaggaaatattcatgatgattatagtccttgtttttctaactggtcatgtggttgtagctggtatttataactaccttcttatactacccattctgtgtttcctytgccttcagcaaacatctcattcggtcttggctctttacctagcaaggtgayccaaamcatcattcctgaagggtctaggccatttgtagtcctgcctggattgaattgtagttttccattgaccttaattacagggtatggtaatactaagatatgccccatgggatatcctgtattctagacatatgcttctttacctccattatggagtggttatccaatttccctttgattgcctggatcaatcatcctcatagacacacccagaaatgatattttatcagctatctgggtatcttttaacctagtaatgttgtcatataaaattaactatcacaccccggaagagccacatggtaagattttaggacttctatttcttcctcattcagagcagacctacwtttatctgtcttatatgttagaggtgctctatgagatatcatttgtagggggatgggggcttacttgtgtattagtcatgattctttagttttaagtgcacaaaccawatagaactagcttgrgcaaagaaaaaatgttcacataactgagaagtcaayggctaatcagggactttaggcacaatgggattaagggttcacacaaagttgtctgggctttctcytgtctatgtgtcagtcttattctgtcctactctaggggcactttttctgcaaagagacagaaagtggctgccaatagctccaggttatattatactagcttagcaatgccatcagaaaatgagagcttcttcctcctagggtttatataatcatagcaaaagactcaaatatcctgcttagtttatctaaccacccccttggaccaactgccattggcttggacagctattctaaaactttagcatgcatcaacatcacctcaaagacttgtcaaaaaatgctcactgtgccctactcccagagtttcttatttggtaggtctgggatagctcctcaaaatatgtgcttttcaggtgatattcaaactgctgctccagtgaccacactttgtgtaccactggctataatgaggaggtactcataatcaaatcaagtcacagggccaggccagattctaaggagatagagtgtgtttcaggggaatagattccatttcctaattggaagagcagcaaataatctgtggccatctttaatctacgacaggagacatggtgaaaaggaccaacataagtgtaattgcctcctagaagggaagggaaaagagaacaaagaatttttcacaaatgatagaacacattaacccatatattcaagaagtgctacagattcccagaacaatcaatacatgaaaaaactcatctaggcacatcttggcaaaactaattttaaaaaagcaagggaaaaatcttaagccctgctaaagaaagatgacattattttcaaagaaacaacaataacattaacaggttacttctcaaaataagtaataggatcgaagaaaaagtgggatgacgtatytgacatgctacaataaagaaacttacaacatagaatttcattcagagcaaattattcttcaaatattaaagcaaatttaaaacattttagatagtgaaaaaatatggaggatggagataaaggcgtgttcagaagaaaatgattagccttacaatccatttatttgaaaagatgactgaacattaatgatttaagatttatctcaagaaattagaaaaacrgccaataaaacccaaagaacatatgaggaaggcaacaataaaggtaagagcaaatattaatggaataaaacaaaacattcaatagaaaaatcaatagcaccaaataatggttctttataacaatgaataacttttataagcacctaacaaagctgattaagaaaaaagtgatagcatgaattttaaacatcaataattaaaaagggaacrtcactaaagacattataaatgttaaaaagataacaggaacatattaggagcaactctatgrcaataaatttggaagtttaaatgaaatagactaatttctagaaagatgaaacccacaaaaaccaacacaaaaagaaaygaaaagtctagataattccctatttgcccaataattgaatcyatactttataaagcttcccacaayaaaatatacaggctcatgttggcctttctgttgaaattttataaacatttaatgaagaaactatactaactttacacaaatstttgtagattttagaaaaagagagaaaaaatacaaactcactttatcagaacaacataacattgtcccaaaatctgaccaaaaaaattacaagaaagggaaattactagtcaatctctgtcaagaacatagatgtatatatcttaggaaaatattaagaaattgaatccagcaattcacaaaaaggctaatccatcatgacycagttgagtttcttctagaaatgcaagattggtttagctatcaagatattaatccagggygagccatgatggttcatgtgtataatctcagaactttgggaggccaatgtgggacgatcacttaaggtcaggagtttgagatcagcctcagcaacatagcaagacctcatttctacaaaaaaaaawttttaaamatcaaccatttgtggtggcacatgcctgtagtcccagctattcagaaaattgaggcaggaggatagcttgagtccaggagtttgagaccgcagtragttatggtcatgacactgcactccagcctgggcaacagagtgagagcctgtctcttaaaaaaaaatccataaaattcaccaattaacaaaatggaaaaaaagtataatcatctcaataaatgcagtaaaagyatttcgtaaaatgtagtatctatgtaagaaaaaactcaaatactaagaataaaagggaacatccttaatctgacaaatcttatcyacaaaaatagaagggactacaataaacattatrctcgtgaaatattaaaagctttttctctaaaatcagcaatgagataaatatctctactattacaatttctaccaccattaaactgtacatgttagctagtgcaayaaggcaaggaaaagaaggtgtagtcactgaaaaggaagaaataaaactgttacatgcagatgacatgatcatgtatgtagaaagtccaaatgtatctgtacatttttaatactaatatgtgaattcagaaagttcactggaaacaagattagtagtaaaaaatctattgcactttcatatatgagaaaaaatamtattagagaaagaattgttttaaaaagaccacttacatagtggctcaaaaaatcaagtatttagaaataaatctattaaaagataagcaaaaatgccaaacccaaaactacaaaacawttatatgrggaagggatatccaactccaactccctctaggcatcctatctgccctacgtaaggggaggaaaagggaccgagtagcacttgtgaagattacagtgcaaggaaacaggctcactaaatgtgtgcaacttaattatagaactacagaataatacttccctgatgcctacaccttattaccatatcattaaaggcctattcaacagtttcttttctccagtgcatcatgtccaattttcaacaaaaaaattacaagatatattaaaaagtaaagtctgaagagacagaggaaacatcagatccaaattcagatatggcagatactctgaactaaaaattttttaaaattgtgattaatatgctaagagtkctagtggaaaaaaatagacaacatgcaaggatagatgattaatgtatgcagagagatggaattctaagaaaaaaataaaaaataaatgctagatatcaaaaacactgtaatagaaatgaagaatgcctttcatgagctcattagtagactggacatggttaaggaaagatcctctgagcttgaggatgtctcattggaaattccaaaactgaaaagcagagggaaaaagactggaaaatagaaaatagaatatccaagaacagtgaaaccaccacaaaaggtagttgagtaataggaatactagaaggatataaaagaaagaaacggaagaaatattttaagcaataatgactgagaattttttcaaattaatatcagacatgaaaacacagatccaggaagctcagagaacatcaagcaggataaattcattaaaaaacatacactcaggcatatgatattcaaactgcagaaaataaattaaaaaaaaaaaaaaaccttgaaagaagccagaggaaaaacaccttatctatagagaggcaaagaaaagaataacaaacaacttatcctcagaaaccatgtaagcaagaagagaggggagtgaaatattttaagtggtgagagaaaataaaaatcaccaatatagaattacatatgctgcaaaattatccttcaacaacaaaagagaactaaagactttctcagacaaaaattaagggaacttattactagtagacctgccttgcaaaaaatgttaaaacaaattcttcagaaagaagaaaaatgatatagttcagaaacttgaatttaccttaaaaaaggaaaaatgctagagaaagaaaaagtgaaggtaaaacaaaaacttttatttttcatattttccaatgatctaacaggtaacagtttgctcaaaataacaatagtaaaaatatattcaatgattatagcttatgaataagtgaaatgaattacagcaatgatacaagagatgggagagaagaattaggaatattttgatattttaaggtacttgtcctacccatgaagtgatatactgttatatgaaaatagacatggaatcactgtaaatgtgtatcagaaattctagggcaaccactaaaaaagtttcaaaaagaagtataattgatatattaagaaaggggagaaaatcaaatcatagaaaatgctcaattaataccacaaaagataggaaamgaatgagatacaaaataggaagaacggcaataaataaaaatcattaacaaatttggtacacattaacccaactaaatcaataatcacttcaaatgtcaatgggctaaayttactaattaaaagacagatatagtagattaaaaaataagacccaactacatgttgtctacaagaaacccactttaaatataaaagtagagggatacagaaagaactactttgctaatactaatcaaatgaaagctggggtagctatattaattttggtaccagaaaaaataaaagatctaaaatcaattccctaagtgtttaccttagaaaactagaaatagaagagtaaattaaatccaaagtgagcagatgtaaagaaataataaaaattagagcagaaatccaygaaaytgaaaacaggaaactaatacagaaaatgtattaaaacaaaagccagctctttgaaaagaccaatacaactgataagtctctagccaggataatagagagagaagacataaattacccatawcagaaatcaaaaaggggatattgctacagatcccatgggcattcaaaggataataatggaatagtatgaactctgcccacaaatttgataacatagataaaatggaccaattcttggaaggcacaatctgccaaaactcacacaataatatgaaaaacaagaaatggggaaagtattcyctattaataartggtcctgggaaaactsgctagccatatgtagaaagctgaaactggatcccttccttactccytatacaaaaattaattcaagatggattaaagaattaaactttagacctaaaaccaaaaaaccctagaagaaaacctaggccatatcattcaggacataggcatgggcaaggacttcatgactagaacactaatatatatatacatatatacaggttatatatataattatatattttatatatataattaatatatattaattatactttaagttctagggtacttgtgcacaacgtacagatttgatacataggtatacatgtgccatgttggtttgctgcacccatcaactcatcatttacattaggtatttctcctaatgctatccctcccccagtcccccacccggcaacrggccccagtgtgagatgttccctgccctgtgtccaagtgttattgttcaattcccacctaagagtgagaacatgtggtgtttggttttctgwctttgtggtactttgctgagaatgatggtttccagcctcatccatgtccctgcaaaggacaagaactcatccttttttatggctgcatagtatgccttggtgtatatgtgccacattttcttaatctagtctatcattgatggacatttgagttggttccaagtctttgctatttgaatagtgtcacaataaacataagtgtgcatgtatctttatagtagcatgatttataatcctttgggtatatacccagtaatgggatttctgggttaaatggtaattctagttctagatccttgaggaatcaccacgctgtcttccacagtggttgaactaatttacagtcccaccaacagtgtaaaagcattcctatttctccacatcttctccagcatctgttgtttcctgactttttaatgactgccattcttactggcatgagatggtatctcattgtggttttgatttgcatttctctgatgaccagtgatgatgagcattttttcatgtgtcttttggctgcataggtgtcttcttttgagtagtgtctgttcatatgctttgtccactttttgatggggttgttttttttcttgtaaatttgtttgaggtctttgtagattctggatattacccctttatcagatgggtagattgcaaaaatttcctcccattctgtaggttgcctgttcactgtgatggtagtttcttttgccatgccaaagctcttaagtttaattagataccacatgtgtattttggcttttgttgccattgcttttagtgttctagtcacgaagttcttgcccatgcctatgtcctgaatgatatggcctgggttttcttctagggtttttatggttttaggtctaacatttaagtctttaatccatcttgaattaatttttgtataaggtgtaaggaagggatccagtttcagctttctacatatggctagccagttttcccaggaccatttattaatagagaatactttccccattttttgtttttgtcaggtttgtcaaaaatcagatggttgtagatgtgtgctgttatttctgaggcctctgatctgttccattggtctatatctctgttttggtaccagtaccatgctgttttggttactgtagttttgtagtatagtttgaagtcaggtactgtgatgactccagctttgttctttttgtttaggattgtcttgcctatactggctcttttttggttccatatgaattttattttattttttattatactttaagttctagggtacatgtgcacaatgtgcaggtttgttacatatgtatacatgtgccatgttggtgtgctgcacccattaactcatcatttacgttaggtatatctcccaatagctatccctctcccctccccccaccccatgacaggccctggtgtgtgatgctccccccgtgtccaagtgttctcattgttcagttcctacctatgagcgagaacatgcggtgtttgggttttctgtccttgcgatagtttgctgagaatgatggtttccagcttcatccatgttcctacaaaggacatgaactcatcattttttatggctgcatagttttccatggtgtatatgtgccacattttcttaatccagtctatcattgatggacatttgggttggttccaagtctttgctattgtgaatagtgctgcaataaacatacgtgtgcatgtgtctttatagcagcatgatttataatcctttgggtatatacccagtaatgggatggctgggtcaaatggcatttctagttctagatccttgaggaatcgccacactgtcttccacaatggttgaactagtttacagtcccaccaacagtgtcaaagtgttcctatttctccacatccayatgaactttraagtagttttttccaattctgtgaagaaagtcactgatagcttgatggggatggtattgaatctataaattactttgggcagtatggccagtttcacgatattgtttctttctatccatgagcatggaatattcttccattttatggtgtcctcttttatttagttgagcagtggtttgtagttctccttgaagaggtcyttcatatcccttgtaagttggattcctaggtattttattctctttgtagcagttgtgaatgggagttcactcatcatttggctctctgtttgtctgttaatggtgtacaggaatgcttgtgatttttgcacattgatgttgtatcctgagacattgctgaagttgcttatcagcttaaggacattttggtctgagatgatggggttttctaaacatccagtcatgtcatctgcaaaagggacaatttsactttctcttttcctgattgaataccctttatttctttctcctgcctgattgccctggccagaacttccaacactatgttgaataggagtggtgagagagagcatccttgtcttgtgccagttttcaaagggaatgcttacagtttttgcccattcagtatgataccggctgtgggtttgtcataaatagctgttgttattttgagatatgttccatcaatacctagtttattgagagtttttagcctgaaggactgttgcattttttcaaaggccttttctgcacctattgagataatcatgtggtttttgtctttggttctgtttatgtcatgaattatgtttatagatttgtgtatgttgaaccagccttgcatcccagggatgaagacaacttgatcgtggtggataagctttttgatgtactgctggattcggtttgccagtattttattgaggattttygcactgatgttcctcagggatattggtctaaaattattttttttggttgtgtctctgccaagctttgatatcaggttgatgttggcctcatcaaatgagttagggaggattccctctttttctattcattggaatcgtttcagaaggaatgctrctagctcctctttgtacctctggtagaattcggctgtgaatcggtctggttctggacattttttggttggtaggctattaactattgcctcaatttcagagcctgctattggtatattcagtgattmaacttcttccttgtttagtcttgggagggtggatgtgtccaggaatttatccatttcttctagattttctagtttatttgcatagaggtgtttatagtattctctgacggtagtttgtatttccgtgggatcggtggtgatatcccctttatcattttttattgcgtctatttgattcttctcttttcttctttattagtcttactagtggtctatcaattttgttgctcttttcaaaaaaccagctcctggaytcattgattttttgaagggttttttgtgtctctayctctttcagttctgttctgatcttagttatttcttgccttctgctagcttttgaatttgtttgctcttgcttctctagttcttttaattgtgatgttatggtgtctattttagatctttcttgctttctcttgtgggcatttagtgctataaatttccctctacacactactttaaatgtgtcccagagattctggtacattgtgtctttgttctcaccggtttcaaaaaacatctttatttctgccttcatttaattatttacccagcagtcattcaggagcaagttcttcagtttccatgtagttgtacagttttgagtgagtttcttaattctgagttctaatttgattgcactgtggtctgagagacagtttgttgtgatttctgttcttttacatttgctgaggagtgctttacttccaattatgtggtcaattttrgaataagtgcaatgtggtgctgagaagaatgtatattctgttgacttggggtggagagttcygtagatgtctattaggcctgctygttgcagagctgatttcaagtcctggatgtccttgttaaccttctgtcttgttgatctgtctaatattgacagtggggtgttaaattctcccattattattgtgtggaagtctaagtcctttgtaggtctctaaaacttgctttatgaatctgggtgttcctgtattgggtgcatatatatttaggatagttagctcttcttgttgaattgatccctttaccattatgtaatggccttctttgtctcttttgatcttggttggttcaaagtctgttttatcggagactaggattgcagcccctgcttttttttttttttttgctttccatttgcttggtagatcttcctccatccctttattttgagcctgtgtgcatctttgcacgtgagatgggcctcctgaatacaacaccctgatgggtcttgagtctttatacaatttcccagtctgtgtcttttaattggggcatttagcccatttacttttaaggttaatattgttatgtgtgaatttgatcctgtcattwtgatgttcactggttattatgcctgttaagtgatgcagtttcttcatagcattgatggtctttacaatttggcctgtttttgcagtggctggtagtagttgtttttttccatctttagtgcttccttcaggagctcttgtaaggcaggcctggtkgtgacaaaatctcccatcatttgctagtctrtaaaggattttatttctccttcatttatgaagcttaatttggctggatatgaaattctgggttgaaaattcttttctttaagaatgttgaatattggcctccactctcttctggcttgtagggtttctgcccagagatctgctgttagtctggtaggcttcccgttgtgggtaactcgacctttctctctggctgcccttaacactttttccttcatttcaaccttggtaaatctgacaattatgtgtattggggttgctcttctcaaggagtatctttgtggtgctctctgtatttcctgaatttgaatgttggcctgccttgttaggttggggaagttctcctggataatatcctgaaaaatgttttccaacttggttccrttcttcccatcactttcaggtacaccaatcaaatgtagatttggtcttttcacatattccctatttcttggaggctttgttcrtttctttttactctttttttgtctaaccttgtcttcttgctttatttyattaatttgatcttcaatcactgataccctttcttccacttgattgaatcagctattgaagcttgtgcatgcattacaaagttctcatgccatggttttcagctctatcaggtcatttaaggtcatctccacactgttctagttacccattcrtctaatctttttaaaggtttttagcttccttgcgatggttttgaacttcctcctttagctcggaraaatttgttattcctgaccttctgaagcctactctgtcaactcatcaaagtcattctctgtccagctttcttcaattgctggcgacgagctgctatcttttggagaagaggcactctgatttttagaattttcagcttttctgctctgttttctccccatctttgtggttttatctrcctttggtytttgatgttggtgacctacagatggggttttcgtgtagatgacctttttgttgatgttgatgctatgcctttctgtttgttagttttccttctaacagtcaggtctgtcagctgcaggtgtgttggaatttgctggaggtccactcccgaccctgtttgcctgggtatcaccaamggaggctgcagaacagcaaatatgcagaacagcaaatattgctgcctgacccttcctctggaagctttgtcccagaggggcatctgcctatatgaggtgtctgttggcccctactgggagatgtctcctgtttggctacacaggggtcagggacccatttgcagaagcagtctgttcattctcagaacacaaacgctgtgctgggagaacmagtgctctcttcagagctgtcagacagggatgtttaagtctgcagaagttgtctgctgccttttgttcagctatgccctgcccacagaggtggartttagaggcagtaggccttcttgagctgcggtgggctccgcccagttcaagcttcctggccgctttgtttacctactcaagcctcagcaatggcggacgcccctcccccagccaggctgcygccttgcagtttgatctcagactgctgcgctagcagtgagcaaggctctgtgggcatgggacccactgagccaggcatgggagcaaatctcctcatctgctggttgctaagatcttgggaaaagcacagcatttgggcaggagtgtcccatttttccagatagtctgtcatggcttcccttggctaagaaaaagaaatcccctgaccccctgtgcttcccaggtgaggcaacaccccaccctgcttcagctcaccctctctgggctgcacccactgtccaaccagtcccagtgagacgaaccagttacctcagttggaaatgcagaaatcacccrtcttcttcatcgatcatgctgggagctgcagaccagagctgttcctatttggccatcttcttccctccacccctgcctcaaatagacctatatattttttttaaaattgwgataactaacctaaaagccttgactacaccrttatgcaatctatgcatgaaacaaaattacccttgtgcaccataagtttayacaaatttttatttttttaatttttaatttttgtgggtgcatagtaggtatatatatttatggggtatgtgatatgttttgatacaggcatgcaatatgaaataagcacatcatgaatagggtatccatcctctcaagcatttatccattgagttgcaaacaatccaattacacactttaagttattatgaaatgtagttataattgactatagycatcctgttatgttatcaaatagtaaatcttattcattatttctrgcyttttttagtacccattaatcatcccaaccttctcccccatgaacccctgactacccttcgcaactctggtaasgatccttctactttctatatccatgaattacattsttttgacttttagatgccacaaataagtgagaacatctgatgtttgtcattctgtgcctggcttatctcatttaacaaaatgatctccagttccatctatgttgttgtaaatgatgaatctcattctttttatggctgaaaggtactccaytgtatatatgyaccacagtttctttattcattcgtctgttgatggaaactaagtttcttccaaatcttgttgtagacagtgctgtaacaaacatgggagtgtagacatctcttccatacattgattttctttcctttgggtatatatacaacagtgagattgctggatcatatgggagctcaatttgtgtttcttgaggaacctccaaactgttctccatagtggttgtactaatctacattcccaccaacagtgtacaagtgttcccttttctccatatcctcaccagcatttgttattgcctgtcttttggatataagccattttaactggagtgaggtgatatctcattgtagttttgatttgcatttctctgatgatcaatgatactgtgcaccttttcatgtgtgtgtttgccatctgtatgtcttgaraaatatctttcacccatgttttgattaaattattatgttttttcctatagagttgtttgagctccttaaatactctgattactaaccccttgtcaaataggtattttgcaaattttttctcccattctataggttgtctcttcactttgttgattgtrttctttgttgtgcagaagctttttaacttgatgtgatcacatttgtccatttttgctttggttgcctgggcttgtggggtattgctcaagaaatttttgcccagaccaatgtcctagagatttcctcccatgttttcttgtagtaacttcatggtttgaggtcttggatttaaatctttaattcattttgattttttaaaatatagcaatagttaggagtctagtttctttcttctgcttatggatatccagttttcccagcaccatttattgaagatactgtcttttccccagtgtatgttcttggcgcatttgtcsaaaatgagttcactatacgtgtgtgaatttgtttctgtgttctctattctgctccattggtctctgtctctgtttttatgccagtaccatgctgttttggttattatagctatttgaagtcaggtaatgtgattcctacagttttgttctttttgcttagaatagctttgggtattctggttccatgtaaactttaggattgttttttctatttctgtgaagaatgttattggwatttgaaagagattccattgaatctatatattactttgggttatatagacattttaacaacattgattcttccaatctatgaacatgagatattttttcattttttgatgtcctcttcaatttctttcattagtgatytatartttttattatagaggtctttcttttcttggttaattcctatatatttaatkttatgtrtggctattrtaaatgattgcttttttatttctttttcacattgctcactggtggcatacagaaatgctactgatttttgtctgytgattttgtatcctgcaactttactgaatttatcagttctaattgtttccttgtggaatctttaggtttttcccaagtataagatcatatcatctgcaaacaaggataatttgaattcttcctttccctttttttttcttctttttgagacagagtcttgttgtgtcacccakgctggagtgcagtggcatgatctcgattcgctgcaatcyccacctcctgggttcaagcaattattgtgtctcagcctcccaagtagctaggactacaggagtgtaccaccacacctggctaatgctttgtgttattagtagagacagggttttgccatgttgcccaggctggtcttgaatgcctgagctcaagcaatccacccttcttggtctcccaaaatgctgggattataggtgtgagccactgcacccrgccttaattcttcctttccagtttggatgcccttcatgtttttctcttgtctcattgctctagctaggacttccaggattatgttgaataacattggtgacagtgggcatacttgtcatgttccagatcttagaggaaaggctttcatttttttccccattcagtatacyagctatgggtctgtcatatatggcttttattatggtgagctatagtccttctataccctgttattttagggtttttatcataaaacaatgttgaattttaccaaatgctttttcatcatcaattgaaatgattatatggtttttatccttcattctgatgatatgacatatcacatcaattgatttgcatatgttgaaccatacttgcatcccagggataaatcccacttggtcatagtgaatgagcattctgatgtactgttaaattcagtttgccagtattttgttgaggatgtttgcatcaatattcaccagagatattggcctgtagttttctttttttcatttgtctttggttttggtatcagggtaatactggcctcacaggatgagtttggcagtattctttcctcctctatttttctgaatagtttgagtaggactggtattagttcttgtttggtaaaattcaggattgaagccctgatgtcctgggcttttctttactatgagactttttattaatattatggctttgacctcattacttgttatyggtctgttctggttttggatttcttcttgactcaattttggtaggctgtatgtggctaggaatttgtgcatttcttctagattttccaatttattggcatatagttgctcacmgtagctactaatgatcctttgaatttctgcagtatcagctagaatgtctccytcatttctgattttatttaattggatcttctcttttttttcttagtctagctaaaggtttatcaattttgtttaacttttcaaagaaacaactttttgttccattcatcttttgtattctctctctcaattcaatttcatttatttctgctctgatctttattatttcctttcttctactaattttgggtttggtttsctctggcttttctggttctttaagatgcatcrttagattgtctatttgaaattttcccttttttgatatagacacttatagccataaaattctatcttactattgcttttgctatattccataggttttgctatgttgtgtttcattatcatttgtttcaagaaaatktttaatttccttattaatttcttcattgacccacgggtcattygggagcacatattttaacttccatctatttctatattttccaaaattcctcttgttatttatttctagttttattccattgtggtcagagaagatacttgatattatttcaattttttgaatgttttaagacttgttttgtgatgtaacatatggtctgtccttgagaataactcacgtgctgaggaaaagaatgtgtattctgcagctgttggatgaaatattctataaatatctattagatccatttggtgtatagtgcagattaagtctgctgtctgtttgttgatttcctgtctggaacactggtctaatgctgaaagtggggtgttgaagtctctagctattattgtattggggcctatctctctctttacctctaataatatttccttcatatatctgggtgcatcagtgttgggtgcatatatatttaaaattgttatatccctgtgatggttaatattgtcaacttgattggcttgaaggctgcaaagtattktttctggatgtatctgggtgtttgtaggtgttgccagaagagattaacatttgagtcagtggactgggagacaaagacccaccctcaagaagacccatccacagtgtgggtgggcaccatccaatcagctgccagcatgggtagaaaaagcaggcagaagaaggtagaagaagctgacttgctgagtctttcagctttcatctttctctcattctggatgcttctgatctcaaacatcagactccaagttctttggcttttagactgttggactcacaccagtagtttgccagggsctctcaggactttggccacagactgaaagctrcactgtcagcttcccttctyttgagattttgggactcggamtgagccactactggcttccttactcctcaacttgcagacggcctgtcatgggacttcatcttgtgattgtgtgagtcaattctccttaataaactccttcatttatacatatattctttagttctgtccctctagagaaccctaatagaatcctcttgctgaattgaccactttgtcrttatatagtgaccttctttgtatcttcttacagtttttaaycttgaaatctattttgtcttatataagcatagcaactcctactcctttgatttccattggcacggaatatcattttccatcccttttttagtctatgtgtgtctttataggtgaagtgtgtttcttgtatgcaacagaccartaggtattgttttttttcacccattcagccagtctatgacttttgattggaaagygtagtccatttaccttcaatgttattattgacaatattattgacaagaacttactcctaccatttgattatttgtcttctgtttgttttgtgctrttctcttccttctttctttcattcctgattttgtgaagatgattttctctaataatatgatttagttccttgccttttattctttgtgtatttgttgtatgttttttgrtttgaggctaccatgaggtttgcaaatactattttataatccacttttaacctgataacaacttaatagtatttgcataaacaaacaagaaaaagaaaactaataaaacttgcwttaactttgtcctcccatgttttaactttttattgtttctatttatatcttcttawactgactgtgtcttaaaaagttgttgagttgttatttttgattggttcattgtttagtctttctacttgggacaagtatagtttacatgccacaattacagagttataatattctgtatttttctttgtacttactattaccagtaagttttataccttcaggtgattatctattactcattactatccttttctatttgattgaagtactccctttggcatttcttgtagratggttgtggtattaatgaactctctcaacttttgtttgtcagggaaaaacatttctttctccttcatgtttgaaggacatttttgccagatatactaatctggggttaaaggttktttcccttcagcattttgaatatgtcatgccactctctcctggcctgtaargtttccactgaaaagtttgctgccagacatattggagctccatagtattttgtttctttctcttgctgcttttagaatgctttctttatccttgacctttgggagtttcattataaaatgcctcgatgtactcttgtttgggttaaatctgcttggtgtttaaccttcttgtaccgggatactgatattttcctctaagtttsgaaagttctcattattatccttttgaataaactttctacccctatctttttctctaactcctctttaaggccaataactgttagattttcccttttgaggctattttctagatcctgtaggtgtgcttcattgttttttattcttttgttttgtcttttctgactgtgtatttcaattagtctgtcttcaagctcactaattttcttctgcttgattaactccactattcaaggactctgatgcattcctcagtatgccaattgcattcttcaactccagaatttctgcttgattcytttaaattatttcaatatctttgttaaatttatctgatagaattytgaartccttctctgtgttatcttgaatttctctgagttyctttaacatgggtattttgaattctctacctgaaatrtcacatatctctgtttctccaggattggtccctcgtgccttaytgagttcatttggtgtggtcatgttttcctagatggtgttgatgctagtagatgttctccactgtctgggcattgaagagttcagtatttattgtggtattcactatctgggcttatttgtagctgtccttccttggaaggctttccagatatttgaaagaacatggatgttgtaatctaagttgtttctgctttcaggggcaccctaagtctagtaacactgtggttcttaaaagatgtcttaaaacttaayaagaaaacatactcacaaaaacctgaccttaaaatgtacaaaagacctgaacagagacctctccagagaagatatacagatggmaaawaaacatatgagagatgctcaccatcatatattattaggttactgcaaattaaaacaacaatgagatactaccacatatctaacagaatggccaaaatccaacacactgacaatgctaaatactcatgagcatgtggaacaacaagaactctcattcacygcttgtagtaatacaaaaggtacagccactttggaagacaatctgtcagtgtctttcaaaactaaacacactctcaaatataacatggatgaacctgaaggacattttgctaagtgaaataaaccagatacagaaagacaaatactgcattaactcattcatatttgaaatctaaaaaggttgaactcatagaagtagagagtccaatgatgattactmraggctargaggctgaggagggaggaaatgggagatggtgatcaaagagtacaaagtttcagacagacaggagcaataagktttgagatctattgcacggcagggtgactacagccaataataatgtacagtatatttctaaataactaaaagtaaatttcaaatgcttcaacataaaaaatggtaggtaagtgacatgatsgctatgctgattagcttgatgtaaccattttacactgtataaatctatcaaaacatcacattggaatccacaaatgcatataattacaatttgtcaattaaaagtaatatcattaaaatgtttaaaaactaaatacacttttatgatacaatctagcaatcatgatctttagcatttatcyaagtaagttgaaaacttacgtgcacacaaaaacctgaacatggatatttatagcagctttattcacaattgccagcaacaaaaacgtccttcaatgggtaaatggataaattgtagtagatacagataatgagatgttactcactaataaaaacaataagctatcaagctaatgaaaagatattgaggaaacataaatgcatattactaagtgaaaaatgccaatctgaaaaggatacttactgtatgattccaactgtatgacattctggaaaaagcaaaactatgsagacagtaaaaagatcactggttgccaggatttaggcgggagggaggaatgaataggtgataggtggagcayggaaawttttttttttttttttttttgagacagggtcttgctctgtcacccacactggagtgcagtggtgcaatgtgggctcactgcaacctccacctttcgagttcaagtgattctcyrggctcaggctcctgaatagctgaaaatacaggcgtccrccaccacacccagctaatttttgtatttttatagtacaggtagggtttcaccatgttggccaggctggtctcaaactcctgacctcaactgatccacccgccttagcctgctaaagtgctgggattacaggcatgagccaccatgcccagctgagcacagataatttgtaggacactgaaaatactctgtatgatagaataatggtggatacatgccatcagatatttatccaaacttttagaacgtacaacactaaaagtgaaccctaatgtatactataacctttgggtgataatatgtcaatgtaggttcatcaactgcaacaaatgtaccactctggtacaggatattgataatggggaaggsyatgtatgtgggagtagaggcagagtagatgggaaatctataaccttcctttcaatttggtggtgaaattagaattgagctaaaaactaaagcttacttttaaaaaatcactgagacatattaaagacaaagtaactaaatggaaggctatacaatgtttgagaactattaayagaaaactcaatattgtaaaaatgacaattatccctattgcattagcatcatgcaatatgctgattgcaatgatgatcagcatcatcacaatcaaaattctagctagtattttaaaaatataaattgataggctacttgtaaaatgtatatacaaatgcaaaaggccatgaatatccaagaacaacctgaaaaagagtaaagctggaggacttatgctatcagacatgaaaacatattcaaaactataataattaaaatagaatgttttgcctaargatagacaaatatataaatggaatacaatcaaaactgtctcacacatatatgaccacttaatttaactgtaatctaaatataaaagtaataccacaaatttctaggagataggaaaatattgttatgacttgagtagacaaagattttttaagcaggacagtagtcactaaccataatgagaaggactgatgaaytggactacagttgacctttgactaacaagggttcaaactatgcaggccyatttatatgcagagtttytcaataaatgtactggaaaattttttggagatttgccacaatttgaaaaaactcacagatggaccatgtagtgtagtccaaaaatatatttaaaaaaaagaaacrgttatgtatgtcatgaatgcacaaaatatatgtagatactaatgttttatcatttaataccataaaatatatacaaatctattataaaaagttaaaatttaacaaaactttggyatacaaacacaagaccttacatggcaatattcacagttgagagaaacgtaaacaaacataaagatacagtattaaatcataaatgcataaaattaactgtagtccatactgtactactgtaacaattttgtagctacctcctgttgctgttctgctgagctcaagtgttgcacgtatctacttaaaacacaatgtgacgctaatcatctctgcttgagcagttcctctctccagtaaattgtttattgcaataaaaattccttaggtatatttccccgtgtttagcgccataccgtaaacctagaataacaccaaaaggactcatatgaaatgccactagtgatgctggaagtgctcccaraaagcagagaaaaagtcacgacattccaataaaaagttgaattgtttgakatgtaccatagaatgaggtctgcagctgtagttgcccaccatgtcagataaacaattcatcttgtaaacagacaatgtaaacttaagatattgagcaatattacacagtactaaaaatgcattctcttttcctcatgattttttaaataacatttttctctagcttactttatcataagaatacattatataatacwtataacataaaaatgtgtgttaatcaactgtttatcagtaaggttttcagtcaacagttggctattcatagttaactttttgagtcgtcaaaagttaaacactttgttttttttttcttttgagacggaattttgctcttgtcacccaggctggagtgcaatggcgcaatctcggctcaccgcaacctctgcctcctgggttcagttgactctcctgcctcagcctcccaagtagctgggattacaggyacgtgagaccacacccagctaattttttgtatttttagtagaaatggggtttcaccatgttagccaggctggtcttgaactcctgacctcaggtgatccacccacctcggcctcccaaagtgctgggattacaggcataagccaccgcgctgggccacacacgtatttttcaactcatggaggtaaamacccccatgttgttcaagggtcaattgtacattaaaattaagcacttctgttcaccaaaagagatatttaaaaggcaagccaaagagtagaaaaagttatttgcagtatatgtataatttgtatggatatattttaaaatcctacaaaataataataagaagaaggtaactcaatagaaaaaaatatgggcacaaaacttcaacaagcactttccaaaagaggatattctgaatggctgataaatgtttgaaaaggtgctcaactttattaattttcaaggaaatgcaaattaacaccaccataaaacactgctgtgtaactaccagaatggcaatatttataaaataaatgctattgtatatatataaggtacrtaacatgatgctataagatatatagtaaaatggtttctgtagtggaacaaattaacatatccatcatcggccaggcgtggtggctcacgcctgtaatcccagtactttgggaggccaaggcaggcagatcacctgaggtcaggagttcaagatcagcctgatmgacatggtgaaaccctgtgtctactaaaaatacaaaaaattagccaaatgtggtggcaggcacctgtagtcccagctactcgggaggctgaggcaggagaatagcttgaacccaggaggtggaggttgcagtcagccgagattgcgccattacactcctgyctaggtgacagagcaagactctgtcttttaaaaaaatatgatgataatgataatttgctgggtgtggtggcaggcgcttggagtcccacctacttgggaggctgagctgaggcaggagaattacttaacccgggaggcagaggttgcagtgagctgagactgagccactgcactccaacctgagtgacaagagcaaaactctgtaaaaaaaaaaaaaaaamaaaaaacaaacaacaacaacaacaacmaccaaaaaaaaaaccatcatagttactcagctataacctcatttagcaaaagtcttgaatacaatacactatgatcaaccatattcctcgtgttttacagtggatcttttgacttgttaatccatcatatttattattttgcatcctttgacctacatctccccatttctcctcccaactccaaccctggtaactactgttttattttccatctctatatgtttgaccttcccctgtcaccccacccacccagcagattccacatataagtgagaatatgacatatttttctttccatgtctggcttatttcacttagcataacatcctctaggtctgtccatgttgtggcaaatagcagaatcttatccttttttaaaactgaattctttatcattcatccattgatggatacttaggttgtttctgtatcttggctattgtgaatagtgctgcaatgaacttgggagtgcacatatctttacaagatggtgatttcattkcctttgggtaaatacctggaagaggattgctggatcataaggtagttctcttattaattcctttaagaacctccatactgtttccacaatggctgtacccatctacattcccaccaacagtatacaaggsttcccttttctccagaccttcagaatggcaatatttaaaggattaacaatacaaaatgttgatgaaactggagaaaaactataattttcatatttctgytaggaataaaaatgtggaaaattgttcagcagtatttacaaacactggayatatatacgtatatactttatgacccaataattttacttccaggtatttatcaaacagaaatacatatatctatttgyacatcaaaaggcatgtgcaggatgttcagagtagcactatctatatagccaaatgacataatgcccatcaataatagaataaattatgatgtgttcataccatggactactacacagcaatgagaatgaacaagctacaatcacttgcaacaatatggatagatctcacaaatacaacattaaatgaagaaaatcattcataaaattgtacctaatatatgattccattaatgtattrgtcaaaaccaggaaaaactaattaatgatgayagaagtcaggagaatagctgattctgggcatggtaagggagaggcatggctgaagactggtagggcatattaggaggttttcaagggttgattctgttttattctgatctgcacagtgctgaaataggcatgttcactttgtgaaaattcactggctatatgcttgcactttttaaaatmcgtacattacttttgtgcatatgttacctgtgattaccacaaataaagattctacacaaatatacatctgcacaaatatttgcataaagacagaaaataattctaaacactatactgaattcacagctaaaattttaaaaaacttgttaaattaaccagatccatgatataaataagtgaacaacactataaaagatgactttagaagattccttttatgtctgtgtattataaactgtccatcttatgattcatccctggtttcttgaataaaatcattaaaatagttgtcagctcttatagacctgaagcaatgtgatcaactttccgaaggtataggaaagagaaatgaaaagagccaaaggctgtttccattttgaaaacatwggctttgggtataaaaaacaaaagtaatacttggcttagattggtacctatgttaacttaattacaaactgatcttttattgtttttaattaaatgctactgttttcaattttttactaaaacatgtattattaaataagggagactcccaaagatacctactctaaaatgctctaagaatgaaaataattggtctttatttataaatgaatcttttaaaataaaataataagtgactattaggagatctgtgatcttttctcatctctatcactatgcacatttatagatgatgaaactggcraaaaaaggtaaatgacacaccttaagcaaatcatttacctttttttggtcagtttcatcatctataaaatgtaagaattggataagttctcattcggccttagcattctatgtataaagcaaatgtatatgaagctaaactttgtaagatagtagattatcctagctaatattaactcttgcgtaaaatacacagaagcattctgttcattaattgtccttaaatatgtatcattcataaccttgaagtcaytataattacgaatttatgatgccaatttactgatataaattttgaaagtatctcttctttcttgtaataattaagataattaatcttaagattaacaagtggttgctttatagctagaatgtacaattgttctacaattttagtattccaactctgtctgaaagattgtatgaagttatagagtctctttttccattgcatttttggaaagacacaacacaaataatattcccagaggaatactgggtttctcatatctctgataagattgataagaaatctggtagtacacttggtaagaaacagaatggtagaaggaaaaaaatcaatgatgcatccagaagacagcacttttctaggaaatgctatgttattttcaaacatgtccccaaatctgtacaagttattgtcagaaactgtctatctttgtaacaagtggcaacataaaaggaacctgttagtgttccagtttggagatcaccaaggtgagagaattcaaggtggaagtcacatgaaggacaacctgtatcaaaagtaagcaaaatgtctcagaaggatgctctgactcactgtgwtctttcttgataaacacacagaataatggattcgttactcagttttctctctagttagaatatttatgttaatgtattgggctgtgctcccccaaggatatggagaacaatattagataattaagcaagaacgaaatgctaaagaaacwgaaataatatgactacccacacttttcagctcaaaatatttctggtgttaagattagaatgacctacaaaagattcccatagaataaaaaatttataactgaaaatatctgtggcaaatatccagataaggaaagtgccttgctcaaggtcaaagctacttagtaacaggaatagaacctgttactaacaggcactgcttagtagttttgacctccaagtagtcagtgggcaatagacaaatagacaaaagagatacatctagttttcaggtactcaagagactttcttcatattattatatatgggttagcaaggtcccatcacaaaccttcataataaacaagggattaacatatatgaatgtgtgtgtatatttgtatatatacatatatatgttaacatatatgtatatatattccattacacacagtaacatgtttcccaattcactccctgtctgtgcccttcctccaactgtaatcttagcaaaccacaatccataaaaagctgagtaggggccattatcaagagaggcaaaagagacgagatttggtatctcttttcaagatctaagcatcttgacttgcagaggattgactttgtttgctaaagcgcactatccagttaggactgaaaaatattcccagaaaaatcctaggtaattctaacttttctaggtcacatttatcactgagactcattacatggctttcacaatgcccaaagacatcattatagataacctccaaattatataaatcttgcatagcaaagagagggtagataaagaatcccagctgtaactaaattattgaatcctaatcacaaaaggagactataaagactgttttataacagaaaggtctgtaggaaactatgctactgattttaaaaaattaagatatcaccaagatatgggagcatattgaggggaacgaagaggaaacagaagcctaccaaagcaggcttggaatgtctgcccggccagaccactggatcttaagctagttgcccattagagctcacctccatgctttttgaatattcccttttacatccacccagaagaattcattttctcactcttaatctagtgctcttgacattttactttgctcctttcctttcatcctttcaagattaatattagtcaaagttatattgttctactaaaaatttaaaaaatgcaaataattaggtggaaaatatgtaattaagaatactttgccttgaattttcctgataattgcttcaataatttccttgacaaaaaacatgagcttcatcttagtaaaactatatcttgttattaaatcacatactgtaacctagagtacagtggactatctaaaattcaatctgaatcttctaaactttttggcaaatgaaatcatcacaattcaagctagtttaagcaaaataaggtaaaatagtacctcaaaataaggtaaaatagtggtgcaagtagccagacataccatccatgggtatgtctggttatagccatagacagatccagggcaccagcaagagtatcaggacacagtatttttccattgtgtggctctgccaccacagtaattatcaggaaggctctatctctagtgtggcaaatatgagcaacagaagctccccacttaaattctcccagcttagcaaccctagtgaagagaaagaacctctttccgaagctccagcaaaatatggcaggacttatactcactgaccataacatggtttgggtcatacacccatccctgacaaagcatgtgagttttcyctttggacaagcctgggtttcagaccctgtggagttagaaggtagactcaaggccatctgaactatatatactaactggaagggaggaatagtttcctcttgtacaaaaacctggttctcttaccagaaaaagagagaatggattctggtcacaaggacaagaaacagaaggttcactaccagaacacatactctagaaaatacaaaagtacctcatgaaagcatatgttgccatggaatattcccaaagatagtattttacaaagatgtcaacatatagatgatcattatggatgaacaatataactcttggtgccttacagacaaagacatcttctgaaagagtatgaactttatatgccaacttgaaaattataaaatgttattgcctttttaatggtaggcaaaaaaactaggcaatcagaaaaaattcaaatgttacttcataattataaaactttttaatttaaaaaattcttcaaagttaaaataatttatacatttggycatttttttaaaaaaatgaacaggtttatatggtttcagtgctgcactgaaatgacatctatagttatttttaattgctatttacaggaatcttgatatccttgtaaaatctgttactatagaaatctcagcaaataattagctcctcagggaaaatccaactcttcataacttctagttgaaacaaaaaaaatagcctttagctcttcttcctaaataatgatacgtttattacttatacattgctgcccactacatttgtaaaataaaactaaattttttccttagaaatgcttwcagacattgtatccacctcttcaagatatttaaaaataaaaaaaatttattttaactgttaacaggtttagaaaaattaatacaccatggagtctatagccttgcaaattattttaaaatgattattttctgttctttgttttctgttcttttttctcccatttcacaatcccctgtggctagaaacagacaacaaattaagtacaatgaacattctttctgcttactagggacaagtgacttttttttttcttttttcttttttgagatggagtctcgttctgtcacccaggctggagtgcagtggcgcaatcttggctcaatgcaacctccacctgctgggttcaagcgattctcctgcttcagcatccctcctagctgagattacaggcatgcaccaccacgttcggctaatttttgtatttttagtagagacggagtttcaccatgtcggccaggctgagggtctcgaactcctgacctcaagtgatccaaccacctcagyctcccaaagtgctgggattacaggtgtgagccactgcrcccaacctgacaagtgactattttcaagctaagtaaattaaatgtatctctaaatagctcataaataataataagtgtaaatacttaactctaatgtatatatgttttattgtttatatatatatagtgtttaattctaaaaggaatttaaagcaactttgaagatgtcaaagtaaaataaacaagatgaagcaaaaggcaaagagagtataaaagcaagctaaaaccaagaatgaggtttgtactcagtatgcattccatgaagtccacttactaatagtggatgttaacctaggtactttagtttcaaagtccctcaagtgaacaatataggttattccaatacaaaataaaatactgaatkgcaaaagagaatcctacattgtatctgaagtatgtctgtaaacattagaacctagcaaaccgagcataatatgtatacatatacatagacatacatatacagagagatgcaaaattcttaaagcttgcatttatcctgagtttactactttattgattctgatatactcaagccagaatgattttatattgtcctaatacagacctattttcaatatgtgctaatsctatagtttgagtaggctaaaatgatttgttctaaatagtcatttttacatgatagggccaagcaaagttaaaattagaggttggatgcaccacaaataacagagagagcaggccaggcttagatccaaagaagcagagtcctggaagcccaaggcttattgattgatggatggagaatacaaggaagcaatgggtacaaaaaaaaaatggcaggtgcataaagttactgctaagagagagaatagagaattgggagcacatggtaaagaacaaaggaaaggtaaagaaagaaagataagaacagaaaaattttaacatagcatatgagtgaattacttcttagaagcctagtaggacttgctccagatttttttcttgataacccactgttatcactcacagattcaaaattaattctctcgcctttctgcaaatagcctaaaacgtattcattatttttttacaacagagttatcataatcaacaacatccaaagaaacaagaccttaaaatcaagcacaggctataatcctggctatctggtttttgcacagcatgtaatgatgtagattccaagcagtaggtgcttgggaaagagtcattggcaattctaagttaacagtttggtaggattcttgtgatcttcctcaacccaggtagcttcaagtgccccccactaaacctcttttctaatcagattgctacacttaacctgctcgtggggaccgtcacagcttggtcaaatagacctgggcttgactccycaattcacctattgacaaagaatatttatttagtttttcccagtttcaacactcactactattttggggattatactatttatctcaacaagctgctctggaagtcaaatgagatactgttgcaaagtacctagttatatccctgaccatcataaaatggtagatattataggcataggagagaagttnaagagcattggcattacagagggatatggtcttccagkgattggaaatgattttttctagagatgaaagctggttctaatccggtcaacctccttttcactgtgggaacccaaacaatcagtatctcaccctcaccatatgcacaatgakgttggattagatgtgatagatcatctctaaggtatgcttcccctctataaaattctgtggctatacaagtattgtaaattagaaattttccagttaatttcccttggggcttactagtcttacattgaactcccttcttttgtcctctagttttcatcattaatatttcaaatcatcakgaagaacaggtaagatgacaccaaccctaaaaaatagtatttagtattgtggatgatcaaaaccttttgaaacaaggcagaccttacattaaatcctgactctccaatattggttatacgaccttgaaaaagttttttcagckccctgagaatttgtttctattttacaaaatgaggctaatgagtaatacctaccttaaagtattagtttctgagagcttgaattctcctggcttctagtaggcattcaatattatattattttgtaccctgaaagaatcattaaaattcagctttaaatctttctggatatgcttaacacatttttgattgaagaacatggcaagtatcttaaagatattttacctccaaaatattgtctaatttaaaaagccaaaaataaagtaacagcaagttatcaaaatgatggctctaactttgctacaggttgagcatccttagtctgaaaatctaaaatccaaatgctgcaagacccaaaactttttgagccaccaatatgatgacacaagtggaaaatgccacaccacacctcatgtgacaggttgcagtcaaaatgcagtcaaaacctttccacgcacaaaattatttaaaatattgtacgaaattaccttcaggttatgtgcataagatgtatataaaacaaaaatgaatttcatgtttagacttgggtccctttcctgagatatctcattatgtgtatgcaaatattccaaattcagaataaaatgaaaaycaaaacactctgatcccaagcatttcagataagggatactcaacctgtaccaaactgtggcaagataagactattaaacatctgaagtgtacctcagattgaactatcaagaattacaaccacattgagaaatgtgctttaaaatgttgtmatgagcacacgttagtgatgagacaaaaattgttattcacttctgaaagacccctgaactgaatatttaagtactatttcaaagcctatttttataaaagtgcatcaaaatgttcagaaagattatttgtgaataatgaaacaccatttcaaagccagaaggaaaactagattggctcacttttcagttctcatattattagttcaataggtttatttaaaaatctctctgatcttttactctgactcactgaaagcaaattttgaaaagtgaaaaacctataaggcttttcattttctactaastatcttccacaaatctaacatcaataaaataagacagccctggacctgaatatgacagcctttacatggttctaatgcattgcctaccctatgcacagaacaaycactaaactcagcaggaaaaaagatcaatcagtaaaaataggaatttgagtttaattcaagtacctgggaataccaacatgctttcatataatctcagtactgattacttttaaaaaggcataacacttcatttaaaatgaatatctgagtgcagttgattatttatgccctttatatatctctaactattcaactaataataacaaaaacaataatcgttaacaatttcttgagtatatacaacagaactgaatcactgacttaaatactttacataatgacctcatttaatcctcaaaactattctacttacagttgataaaactgagtctgggaggagccaagatggccgaataggaacagctccggtctacagctcccagcgtgagygacgcagaagacgggtgatttctgcatttccatctgaggtaccgggttcatctcactagggagtgccagacagtgggcgcaggccagtgtgtgtgcgcaccgtgcgcgagccgaagcagggcgaggcattgcctcacctgggaagcgcaaggggtcagggagttccctttccgagtcaaagaaaggggtgayggacgcacctggaaaatcgggtcactcccacccgaatattgcgcttttcagaccggcttaagaaacggcgcaccacgagactatatcccacacctggctcacagggtcctacgcccacggagtctcgctgattgctagcacagcagtctgagatcaaactgcaaggcggcaacgaggctgggggaggggcgcccgccattgcccaggcttgcttaggtaaacaaagcagccgggaagctccaactgggtggagcccaccacagctcaaggaggcctgcctgcctctgtaggctccacctctggggggcagggcacagacaaacaaaaagacagcagtaacctctgcagacttaagtgtccctgtctgacagctttgaagagagcagtggttctcccagcacgcagctggagatctgagaacgggcagactgcctcctcaagtgggtccctgactcctgacctccgagcagcctaactgggaggcaccccccagcaggggcacactgacacctcacacggcagggtattccaacagacctgcagctgagggtcctgtctgttagaaggaaaactaacaaccagaaaggacatctacaccaaaaacccatctgtacatcaccatcatcaaagaccaaaagtagataaaaccacaaagatggggaaaaaacagaacagaaaaactggaaactctaaaacgcagagcgcctctcctcctccaaaggaacgcagttcctcaacagcaacagaacaaagctggatggagaatgattttgacgagctgagagaagaaggcttcaggcgatcaaattactctgagctatgggaggacattcaaaccaaaggcaaagaagttgaaaactttgaaaaaaatttagaagaatgtataactagaataaccaatacagagaagtgcttaaaggagctgatggagctgaaaaccaaggctcgagaactacgtgaagaatgcagaagcctcaggagccgatgccatcaactggaagaaagggtatcagcaatggaagatgaaatgaatgaaatgaagcgagaagggaagtttagagaaaaaagaataaaaagaaatgagcaaagcctccaagaaatatgggactatgtgaaaagaccaaatctacgtctgattggtgtacctgaaagtgatgtggagaatggaaccaagttggaaaacactctgcaggatattatccaggagaacttccccaatctagcaaggcaggccaacgttcagattcaggaaatacagagaacgccacaaagatactcctcgagaagagcaactccaagacacataattgtcagattcaccaaagttgaaatgaaggaaaaaatgttcagggcagccagagagaaaggtcgggttaccctcaaaggaaagcccatcagactaacagcggatctctcggcagaaaccctacaagccagaagagagtgggggccaatattcaacattcttaaagaaaagaattttcaacccagaatttcatatccagccaaactaagcttcataagtgaaggagaaataaaatactttatagacaagcaaatgctgagagattttgtcaccaccaggcctgccctaaaagagctcctcaaggaagcgctaaacatggaaaggaacaaccggtaccagccgctgcaaaatcatgccaaaatgtaaagaccatcgagactaggaagaaactgcatcaactaatgagcaaaatcaccagctaacatcataatgacaggatcaaattcacacataacaatactaactttaaatataaatggactaaattctgcaattaaaagacacagactggcaagttggataaagagtcaagacccatcagtgtgctgtattcaggaaacccatctcacgtgcagagacacacataggctcaaaataaaaggatggaggaagatctaccaagccaatggaaaacaaaaaaaggcaggggttgcaatcttagtctctgataaaacagactttaaaccaacaaagatcaaaagagacaaagaaggccattacataatggtaaagggatcaattcaacaagaagagctaactatcctaaatatttatgcacccaatacaggagcacccagattcataaagcaagtcctcagtgacctacaaagagacttagactcccacacattaacaatgggagactttaacaccccactgtcaacattagacagatcaacgagacagaaagtcaacaaggatacccaggaattgaactcagctctgcaccaagcagacctaatagacatctacagaactctccaccccaaatcaacagaatatacatttttttcagcaccacaccacacctattccaaaattgaccacatagttggaagtaaagctctcctcagcaaatgtaaaagaacagaaattataacaaactatctctcagaccacagtgcaatcaaactagaactcaggattaagaatctcactcaaagccgctcaactacatggaaactgaacaacctgctcctgaatgactactgggtacataacgaaatgaaggcagaaataaagatgttctttgaaaccaacgagaacaaagacaccacataccagaatcgctgggacgcattcaaagcagtgtgtagagggaaatttatagcactaaatgcctacaagagaaagcaggaaagatccaaaattgacaccctaacatcacaattaaaagaactagaaaagcaagagcaaacacattcaaaagctagcagaaggcaagaaataactaaaatcagagcagaactgaaggaaatagagacacaaaaaacccttcaaaaaatcaatgaatccaggagctggttttttgaaaggatcaacaaaattgatagaccgctagcaagactaataaagaaaaaaagagagaagaatcaaatagacacaataaaaaatgataaaggggatatcaccaccgatcccacagaaatacaaactaccatcagagaatactacaaacacctctacgcaaataaactagaaaatctagaagaaatggatacattcctcgacacatacactctccaaagactaaaccaggaagaagttgaatctctgaatagaccaataacaggctctgaaattgtggcaataatcaatagtttaccaaccaaaaagagtccaggaccagatggattcacagccgaattctaccagaggtacatggaggaactggtaccattccttctgaaactattccaatcaatagaaaaagagggaatcctccctaactcattttatgaggccagcatcattctgataccaaagctgggcagagacacaaccaaaaaagagaattttagaccaatatccttgatgaacattgatgcaaaaatgctcaataaaatactggcaaagcgaatccagcagcacatcaaaaagcttatccaccatgatcaagtgggcttcatccctgggatgcaaggctggttcaatatacgcaaatcaataaatgtaatccagcatataaacagagccaaagacaaaaaccacatgattatctcaatagatgcagaaaaagcctttgacaaaattcaacaacccttcatgctaaaaactctcaataaattaggtattgatgggacgtatttcaaaataataagagctatctatgacaaacccacagccaatatcatactgaatgggcaaaaactggaagcattccctttgaaaactggcataagacagggatgccctctctcaccactcctattcaacatagtgttggaagttctggccagggcaatcaggcaggagaaggaaataaagggtattcaattaggaaaagaggaagtcaaattgtccctgtttgcagacgacatgattgtttatctagaaaaccccatcgtctcagcccaaaatctccttaagctgataagcaacttcagcaaagtctcaggatacaaaatcaatgtacaaaaatcacaagcattcttatacaccagcaacagacaaacagagagccaaatcatgggtgaactcccattcacaattgcttcaaagagaataaaatacctaggaatccaacttacaagggatgtgaaggacctcttcaaggagaactacaaaccactgctcaaggaaataaaagaggagacaaacaaatggaagaacattccatgctcatgggtaggaagaatcaatatcgtgaaaatggccatactgcccaaggtaatttacagattcaatgccatccccatcaagctaccaatgactttcttcacagaattggaaaaaactactttaaagttcatacggaaccaaaaaagagcccgcgtggccaagtcaatcctaagccaaaagaacaaagctggaggcatcacactacctgacttcaaactatactacaaggctacagtaaccaaaacagcatggtactggtaccaaaacagagatatagatcaatggaacagaacagagccctcagaaataatgccgcatatctacaactatctgatctttgacaaacctgacaaaaacaagcaatggggaaaggattccctatttaataaatggtgctgggaaaactggctagccatatgtagaaagctgaaactggatcccttccttacaccttatacaaaaatcaattcaagatggattaaagatttaaacgttaaacctaaaaccataaaaaccctagaagaaaacctaggcattaccattcagtgtgacatgggcgtgggcaaggacttcatgtccaaaacaccaaaagcaatggcaacaaaagacaaaattgacacatgggatctaattaaactaaagagcttctgcacagcaaaagaaactaccatcagagtgaacaggcaacccacaacatgggagaaaattttcgcaacctactcatctgacaaagggctaatatccagaatctacaatgaactcaaacaaatttacaagaaaaaaacaaacaaccccatcaaaaagtgggcgaaggacatgaacagacacttctcaaaagaagacatttatgcagccaaaaaacacatgaagaaatgctcatcatcactggccatcagagaaatgcaaatcaaaaccactatgagatatcatctcacaccagttagaatggcaatcattaaaaagtcaggaaacaacaggtgctggagaggatgtggagaaataggaacacttttacactgttggtgggactgtaaactagttcaaccattgtggaagtcagtgtggcgattcctcagggatctagaactagaaataccatttgacccagccatcccattactgggtatatacccaaatgagtataaatcatgctgctataaagacacatgcacacgtatgtttattgcggcactattcacaatagcaaagacttggaaccaacccaaatgtccaacaatgatagactggattaagaaaatgtggcacatatacaccatggaatactatgcagccataaaaaatgatgagttcatatcctttgtagggacatggatgaaattggaaaccatcattctcagtaaactatcgcaagaacaaaaaaccaaacgccgcatattctcactcataggtgggaattgaacaatgagatcacatggacacagcaaggggaatatcacactctggggactgtggtggggtcgggggaggggggagggatagcattgggagatatacctaatgctagatgacacattagtgggtgcagcgcaccagcatggcacatgtatacatatgtaactaacctgcacaatgtgcacatgtaccctaaaacttagagtataataaaaaaaaaaaaaaaaaaaaaaaaaaactgagtctcarcaagtttaaataacttgatcagaccacacattaatgatggagctaggattgaattcagacatgtcctatatmtttcattcattcatgagtatattaatttattcagtgaatatctttgtcctaaagaaatgccactgtagcagaaagatggttgcaaattctttgtcactgtgctcattgaaaggcaaaacgtattgttctccccttaaatatagacttgccctgtgacttggtttgaccagtggaatgtggtggaagtgactaagatacttccaagctagcacaaaggagatctgctgtttttgctaycaccttcttggaatattctgggaaccataccactgtggagtgagaagcccaagccatgtaggaggccacagggagcagaaccaggacgtgccagtcaacagcctcaataaccagcaccaaagctagtcatgtgtgtaagcaatcttatgcatcttagggctgttgaacactgagatcaytgcagccccaactaacactacatgtagtggaaaaaccacccagcagtatacagtcaactcacagaatagcaagagacagtaaatggttgcttcaaacaaccaaattttggggtgactagttatgcagcagtggataaagagctgcaatatttttcttgaaatgagagcattgggtataatatagcaaaatacaaccctagaaataaaataagtaactataataatattattttggcataatatagcaaaatacaactctaataataagaaaaagcatgaagcaattgcttttctcttgtggctgggcatgatttttatactgaaagcctagtaaagtaggaaaatcagaagagactatggctctttttcttcacttatttattcatgtactcatttatttaaacttactcatttatatattcattaagcccctatttcttgttacatgtgagtgtctttgttaactactgtgggtcatactataaatcaagataagcctactgcctttaagaacttttaggtctaaagaaggtaaatactttttggttgattgactctaatgcattctcaaaacagtaaagtggaagttagaaaaattaaggaaagcaagggggaaaattggagaagcccagtccaagttttaatttttgctgttgataatacacaaggtaaattatgaaatatgtactgtacttatattttaatatttcatttctacccatagaatgttaagccccccaaaaatgaacataaaagagagtgtgtattcaattgcgtttgctcttctgcttggctctccttaaggcttctgagtttctaacctgtcaaaggattagtttccttaaatgcaaaattaagatgattctacccctacctgccccaaggtgtattatgccatgcaaaatgataattatgagataaaactattaaatctttatattggggtcagaacttatttacataaccatcttattcagaccatggcaatgcaaaagtgatattttatgcacttgtaagcagcagaagaaaataaaaattaactgtaaaagctctatccaaacttaattaaacaatgtctccacacattcaaataggagattctaatagggctgaggatcaaaatactcagtcctcctgtcctcaaagctgggtgtgggatgcaattggttccatcagattcctcccccaagaattgttagatttggagctaatggaggaagggcttggattttgagtcactggtcagaaggatgtgaatcaaacactgccccactatcttccctattacacagagaaagcctatattctataacaaaatatgagatccacacagacaaacagaggtgagggacagrccaagtcttgataacctcgcttggtcctctggatcaggctgtgcctaaaactgtgataaacgttcacttcaaagttgtgtgaaccaaaaattctcttttattattcaagttaatgtaagttggatttctgtccactgcttccaaaagaatcttgtctaaaaataaaattaaagcatcagaggtatwytgaaatcatctgagacctttcataacttgtttgggcaactaatctcttatgaggataaaagtatcatcattctcagtaaacgaccacaagaacaaaagaccaaacaccgcatatmctcactcataggtgggaattgaacaatgagatcacatggacacaggaaggggaacatcacactctggggactgttgtggggtggggggaggcgggagggatagcattgggagatmtacytaatgctagatgacgagttagtgggtgcagcgcaccagcatgtcacatgcatacatatgtaactaacctgcacattgtgcacatgtaccctaaaacttaaagtataataataaaaaaaataaaaataaaaataaaaataaaagtatctctaattgtaaactaagaaagatggtagttaaagcaagggacacaatgggtaacactcttatcctagccaccaacctgattgcattctttactttctagtcaagccccttcttcccttgtctaactacagatcaacacagatttttttctcatctttttttttttttttttttgagacagagtcttgctctgttgcccaggctggartgcagtggtgtggtgtgatcacggctcactgcaacctccacctcccaggttcaagagattctcctgcctcagcctctcaagtagctgggaaaacttggacaggtgcacgccaccatgcccggctaatttttgtatttttagtagagacagggattcaccctgttggccaggctggtctcgaactcctgacttcaagtgatctgccctcctcggcctcccaaagtgctaggattacaagcatgagccaccacacccagcttaacctgyctttttaatttccaattcacaaagtgctatcctccaggatgccaggaaatgaactgggggacagaagaaagagtcaagaaaagaagataaaacttagctkgtagcctagtggcataatagctaacatgtctaaccattagcaaatgctcaaaaatcctgagcccagaaaagccttattcactacckttacagaaataaatctagaaggttagctatgctgaatatgttagggaaatggagaagcactgctattttgataatcaattcaaaagaaaattaaatttactaatggaaactaccgctattcattttctggacatatgtaaagataaagccagcttaaaacaacaaataaccaacctartcttttaaccttcagatatggtgcaaaagcatgacctaaaagatactttttcattactagcgaagcaggctttagtctcaaactttaccttagaccattcaacgtctgcccatttgtcttgtactgacttttcctttcagtgccctggatgtcaagggaacttggctgccaaagactgaggctggaatcaaagtgctctgggctttcccaccagaactccatccatggggcatagaagcagacttggaaacagacaagtgctgtgtctgcaaaataaactaactagtgtagggcaaaatgggctctatsctttcctcaaccccagccccarsaaaaagcaagatccttgtggtcattttgcctttgcttacatccactgctgcctgaagctaaagaaaggctccttagtagaccatggtaagcccccttttatcctcctgctgtcagggatgaaagattccaagcctcaagtgcaacacagctgcagacgccgacttttccaaaagataaaaatcaaaacccaaaaaagaccacaagttcactttgaaattaaaaaaaaaaaaaaaaaaaaaaaaaaaaaaaaaaaaaacaggccttctcagagtggctactttccagacaccagacacacaaatgctttaaagacaaaagcaggttgttacatttgtcagggtgaataaaaagcctagagcaggactctcaagtctctctttctgtgctaaggaatgtcttcccaattttttgcagccttgaggaccgggagatgactgggaaattgctgacagggcagggaaagggctrtactctacatgctggcattcacagacaaacacsgaggggcagcaacagcaaagaggagtcttggtgstcttcctggagttcccaggctttactggccatggatcctgttattcaatcaaatacttattgtgtgcctactacatattgggcactattctaggccctgtggatgtattagtgaactaagcaggaaaaaaaatcacctactcatgtgaaggttatgttgcaatagactttggrgacagagacagacaataaattaaacaaataagtaaagtttataataccttagaaaataaaaagcactataaataaaataaagccaggaagagatataggaattgccagaagggcaaatggtagacttgccatttaaaattggcgttcatggaagattacaggaaaagtcaaagtttgaaagatttgaaggagggaagggagtaaaccagatatttgggaagaagagtggtagtggaaaagagagagcaagagcaaagactgagaggaaggaccttgccagccaygttcaaagaacagtaagcaggattcatgtctgcagtagagacagtratggggcagaggttagagatgaggtcagagaagcagttttggaccaaattatatatggattgataaaacaccagtttttgctctgatgtgggcagtcctcagaaagttttgagcagaggtatgayacaatataacttggctgctgaattgagaaggacagaagcaaggagattagttaggaggccattacaataatrcaactagtactctggcgatttcaataggcatcttaattttttcacagtctaccttcaaataatactatactacttcatacataatgtaataaccaagtcactgcaacagaatacttccattcctccctcattcctttgtgctattatcatattttactcttatgttataaaccgcacaatgcattattatttttgctaaaaagaaaattattttttcaaagaaatgtaaacatgaggaaagaaagtcttgcatattttcccacatatttactatgtcttgcactcttcattcttttttgaggtccaaagttccctctggcattttccttcatcttgaattttttttttattattattatactttaagttttagggtacatgtgcacaatgtgcaggttagttacatatgtatacatgtgccatgctggtgtgctgcacccattaactcgtcatttagcattaggtatatctcctaatgctatccctcccccctccccctaccccacaacagtccccagagtgtgatgttcccctttctgtgtccatgtgttctcattgttcaattcccatctatgagtgagaatatgcggtgtttggttttttgtccttgygatagtttactgagaatgatgatttccagtttcatccatgtctctacaaaggacatgaactcatcattttttatggctgcatagtattccatggtgtatatgtgccatattttcttaatccagtctatcattgttggacatgtgggttggttccaagtctttgctattgtgaatagtgccacaataaacatacgtgtgcatgtgtctttatagcagcatgatttatagtcctttgggtatatacccagtaatgggatggttgggtcaaatggtatttctagttctagatccctgaggaatcaccacactgacttccacaatggttgaactagtttacagtcccaccaacagtgtaaaagtgttcctatttctccacatcctctccagcacctgttgtttcttgactttttaatgattgccattctaaatggtgtgagacggtatctcaytgtggttttgatttgcatttctctgatggcyagtgatggtaagcattttttcatgtgtcttttggctgcataaatgtcttcttttgagaagtgaaattttctttatgatttcttctagtgcagaaaggctgagaatgagttatctcagcttttgtttgtctgaaagtgtcattttaccttcacttttgaaggatattttcactggggatatagaattctaagtcaccatatttttttctgcccatgatattaaagatgccattttattatcttctagactgcattgtttctagcaaaaaatcagtggtatgtcttactttgtttctctgtaagatgcctttttctttggctgcttttaagacttttaaagaatctctgattgtaattgtgatatacattagtatagtgtttttatgcttattctatttgggactcattgagcttcttggatctgtaggtttacagatttcatcaaatttggggatttttcagtcattaattttctatctcctgtcccatcttttcattctgggattccagttacatatgttagaaccctgtgttcccatgggtcactgaggccctgttcattatttttgagctttatttttcctctgagctttagttcagatagtttctactatgtctttaagttatatgattgatcttttttttctggagggtccaattaactgttatcctcatctagttagtttttttattcctgatactgtgtttctcagtttagaagttccatttgattttttctgtatttttcatttgtcacttcattgtgtccatattttaattgaaatctctatacatatttacatggctgttttaaaatctttgtctggtaattccattatttctattattcctgggtctgattctattgactaatttgtctcctggttatgggtcatattttcctgctactcagagtgtctagtactttttaattagttgaaaracactatgaacattacgttgctgaatatctggatttttctgtcttcttctaaagactgttgaaggttattttggcaagcagtaaacatttcttgcaaatgagattttaaaggcttatgtttatgatctgttaagataagtcaaatgtagcctttaccttagagctaatttagtcctcctactgagacattacccttttgggtatctctaatgaatgcacgaggtgttcagtgcagtctcccaatgtggtgggaactgaaacatctcccagccctgtgtgagatctgggaaaggtttagctcacagttatccagtcacttccattgcccaacctcgtgaagcgtcaccatttgcatgaacatcttagcattcagcaaaaattcaagaagaatcctatgcatatttctggaactattttttatacataattctttcctcctagtgctctgtaccacaaatgtcagtaactttgttctccacaaattccaattttatcccttcaactcaaaagtcctgctgggctttgattatgtttcatttctctgtggcatagtccagaaagtaccttcaggctaaacttggagtgagcttagaaattatcttgtctgttgtccttctctcaggagccacagtcctacaataccggttgtccaacaaccaaaaatcattattttaaattttgttcaattttctgggtttctttatggtgggagagcaaggacagagctagaragaacttgaaaaggaagtccacatccttcccttttgtagatgaagcaacagagactcagggtggagttgcagtacactcaaggtcacacagctactggtagaagcattaagctcagaagctgttttcgaagtccaatgtctttctcactccagcgtgctgcctcttacagaatgattggtagagtgtagcgtattagtttcctagggctgttgtaacaaattattacaaactaggaaacttaacacaatagaaatttattcttcctggccgggagcagtggatcatgcctgtaatcccagcatgttgggaggccaaggcaggcagatcacttgargtcagaagttcgatgccagcctggccaacatggtaaaaccctgtctctactaaaaatataaaaataaaccaggtgtgatggcacttgcctatattcccagctatttgagaggctgaggcaggagaatcacttgaacccaggaggtggaagttgctgtgagccaagatctcaccactgcactccagcttgggtgacagagtgagacgaaggaaggaaggaaggaaggaaggaaggaaggaaggaaggaaggaaggaaggaaggaaggaaggaaggaaagaaggaaagaaagaaggaaagagggagggagggagaaagaaagattggcacttgcctatattcccagctatttgagaggctgaggcaggagaatcacttgaacccaggaggtggaagttgcagtgagccaagatcacaccactgcactccagcttgggtgacggagtgagagaaartgagagtgtragagagagagagagagagagaaagaaagaaattaatttattctttcccatttctacagaccagaaatccaaaaccaaagtgttggtagggctagttccttctgaaggttctgaaggagaatccattctataactctctcctagcttttggtgattgtttgaaattcttgatgttagttcacttgcagacaaatcactccaatttctgccttcttttcacatggccttatcctatcctctgtttgtttatgtcttctcctcctcttataaggatacttgtcattggatttagggttcacccagtaaactcacgatgattttatctagagatccttcactgaattatatccgcacataccttttctccaaataggggtacattcacaggtactggggattaggactggatatattctttttgggaaggggcacaattcaactctcaaaagatagaaaaggggaaaggtaaataatatagtcaaagtaacaatttgggaatatttatctcatataaaagcagacattgaagtttcccccagctgaatctattttggagaatttgaaagggtttccatctaggaccgtgaaggaaaaaaaaaatgcaaaagcaggttgataatgttatattttacctgggcacaatcatggtactggctcacacctcactacattcattaagtgcatcacgcatttaacaccattgttaatttggccaaataatccaagatgcaacaaggaattattgctttcagttactctaacctcttttgtctctaataaccatatcagtcatgactagaggcttgaatcctgaaaacggggacacgtagtaaagataaattactaacaagcccttacccataataggaggaaagtcatcactataataattstgtttgctgagatgacccaatgccagtttcagagtctttattaggtcaaaaggaaaggacatctaattgctatcttagctatcatttttcactaaccactgaaatgtgtggggttttttttagcmtgaagtctttttttttttaatttttccaactttcttagcagtttcagatggtacattgtgagacaaaggcaaaagcaacagggagaatcatctcatgagaaaaattagcaataaagcactgtgacaggacagcaaaggcactttgttaaaaaattatttcaacctgaataatttgacagtgttaatttgttaagaaaaaaatatctagaacacataccaccctgagatccttaagcagttctctgaaactttgtttaatacaaacacttccactgcattgcaattgggaatacatctttcaacccacattttgcctggttataagtccwattgggtactgagcagaggcagtcaatttggtttgctttatgatctgaaccaaacacaaatattaagtgaggtcaaataacacaccccactggcaatcctcawatctctaaagctgatttaaaagagactgggaaattgagctcaacagaaatggcaaaaataaagaagttcatttttaaygaacaaggaagcctaccaataccaatctccattgggccacagatgcctcattgtgcccaaattggattggaatgcacaagccaacaagcacaagcacaactgcccctccacccccacaaaaaaaatcacaatttggcagaagagaaagatttagaggaatgttaacttaatgcacctaaaattcaaatcatgattagaaaagggtattctggatatgacagtttaaggtaggtaaagagagttacgaatatgttcaaagtaattggaaaatgagcctaataccaagagaattacagaatattggtgatggaagagaattagagaataatttttaccttaaagtgtagatcctgagttcaggaagaagcagttacttgctcaaggtcagtgtctaaaactaaaacgggattagaacccacacccttttgagtctggtgctctctctactctgccaattgttctcaaggctgtggggggatgttaagagtttctcaaagttcacaactgggcctctttctttctctctcctcctcttccttatctcattcttttcccaagcttttattctcattgacagacttagtcatccaaaygtatttctccagttctgacatctctgaactccagacttagaatcaacagttctatttctgggtctcccaggccgctcaaacttaacatgtgcaaatgtaaacatctaccccccatccttcccrctacagacttgttcmtccctgcttgttctctatctactagatggaactatcatcttaccagtgtcagccttgaattggtatcttttctttactctttccctacakccaaccatcagtaagacctcctaagtgtatctcgaaaacatctatccactttctctgaccccaccttagtccaagccaccaacatcttgttcctggactgcctcctaacctctctctctgttctgatttttcyacttccagttcatttgccacacagtagccagagtgatcttttaaagacattccgtttacaataaaatccaaacccctcaccattgcctataagatcaggcattatttgtccgcttacttctctaatctcatggcgtgccaccttcttccttgacccctctgctcctggtatactgaactctctaaattctcaaaacataccacgctttttctagtgcaggacctttgtacatgctgctcccactgtcaggagtgctcttttcattgtgaaaggctggttccttttataattccgggctcatgttatatgtcacttctaaaaaagaggcctttcctgatcactcatctcaatgacatattttttttaatttaatctttcaatttcaattaatctttaatatttcagaaagtatatcaacattgcctaacatgctgttttacacacaatagatacatgatcaatgtttgatataaatatacatatctttaaaatctttggtttaaccagctaaacttttaatattttatgaactagttagccctgagtcataaatttacctactttttttttttttttttttgagatagtttcactctctttgcccatgctggagagcagtgrcgygatctcagctcactgcaacctccaactcccaggttcaagagattctcctgcctcagcctctcaagtagctgggattacaggcacctgccaccacacccagctaatttttgtatttttagtagagacagggttttgccatgttggccaggctggtctcgaactcctgacctcaggtgatccacccgcctcaccctcccaaagtgttgggattacaggcacaagtcagcatgcccggccagatttacttattttttatgagatttaaaactgtttttagagatagagtcctgctatgttgtccaggctggagtgaagtagctattcacaggcatgatcattgcacactacagtgttgaacttctgggttcaagtgatcttccgacctcagcctcccaagtagctgggactacaggcatgtgccactgagtccggtgtatttttataagatttttaaaaagataacatrttctaaattatgacgtccacataccatttacttttgtgtggaattataaggtgatattttaaatgatgggaatgaacaagttgacatgtatatcagtaacctctaaacatctatttcaaacatctattaactgaaagtgatgattcctccagctcttatactaagaacttccatacattagagcaatatacatattcaaaaagtgacctagttcaattagacaagtaaataattttcctatgtttaggtaaatttgaaaaatatacataattactacctcatcctagttagaatctcatttatatttattccactatgttcatgattttgtaaccaacttggaaggcatcgtattattaaaagtgtatcagattagctccctcaacttactatgtctagtaaccattctgaagaaataggcactggctttgaatatggcctgttccagtttgtgaacagtcgtaggcaagtaaagttgttgggcaaagaggtgagctataggatgactgagggtaaattgtcactactgtatataaagaagacaaatgagatataggaagagatctgttataataacatatatgacatatatctaagtttttcatatatttcagaattatagaaaaaaaagtaygtaatcttttctaagatgtatggatgacttacttttaataatatttcttgatttataatgtaaataagattaagcgaatatgggttactcttgaatttaaaaattggcacatgtaaatgagcattttaatacaaataattagaatatatttatactgtatacacagctacacaacggaagatactactaaaattttgctctatagcacattaysctagaaaacatagaattctagaattctctttaaaaagatcactgagaattattagatgatgactgtgaaataggttctcccagtacaanactacttctgtcattcaaagttctgacaacagttgtagctgaagactgaagcactttatgagaaagcctcattcttccatcagctgggtcacatccaaagtatttcacctgaatttcttggccaacttctaatcctagggcagtaggatgtttaatatttcnttgatcaagttgtgtgttataaagcagtaccaaaatcatatttggatataattttaccattacaccagtatctctgctttcagttattgtggcagtacacactgctccaaattctaattgctgctcctgatcatccttgcggatttcagcaatgaagtctcttgcctcatgcatagcaccgggtgttggtgcaaatayagaaaacgtttcttcatccacctgactaatagttacaactgtttcagcctgaagttttttaagttatatccacctggtccaacaaatttttctcattttgataatggaacctgaacagtttctacaacaggtccattttcttttctagatgcttgaggttttgaaatagctttgttcatgatctgtaaaatctcctttttgccactgaagcttgttgaatagcctccattacaattttcattgttattccaggtaatttaatatctgcctgtaatgcagttattcctttattagtgccagctattttgaagtccatgtcaccattgtaagcttcaattcccagaatatctgttagcaaatgataatcttctatttcaccsttctcaagatcggttttggtggccaatcccattgctacacctgtgacagcagattaaattggaagccctgaatccattaatgctaaacttccaccacatgcagatgccatagaagatgacccatttgactctaggacttcagatgtaactcttatggcaaaaggaaaatctttgggaataacaggatacaaagctttctcagcaagagcaycaggcccaagttctcttctatttatacyggtgactttgacaatttcattagttgcataaggaggaaactcatagtgcagcatgaaatttttatcttttatcccatttatagttgttataactcgatccaacttaatactggattctaatgaatcaaatgtaacagcacaaagcagctgtgtttgtcctctttgaaataattctgatccatgaagggttttaaacatatctacctcacaacttatattccgaagtaaagtcaaatcccgaccatcgcatcttttgtattcattcaaaataatacttctaaaaacttyctttgcaacagyattgaaggattctattatctcatatagatcgacctctggaaatatttcttttagttgttcctctgtatctaatcttattttgttaacagcttcatctctggaaattttatcatgttcataatctgtaaaaactgcatagagtctctccatagtgagtttatgagcaygtttcacaatctcttgtgaaggggtaaataacttctgaggtgtcctcttggtaacaccaatttcttttaccagctgctggatgccctgaattatttgctgggtatatttcactcccactttgatagcgtggcaaaagtcctgctgtaaaatgttcyctgcagaggcttccaacatgacagtctgacttttaggtgctccagcaaccactacatttaaagtactagaagacatttcttttcttgttgggttaacaacacattctccatcagtcattcctattcatactgtcccaacaggtccattccaaagartatctgataatgagagggctacagaggttgccattaattgctaggacatcaagttcattaataccatctactgctaacagattacacagaacctgtatatcacagaagtagccagctggaaagataggtctaactgaacaatctactattcaacgtgtaagaatttctttatcagaagtactaatctctcttctcagagggtttgtgggaattctacctactgcagcagccttttgtcygtagtcaaccaccaaaggcataaactgggaaggggaaggttttgttttactgacggctgtsgccattaccgcagtrtcacctgactgtattacagcagagccatttgcaaatctggccagctttccagaggatatttctaatttcctgttgcccaagtccatggccacagcttgagaccctgtgctactcaatagtgctcgcacctgcaactggatgagtgcccgatcccaccctggcagacagaagggaccatcactcagcggccggagccacaggctcagtgaggtcttagcttcctcctgttatcctctgtagcaatgccttagtgtttccttcacagcacttattacaatttgtagtcatttactgatgtgattattggttattatccctcatgagtctcacagctaaatgacagcagggatcaagtctgtcttcttccctgtgtcacagctgtatctggcaccaagcacatacaaggcatttgataagtattctttaacataatgaaaatgaagtacatttataacactattctttctacccaaagagaacaaaaaaattatggacttccattctgtgtcaatatattcaacaggatagaagaaataacacaactgaaggttgcaaaatactgaaagttatcaacgcttattctctagagatccttgttaaacaatgtcccatccatcaagggtgaattagatttgtccctggcttgaggacagaataagatgacttcaccygactccttataaacttataattttatgaaaaatccatragctctcatctttccagcactctgataacgaggtaattacccttttaatgaaaaaggaagcctttttatatctatccccattgaattatggacctcaaaattgaaatgaagtctaatagacatcaagcacaactacctgccagttcctaacaaggatgaggaaaaaaaaatagtgatatctggggagccaaygggcagtatgacagggtgtccttcctgccttctctgatgacactttgctatcaacaccagttcttccttttgtgccttactcagtttgtaagccagtctgcaacagtagaaaagtcattagtcacccttccctatctgttccatgggctttgaaatgaagccctggttcaggttcccatttaggtgtgactttctccattcctactatgttgactgtaatcaaagggctgggctcagtcctgacaacaygttcagatcccacactgcactagccctgctctagaatctcaatctattttcccagtgtcctaagacctgtcaaagcccctgccaccagcctcttccactactgactgagctcttccatcaaacgactgattaatggaaccacaacaccgacaccccacatgaattgcacccggagcccacaatccatactccttccccatgctccttcagtttatcgatrctgtttaattatcagtagtggctcggattaagccctaaacatctagctaccctgttccacagccaagactgttactctcwctcctcactccyaggtcttgcctaactccccccatttcaggtattttatagctgagtctctacaagttatcactcacagctaaattcacacttttacttggtctctacattttaatccttggtgatctctttttatgcaattgccagtttagaggcataatcttgtaaacctttaccttctggacagtagcatcggaaagttcattactttcagttacgatacaacagcgagtgacaaatgcagctttggaaagcggaaaacttctttctccttgagagtctctgcacaactttccacatttggaacccaaggacatttcctttctctctctgctaacatggagtacagaaaggttacattagctaataaaagccctctgctgacaaaagatgcgtttgaaaagtcactcgaaaagggagctctctcgatagctttattaaaataaaatgccatatctttgtgaagttaaaagtctctggattgtggttaaaagtctggtctgctccttatacaatggaaagtctttcaaaagccaygtgtttcttaagctggcctcaccatgcataacagctagaatataaatctagactctcgccgcccatctatcttttcttttctgtgtcatgtagaggttcctatgtgaaggaawgatctccagaataagatgagagatagcttttataagaacaccaaatgatagaaattatggaaatcatgatattgaaataatttcttccaagttaaaacatcaggaacatttttgcttatcagataggcaagaatacttaaatttgaatgttggtcagcattcaacaagaaggcagtgcctagacccttggcttatgaattgggggcaattgcagcttccttcattcctctgaagggttgagaacttatgcaaagccatgggtgcagtgctgtccgacgccctgcagaggtgatgccaagagtaaggctaaatatgccgtttttgagagggagcccagaaagccagacttcagcagacaccaaagagtctattgaactactctgatgggaggatatgcaagagcaatgctgaatagtaacacccctgaagagagacaccatggaaagtagttgtcggacttgtggctacaaacaacaagaaagtccttcgcctggagctgcctctgsaaagagcagctagactctagctggagagtctgacagagaaacacttcctagcagaggctcagcttcttgcccttccagaatgagaggctgtgtggttttgtgttcaagatcacgctatgaacatgatatgaacggttggtatgtygagwcaccttcattgaaaagagagaataagaaattgctccctgaaacctagaatagatggtgccccaggattgatcacaataatcattgggaatayacattgtagagacctcagattcctattgcacatgtgtcctacaaagaagggttacagagattctatcttgaattgtttgtgaatttttccacatgcattacttttgctggattataaacttctacaacacaaccatatgtttcacttcttataaaatctctcacagggtctaagtcaaagtcaaaggaccgtcattaatcagttgattggcactagagtggttggcctagcgttggtggacatagtcattctcagtgtcagaaaatcttgcaccctatcggaaaagcgtaagaggaaacacaaaaattaaacagaggatacagcaacataatagttctataaagatagtacatactgggagtctaaaaaacatccatatcttttgacataaatctattgctagaaaatcatcctaccaaaatatctaaagagtaaagaaactttatgaagaaagtcattctttgaacagaatatagaagcagaaaaattttgaaacaatctaaatatcaacaatagaggatatgttatataaactaagaatcttcttctgtgtaaacctgctattaaaaataatgcttaagaagtattttcaaaggtttaacaagtgsttatgacgtaatgttcgkcaacaaacaattgtatacaaactaggatctcaattatgttgaagtgtgtagaatattgacagtgggtatttctgagtggtaggatttggggtgtttctaattttcttgtttgaactttctattttatacttttcaagtttcctgcaatagtaatgttttacttttataatcaaaaaactattgaaataatactttaaattatgcatgtgaaaagattacctggtccaggtggtcattgtatccagctgaaggtgttaaatctagctagactctggcctgggtcttgagaggttagtatctataccccaccttcccttctaaacaggttagcaagctggcaagctggtaaaggagcctagcctcttcctccctacaggacactgcaacatcaaaacaaagcctctaaatactcccctaaagacaaggaagactaatatctgtgacgtarctattctcttctgggacatagaggaaaaaaataggtctctctcataacaagacaccattcatttctcaggttaagctgccattaccttcgaacacacagaagctgagggctgtttctgcagccctatcctacccagtcagccctctgcgtgctctcaactgctattctcactgcagaccaccattttcagacaaagctctgaaaagccccttaatgcccaagagccacaggttgtgtttgtgttaattactacagggctcagttcacaatatcacttaataaarattaataattttcaagaatagattcataatcttctcagttatcagaacagctgaagttatttatgtgcttattggaacaatattataaatgtttgctttgttttaatacttcattgatgaatcacataatagtttataaaatcatgtttttacctgatatacttagttggccatgttttcctgattacaacaaacagatgaaaaataatttctgagttatttcctttttccttcagtatctcaaaggatgttcactgtgaatactgacaaaataatttattattattttcctagattctgaccatctgctgctaatcaattcattagaaattcaactcaaaaagaaaatttttggagatagtatgttaatataccagtttagagaaaacaacatacaattacttttgcacaaagtcagttggagaatagtttgagaactgtctagagacagcaagatattctcaagatgctccaagtatccattctgactctatgactattctgagcacaaactcaggattttagtttccttcactaatayctagtaataaaaaacctccatgtgttatttatgagaacagttaagcagataaataataaagtctcctgacacttcaaaggaaaatgaagaaaatatgagtaaatataaaatcaattcatcagatacattttaaattccagctgttagagtcagaaggaatcacagaagatcatttcactccatctcctgggtttatgctgataagctactgctctatccatatgagcgaagatgcagccgcaggttaaggggcaagcctgttgccatacagctggttagcaccaagaagcaaagtgaagttagatttcagtttctagtatcctcatacaggcctcttcccaatgagccaagctacttctcttttaaaaataattctgtctggaacattaagggggtcatccgtactgattcttcatgttttaaatacatattgtttgccagtcattatgctaataagaatacaaaaagaaaacaatatatagtatcagcacttgaagacctcacagtccagtaaggaaaacgtcaacatgaacaatacccatatgatacttgcatagcaatgtgagcacagtgctatgggaacatagaagagggagcaataaattctgctaagaaagtgttaaaaagtttcacagaagagctaggccccaaaggatgagtaagaggtatttaggcagaaggaaccatgaaaacaaaggcagggatgtgaacaacatctttgaggaggagccagcatacagaatgaaagatattgcgcatcaaaagcaaaayagcctttgcttttacacagacctatcatggtaaagcatcctcacagctgtacacatttaggtaatctctgtgttccccagcccctctaaagagcatcactgtgtcctccttgcctatatccatgccctctgtcaggaaaggccttgcccttttcctctatgccaactccccactgtccctcctgatacatctccaatattacctcttctccaacctccctgggagagttaattacctcctcctttgggctcctataacaacttttacatctcttgcaagaggttacttgaattacttgtttacatacatgtctatctcccaaacaagtctaaaaatggtaggcttctaaataattataygtttgataaatatgaatgaatgaccttttctatggaaagctaggcgctaaaggtgatagagagataacatgcacatacgarctctcaagggaaatagacagacacatagataatgtataartagaataataattctttgaattgaaatccccagggaaacattttcactcaaccgaaaatctaactgcartctaaagattttcacatacaaccacttggcattgacttacaactccacctagataggttcataaagtcagatccttttcttgttacattcttagagctcataaaaggtggtctgaaaaggcaactctttgggtataatttagtcttattaaacagaattgtaagggagagaaaatgactgtctagtcctttatcattgggcatgtaatccattataaaggtgttaagctcactggtaagtgtaaaaatgagaggaaatgagtctactgacaaaaaatgcaatgagacaataaactaaaattaatgcttcacaaattctcagcttctcagccttattgtctcaatttgttattctcataaattatcagaaagtaaagcacagccactgctcctaaaaataaaaatcttattaaacttactatgtataaaactgcctgaagacattggctctcctttgacctcatgagttactcaagatactcaatcccagggttcaaaaaatatatctcattagcagtaccagatgtcagcagatgtgttattaaactgcctgtcactcaagcctcaatcctgaaaaatacctaggtcacctaatcctttatgccatccacatcttttcacatatartaacaggaactttagtgcctggaattgttattaataataattccaaaaactcaatcatttctgggatgcctttgagttaatgggaaagaagctactatctgcctgacaaattgctgcacactggtaaaagatgattgacagaggatagatagtgtattagcctccttgggctatgtcataatccattcagctggctatcacaaaataccataaaccaggtagcttataaacaacagaaacatttctcacagctctggattctgggaagtccagcatcaaggccctggcatatctcttgtttggtgaaggcccactttctggttcacagatggcaacttcttgctgtgtcctcacatggcaaaaggggcaagagagttctctggggcctcttttacaagggcagtaatcctatttctgagggacctgcccttcataacctaactactttccccaccttccaataccaccacattgaggattaggattcgatgtatgaatctggggtttacacaaacattcagaccatagcaggctaccttaaaaaccacaaaccggtggcttaaacaatagaaatttattttttcatacttttgctagctgaaagtccaagacgaaggtgtcatcagggttagtatgtagcaaggcctctcttcctggcttgcaggtcactgccttcttgttgaatgctcamatgactttttmtctgtgcactcacagagaaagaatgaaatgagctctctggtgtctcttcctgtttgtataaggtatcagattatggccccacccttctaagctcatttaaccttaattatctccttaaaggtcctaactccaaatactatcaccttggggttaaggcttcaaaatatgaatttgatgagagacacagttcagtccataacagacagactgatggatggatgtgaatggatggacakatggstgsatggatacatgsatggatgcatggatggatrcatggatggatgcatggatgggagggacggagggagggagggagagagggaagaagagaaggaaggaaggagggaaggaagagagagaaggacggagggaaggagggagagaaggagggagggagggatatgattaactcaygaaggaggtaggattacgatcagacttaaatctgctggaagcaaaccattgcctgtaaggtaaaaaattgagaagtgttagaaaagcctcacactgctccaacatgctgcacataaacacgagccacagtgcctaaaatttcatattaaccaaagattcaacaaacatttatcaaggaagaactttgtgtctggcactgatctagtgttacagagcatgttaactgaattcctcactgaagacatttatattctaacatggatgaaaaaaaatctatgtataagaaagttgttcttaacctgaattacacaaaggatcacttgtgggactttaaaaaaatacatattccacaatcatatcttctgaatctaaatagcctgaggtaggccctgggcattgagatatatatatataatctctccaggggattctgaagcacagcaatacgaaaatccagtccagactactgagataagcattggccttttcttctaaacactaatgactctagaagataatatgtgaagaacctactaccgcagtgtaaataaactcactagatggctagcaataaatgatccagaacaatatgagactgctgggcaagagaaggcatgattgatttaagataatgtacacgaaacttggtagcagacatgaaatmcctttgtaaacataaaagattattactcctcagtaggtcaccattttacaaggcagatcatttcattttaagagcttccaaatactgagccaacacawggtttttttggtaactttcttccaatgtgtctaggtccatagttttcagcgcatgccttctcccgaagtcttcagggtgagactccacaatgccttaggtctaggaccatagccctctgaagttcctgagcaagtctggaccaaggctgatcaagatcactaggcttagcaccagaagtatttgagagtctggaattaatcttgcggccattaccgcgggcttcagtgggttataagcccagggcaactgcatatctgttacactgcagtgttccctttaattccacctgctgccagccctgagtctaatccattcaactgacttctgtctggggttcctgttctccactagagctctcacgggaaccctagcctgtttggttgagctctgatactctggccagccattgccacctgcacacttcagggctggtttccattccctatacatccagtcagtggctgggtgacatttctttactattgacatgcccaagctgctatagggactcctgccttagatcattgattctcagatgggatggttctgccccagtagaatgtttcagaaactcttgatgatatatttggttgtcataacagtaacatctgcctccttctacagcatcaccccatgtttactggcatttagagtgtgggggccagagaaaatagacatcccacaatgaatgcactgtgtaatccacccaaggattagttgtactgtgttctcgaacactcacacagatggaaaacctctctgttagtatctgagcctagaagctaactgtttcacacataatctcaaagtactttttgcagcaagttttaatatgcaactaattttccaggacagtctctagcctgtaaatcatggggaggaaactttaccaaaaattgttcaccaccctgaaaatcacttyaccaacactataatgacattcttgctacttgagtgacaagtacaaagctcctgtaacggtctgcatttgcagtttccattcttcatgtagctacaagcatctgactactttattatgtcttttagtgtaaccaagctcaagcccttaggtaytaactacatattatgttacttttaattattttacacttttaaacctttatataaaaattagggcattatattaatttattttmtatatgaaattaagtatgtagagatattgtattacctacaarttatattatctgtgagagtaagaagggcactacaaaatgtctgttgggaagaggggatattaggtctgataggtttaagytcagtattagtatttattgagaataaagtgaatattctcaataaaccctgtagataccagccataccctttcatggcttcgcccttacagctgcatcagttcctgcacttcagctcccaacaaggcatcctccaggccaaggatgtctcaggatgccttgcagtcaaatctatccattggcagatgccatcctacaattcaaaaataaaacctaaaaattatttgtgtaattcatttgaattaaaagcatgactcttagcaataatagcataaagagattggctattacttttaaaacctatatttcaataatgctttcacatatattgatttcatttgatattcacaacaacacgaygagatgacagagaagactgtgcatttcttttttttaaattatactttaagttctgggatacatgtgcagaacgtgcaggtttgttacataggtacacacgtgccatggtggtttgctgcacccatcaacccatcattttcattaggtacttctgctaatgctatccctcccctagcccccaacccccgacaggccccagtgtgtaatgttcccttccctgtatccatgtgttctcatagttcagctcccacttatgagtgagaacttgtggtgtttggttttctgttcctgtgttagtttgctgcgaatgatggtttccagcttcatccatgtccctgcaaaggacatgaactcatcctttttcatggctgcatagtattccatggtatatmtatatgccacattttctttatccagtctatcattgatgggcatttgggttggttccaagtctttgctattgtgaacagtgctgcagtaaacatacatgtgcatgtgtctttacagtagaatgatttataagcctttgggtatattcccagtaatgggattgctgggtcaaatggtatttctggttctagatccttgaggaattgccacattgtcctccacaatggttgaactaattgacactcccaccaacagtgtaaaagtgctcctatttctctacatcctctccagtatctgttgtttcctgactttttaatgatcaccattgcaactggcatgagatggtatctcattatggttttgatttgcatttctctaatgaccagtgatgatgagctttttttcatgtatttgttggccacataaatgtcttcttttgagaagtgtctgttcatatccttcacccactttttgatggggttgtttttttcttgtaaatttctttaagttccttgtagattctggatattagccctttgtcagatggatagattgcttccaccattctgtaggttgcctgttcactctgatgatattttcttttgctgtgcagaagctctttagtttaattagatcccatttatcaattatggcttttgttgccattgcttttggtgttttagtcatgaagtctttgcgaatgcctatgtcctgaatggtattgcctaggttttcttctagagtttttatggttttatgtgttacatttaagtctttaatccatcttgagctaatttttgtataaggtgtaaggaaggggtccagtttcagttttctgcatatggctaaccagttttcccaacaccatttattaaatagggattcctttcctcattgcttgttttgtcaggtttatcaaagatcagatggttgtagatgtgcggtgttatttctgaggcctctgttctgttccatcagcctataaatctgttttggtatcagtaccatgctgttttggttactgtagtcttgtagtatagtttgaagccagaaagcgtgatgccttcagctttgttccttttgcttaggattgtttggctataggagctctgttttggttccatgtgaaatttaaagtagtttttttataattctgtgagtaaagtcaatggtagcttgatagggatakyactgaatctataaattactttgggcagtatggccattttcacaatattgattcttcctatccatgagcatggaatgtttttccatttgtttgtatcctctcttatttccttgagcagtggtttgtagttctccttgaagaggtccttcacatcccttgtaagttgtattcctaggtattttattctttttgtagcaattgtaaatgggagttcactcatgatttggcttcctttttgtctattatttgtatayaggaatgcytgtgattttgcacattgattttgcatcttgagactttgctgaagttgcttatcagcttaaggagatttgaggccgagatgatggggttttctaaatatacaatcatgtcatctgcaaacagaggcaatttgacttcttctcttcctatatgaatacsctttccttctcttgcctgattgccctggccagaacttccaatactatgttgaataggagtggtgagagagggcatccttgtctcatgccggttttcaaagggaatgcttccagcttttgcccattcagtgtgatattggctttgggtttttcataaatagcttttattactttgagatacgttccatcaatacctttaacatcacactgtcaacattagacagatcaatgagacagaaaatgtacaaggatattcaggatttgaactctgttcaggaccaagcagaccttatagacatctacagaactctccaccccaaatcaacagaatatacattcttctcagcaccattttgcacttattctaaaattgacctcataattggaagtaaaacattcctcagcaaatgcaaaagaacggaattcataacaaacagtctctcagaccacaatgyaacaatcaaattagaactcaggattaagaaactcactcaaaaccacacaactacatggaaactgaacaacctgctcctgaatgactactggataaataacaaaattaaagtagaaataaataagttatttgaaaccaatgagaacaaagacacaacataccagaatctctgggacacagctaaagcagtgtttagagggaaatttatagcactaaatgcccacaggagaaagcagggaagatctaaaatcgacaccctaacatcacaattaaaagaactacaaaagcaagggcaaacaaattcaaaagctagcagaagacaagaaataactaacatcagagtagaactgaaggagatagagatacacacaaaaaaaaaaaaccttcaaaaaatcaatgaatccagcagctggctttttgaaaagattaacaraatagatagatggctagccagactaataaagaagaaaagagagaagaattgaatagacacaataaaaaatgataaaggggatatcaccactgatcccacagaaatgcaaactaccatcagagaatactattaacacctctacacaaataaactagaaaatctagaagaaatggataaattcctggacacatacaccctcccaatactaaaccaggaagaagtcaaatccctgaatagaacaataacaagttctgaaattgaggcaataattaatagcctaccaaccaaaaaaagcctgaccagacagattcacagccagattctacyagaggtacaaagaggarctggtaccgttccttctraaactattccgaagaatagagtaagagggactcctccttaactcattttatgaggycagcatcatcctgataccaaaacctagcagagacaaaacaaaaaaagagaattttagrccaatatccytgatgaacrttgatgtgaaaatactcaataaaatgctggcaaascgaatccagcagcacatcaaaaagcttmtccaccacagtcaagtsggcttcatccctgggatgcaatccgtcacataaacagaatcaatgacaaaaaccacatctcaatagatatagaaaaggccttcgataaaattcaacaccacttcatgctaaaaactctcaattgtgtatttctgtatctgttttaaaaaagaatcttgaggctctgagattctgatcagctcagtcacagagctagcaagagagctgggattagagtctacaccttcagaagccaaaagctgtgatattttcacctacataacactgcctctaaagtgagacaagtaacaacaggaagaaaagaacaacagaaagaacaaaattaaaaggatcaatatgaaatgctgaaacatgtaaatactaacagggtaatggtaatttctgaaagcctaaagaggaaaattccacaccacaatccaagagatctgattaagcaggctattttgtcatgtgaacatactcttctatggcaacccaccacagctcacatctttgcacccattgtatagaatgcctgtgggcacacacaaatggctcgcaaagacgacacttaaaaatagctgtgctgccctctactgttgaaaaaagagcaagcatgaaaacggcaatcagatttgctacttgtgtgtcttaagctgataagtgaacagcagcagagtgctacaaacaccatttcattattatcagtcagtggttcagtagtaactttagcattgaaataaatattttgacattaatgagatcaaacagtttatttggcttaataaagacaatatcataattgtttattgttggtgctatccttgttagttggattgtctgcttaagactagctgaatagacatgaatattcagtacttaaagcttgttttcagattcttgtaatgtcagggctaaataaaacttaaaggtcacatagaggtaaatggatgttttacatatgacaactctgatccataggcagcagctgcctggagaaatgtgtaaataaggattttgagactctgttcaagctcagtgacaaagaagattacaattgattagtaatgtcttccaagtaagagaaagtgagataatgctatacgtgcaacatccatctgtccatgggctaaattagactgccatccctaggctcgtctgatcactttacagataaggaaatcaaggcccactgagacgaaattgcttgttaaagatctcattgctggccaggcgcggtggctcacgcctgtaatcccagcactttgggaggccgaggcgggtggatcatgaggtcaggagatcgagaccatcctggctaacaaggtgaaaccccgtctctactaaaaatacaaaaaattagccgggcgcggtggcgggcgcctgtagtcccagctactggggaggctgaggcaggagaatggcgtgaacccgggaagcggagcttgcagtgagccgagattgcgccactgcagtccgcagtccggcctgggcgacagagcgagactccatcccaaaaagaaaaaaaaaaaaaaaaaagatctcattgctgctggaaattagcctgggtcaatcctattactgggtatatacccagagggatataaagcactctaccatatagacacatgcacacaaatgttcactgtggcactgttcacaatagcaaagacatgaaatcaatctaaatgcccatcagtgacagattggataaagaaattgtggtacatatacaccatggaatactatacagccataaaaaatgaaatcttgtcttttgcaggaacatggatggagctggaggctattatcctcagcaaatgaatgcaggaacaaaaaaccaaatactgcatattctcacttataagtgggagctaaatgataagaacttatgaacacaaagaaggaaacatcagacactggggtctagttgagtgggaaagktgggaggagggagaggagcagaaaagataattattgggtactgggtttaattcctgggtgatgaaataatctgtataataaacccccataacatgactttacctatgtaacaaaccttcacatgtaccccgaacctaagatgaaagttttaaaaaaaatacctgtaatgtgaaaaccctttactagtgggattaatattgtttgggcaattatcatcactgtacaagtggctgttaatagcattttccacttgctctgtgctgggcactgtactatattctttaccaactattatcttatytaattatcaaaggctctttggcgttggatattattacccttgtttttttgttttgtcttgttyttttyctaaaaaaaagaaagaaattaagctggatcaagaattcaagcatcctgtattctggaacattcttcttgccattagatataagtttcttagctaggcctccaggaatggaggacaagacatttcagcccaaactttataaagtaacaagtgatgttcattctcaatacagctttaagataattctttactgtcaccaaggcacatattttcttctttacatagaccaaaagcctttgcgaaagatagggcacaggcaaagccttttcatcttacaattgatctttttgatgatttgttcataaagaaatagaatttcccattgtggagtcatttccatggttacctattgatttcctataggaagcatgctgtttacacggccatcaggtctttattgtggagggtaaatcaccctctgagttttcactttatctgcaacctgaggcatgtaaaaatgagctctgcaaaattaccagaacaagataaataaatgattcatgtgaattggttttgcatgaataagtgattaatcctctctttcaactttgctatgagagaatgcagaattaatgtaattctatgcaaacagaatccacttttctgaattctgacctaattgttggtatttgtgaggcaaaatacatgtaaaatttcctgtagtttttaaaaaactaatgatactgctactgaaaatcaggaaccaaacttctctttataaaccttaactgcagatgcacacggatgagattgtgatttaccctaaaagttccttcaaagcatcttgtaatttggcattccaaaggtatatgaccttagtgttccaaaataggacttagaattgctcaccaaatagcctagtctttaaaccagagtccatgtggcagccttagcagcctgaattaattaggctcttggaagaaacacacctaggactctggagttttcacataatgagaaatcagtagaccattcaataaatcagtagaacactcaagagcccaagaaaacatccacaaaaataaaatccctttaattggggacataaaataacaattctattctatgaagatgtgtctcagcgttacgctagaagtttaggtctctttctccaagagtatttcacctgtagtcaggaactttaaacataaacccagaccaaccaagtgattctataaaagtcacaaaataagaatactaggaagaggagataatcttggactggaagataagcagagaaggcttcttggtttgtgcaaaattgyggcttttgccattactttcaatggcaaaataaattttggcaaaactttttgttaggagacttgcagaagcagtgagatttgaatagatacaaatagaaaattatagtagctaaccagttagcgagcatttaccataggacagacgctctgccaaaccctttatactctatcttatcttcataactatccaatgaggtgagtaagttattattctcttttttataggttagatcgatgagattaggccaggcgtggtggctcaygcctgtaatcccagcattttgggaggccgagatgagcggatctcctgaggttgggaattcgagaccagcctgaccaacatggagaaaccccgtctctactaaaaatacaaaattagcctggcatggtggcgcatgcctgtaatcccagctacttgggaggatgaggcaggagaattgcttgaacccgtgaggcaaggattacgatgagctgagatcacaccattgtactccagcctgcgcaacaagagcaaaactttgtcacaaaaaaaaaaaaaaaaaaaaaaaaaaggctgaggtgttaaacaactagtgtgacagggctagttccaatgattccaatacatactgtctcctaagtctacaatcataactaaaccatttcagtcagagggaaatagggaatatagtggcaaggaagcaaatcacatagcaagagggtgacagagaggttaaatcactacatcaacagagagtggtgtagtaaagggaggaagggctgggaaaactgcatgagggtggattacagagagctctgaatgccattcttggtaggataaaatgtgagaactgaaccccaactgagaaggtgccaattaattcaggtggcactgacctgtgaggctgaggaggtcttaatcaccagaacactaaatgctcattatccaaccttttaattagcaaagaaactaccctgtctggaaaagttttcagcaaagaactaagatttgatcatgctgttaaagaaaaaaaaagaaaagaaaaaaacaatcctctgatctctcccaggcaacaaatcttgtatttcagatgtatgttttcatatcttccaggtcccaattggagagaaaatgaggaaaaggaggaacagatgggactaaaagcagaaggcacctgatgaaagagaaaaagcaaggctgggggaagggtgtttagagaaggactgggagaacaaaagcaaagaatctgaaatgtaaggttatctcctctgctgaactacacacacaaagttgttctatttactgctttgcaatattgagtgactctatcaagtactggtggcgatcggtgcctaggaataatcacatggatctctcaatagaaagctcactttacagaatcaggtcactaataagggcctggggcatgtatatcaccatgtaggtgtgaaaatgcaggacagggtcaggctatgccaacatctttgtacatgtgaaaaatgaaacccaagaaggtcaacagaaagggcattggcctgggaatcagaaaggtagtcctttccctgaaagaggataaatgtattttcccaaggtgacaaggtaagtagtagagtgcctacattttgtttcttgcctcttaggagagcatgctttcttccgttcccatgaacttcagaatgagccacatctttactcaaagcctcctctgctatttatatgtgtgaccttaggtaagttattatcctctttaccatacagaaaaataaaacaagttctttgctttcaaacagctaaattaaatcaggcacaggtaggtaggcaaggtccaacaggaggagttggtgttaagtgattcaactttgttcccagcaccaggctcatattataattatcactaagagtagaatttaccacttcagtagaggaaaggctccccatgcttttccatagcttccaaagttggtttgatgattatgggggaagagaaggaaattgggacaacaccttcgatactagacagtatttatcagtcactcagagctgtccaccgtgcttacagcttggtggatattatttcattcaatcccccagtaatcctttagattattatttcaattgtacacatgagaaaattgaacttcagaaaaattaagggacttgcccaaatcccactagatttagcaccaggctccaagctaatagcaaactagagagctcttatgggaacaaccatattactgcagctttcccagtgtagttgtcatgaccaactcagggttctccagtccaaacaaggaggtcgtgctaatccattcatacatcttaactcccggaaatcatttccattccccatggagcaaaattttggaaagcagattcaacaaattttgcaaggtactgggggcaatgtggctattatacagaaataaaagacaactttcctgtcctccaagaacttatagtttggcaygaaagtggtaagtaaacagacaacagcaagttagacatcttcttcagagattatatttgagcagtgcagatgtacaaagaaaggggaagaaagtgaacagggagggagacattgaggaaaagctgtggtgggagggagagaaggaaggagggagggaggcaagaaggaaggaaggagcgaggaagggaggggaggggagggagggagggagggaggaggcaggctttgtatgtcagggactgtgttagttatattgccttatctcttaattcttccaacacctggttgtcgatatcattactcccatcatattcctcctgctaaccttcatcacccttagaatgacctagtcttgcatgatatggttcctgccttcctctgtggcatacatcctaccacactgacccctttactatgccttgaatgtatcagtctctctttaacctcagggcacttgctgttctctccagctcaaatgtcccccaactccctccagatgtccatatggcctgcttctctctctcttccttctactcaaatgttgcttccacagaaaggctctccttgatccccctaataacccacctctcagctccactctcttctccttactctggtttatttttcttcaaggcacttaccattaccaatctttctttatttgtatttgttggttgcttgtctccccattcctccactagaatgtaaacatttattctctctcaggatagtaggcagtgactgtttatttttatttatccccagaggagtctcagcagtgcctgacatatagtaagtgctcaagagaaattttatgaatgagctaatgaatctgcctttgcaagatatggaaactggggttcagacaagttatgcatcttggccatgtcacacaaatggacctaccaacttcatgacattgttatgctcactcctgcctcaggctttgggccttgaaaatctctcctcctgcaggtctgctgatggatcttcgcagagctggctccttcccatagcttcagaagagccttctggggtcacctcctttaaaattgccccttccactcccattaccctatttaacattctccatgacacttactactctctgaaattaccttattttcttatctcccttattagaatgtaagtrctagagaaatcagaccaatgagactatttctttctcattcacagcckgcctagagcagcacaaacaatrcaaaaacaaaccaaaaaatgaataagcgtgtgtatgtagrtctcttagtaccatgcttggcccataacaagtgcttactagctactagttactaattttttagtagtagagatttaataggaaagattataggaaaagaaactcaaaacaagggaatrgtgtgaattaaagactagcttttcttaaactatgttgccaaggtagttttacccacaagtctgtgtcctgggcaaaaatagtggaaattggcttcagcgcaatcacaagacttctggaggagtctttcactccgtatggatcaaaaatggtgtgtttcaaccaagagtatggctttggacatcttctcgtacaattcacatattkgtcagtcatataaacatttcaatttcaagaatagcatctaatgtgcaatttaatttggcctccattttgtaactctcggagctgcaaatgtagttattttcacttgcagcaaatggtttggttgaatagtgcatggctatccaggactggcagaaagcaaaacaccaatcgataagagcaataaaactggaaatccacaagatgtgtggcctgaaacatgtataatttttaattcataatttacttaaatgattgattctcccaaaagaaagaactgaaataagtgataaattgaagtcttactgtgcagaaaaatgaatacagtgttgatatgtctttaagatttctccacaaccaacagagaagagaaggtaacttctggaccctgaagtaaatcttatttttatttggggrattatttggacatagctgctattgccaaaaaaagattaatcyatactatgcccacctcccacaggctctacaaccattccaaagaaaaacaggtgaggagctaaatgatgttgcaaaaatcagtgaatttggaataaaaaacatctgtattcaaatattgactctgtggtaggtaagactagaggatcagacaggagggcaaatatgttgaatctttacttaaaggccaactcccttgctgcctacttttttttttttaagagacagattttgctgtttcccaagctggagtgcagtggctattcacaaatgcaatcatagcacactacagccttgaaatcctgggaccaatcagtcctccttcctcagcctcctgaatagctgggactacacctacctatttttgtgctctacacttatctatttcccttaagaggtaagggttagtatttaagacttgtcccttgaagcaggcctcccaagaaacaagtgggctttctgcaaagtaccaacgaaactggcaatggcctaaatcttaaggacattaatcctggtcaatgatggcaagtcctggatcccagtcccccagttatgtcagattctctagctatgaatgctgatgtggcaaatccagccgacagcttgctagactatacagctgcaaccacaagagttggactccagcctgctaattactccaggggagaggctggtgctaccccagacataaatgctgagttagcagcatggagctagagccagctcatattgctgttgtatcctggctgatctctgaatatagcaaggaggaggtgatgcttccctaataattcaacttgaaagccccaaagcccaaggatggggatctatcccagaaatctgacttgcagtcatgctgaattgctgtgtactaccctagaatgtgataaacaaaagaaaaccacacatctgctactgcatacgttcgtaagtttgcctctagggctgatatacattctggctgtatacattctggttatttgtatatcagccctctagggctgagataaattccggctctacacattctggctatttgtcctggtccccacaatacctcattgataacatttatgaagggaagaataatacttcttgataactttttggaagttgacaaaatagaaaaagaaggtccaaatgtctatatttttatgtacacatttatgcatatttacaacttctgatatttmttcttttttctcagattatatgaacctctggactctggagtaagcatgtaaatatatacgtatatgtctgtgtgtgtgtgtttctgtgtctgtgtgtattacttatatttatgtktatatttatatttataggcattttgaggtcctgtggtaaaggccttggtcatgtctgcataaaagtcagcatgggatatcctcaaagctgcaaggctccacctatgtagacactactgggagcaggatgcctgggagacgaagcagggcagcataaatttttgtagcagaggcagcatctacagggggtgtctttgtgtctcggaggattgttgcaaaagagttcataaatgtgcagttccctatcttccccaacccttcaaagatgggaaagaacttcatttagatgttccatcctaccccgtttttttactgatctgggcaataccaggtccccttaacacacacacacacacacacacacacacacacacacacacacacacacacacacttcctgcaatatattgtgctgaaaatcagccttgctgtcacagttccattatcaggagagtttggagtaatgcccagcctagtctataatgaaaaattgtggctcagtgtcctgattaaaaccatatcatcctttcttgtctatagctccgttcttaatttcagtctagcccaagacgctatctaaggtggcttggaatgcaggcccacatgttcctttctgctgtgagtacaagcagaacaggcagagctgggattcaaattgacctctctctgattctgaaccccatggtctttcccatgaagagatctagttttttttgtttttgtttttgtttttktttttcatctgttaggggctgttatgggttgacttgtgtttcctccatcctccctgaaaaagatattttgtagccctaacctctagtaccccagaatgtgaccatatttggagatacggtctttatagaaatattaaagttaaaataggttcatttggtgtgagctctaatcccayatgactggtgtccttatgcacagaggaaatatgaataccaagaaagagacacagaggaatcagagaaaagacagacacctatgagccaaggagaaaggcctagaacagatccttccctcacaatcctcagaaggaaccaagcctaccaacaacaccttgatctcagacattcagcctccaaaactgtgatgcaatcagtggtgctttgttatgccagtcccaacaaactaatacaggagaaattcagagttttcaaactggaagtgcatgtccgtgaacattagattgttgcagccatccaactgtacagtgcacagctccagagggcagtattcccagggtcacatcatggtgcattcctgcactagacgtcatacaccacacagcctcacacagtggtccctgaccaagctgacacagatagagtctcctcctgtgagacatctgttacatatgttacatgtgttaaacctgttataaattcagttaaattgccctcaaagtaaagwttataaaagaaggatgttaagggagatactgttggatttgttgcagtgcatttaaaaatagataacttcaaggccatggaatatgggactgttttttagcacaaaattataaaagtggagaactaatatatgttaacctatcgggaaactcatctgagtatgagctgggcagacgttttgattgtctatggagggctggacttcccacttttctcccactcatctgacaggatcagtttttcaggtgatgaattaggaacaaggtgagaaggaggtggctctagacaccctggatatagcactgttttctgttaatgagattcagatggcctgataattaaagctgtctccaaaacagaatggctttcctcatctagcatccttggcacagggtaattcaactgaagactgggttcatttatccattcaactccmtaataaatacttatggagtattaggcaatgtcctggatattggaggaatacaaagaatagtgccagtcatatcaatcttgctctcaaagagtttaggttctaaggagaaataaggtagatgcgtagaaaattccaatatagaatataaaactatgtgtcacagaaaaagtgcagttaaaatgccacaggagttcagagtagtttacgaaggaagatattgggacagtgatggcatttaagctatatgaataacattaacagatagagaaaatggcataagccaagatggagaggagaagttgaaggctgactggagtacagggcatgtttttgggagctagaaaatacaattggaaaggtcttctatatcttctttggagatggttttaaccactagaccaggaatgtaagttttattctgaggaccaataggagccactcaaagaagacgaccttacagtgatgttgacagagaaattccaaagataagaagttacccgccaggcaaggtggctcacgcccataatcccagcactttgggaggctgaggcaggcggatcacaaggtcaggagattgagaccatcctggccaacatggtgaaaccccgtctctactaaaaatacaaaaattagctgggcatggtggtgcatgcctgtagtcccacctactcaggaagctgaggcgggagaatctcttgaacccaggaggcggaggctgcagtgagccgagattacaccactgctctccagcctgggtgacagagcaagactctgtctcaaataaaaaaagaagaagttaacctatcaagtgacttctgaaatctccctctcagatcactgagtctctcgattcatgctgaagaagaaacaataatcccttatcatagatatggaccacatcagttgagatagggcttggagggtggggaagctatgaaatccttctgaaagaatggctatattttaggggatcacagagaatgcaaagttcaagcaactaaagggaatagaaaatccaagctatgcggggggctcttccctttctcataatccccctgggcaataagccagttcagagacatcatcagcttattttctcataaacaacaatttatcagtaagaaagtgatatttttcctctttgcctgactccttaacacataattggtagtacctcccataactgattaactcagaacaaagctgaaaagaaaataactattgtgagctggaagaaataaactaaactctaggcgtctttcacctccttagatccatttacagtgacctttagccaagggaagcaatgatttagagagcagctagaaaggatttgtggaatccactgaactggaattcagcacacggagctaatcctgcaaaactgtgattataaaattacaaagcttgaccaaagaaagctttgtgcattctgtggacttgtacctaaaatcacccttagtctgaaatatcctttttgtcttccacaggaattggctaactgtattgctctatttatgccatctttgcaactaaatactgtgattaacttgaagtgtggtttccagaaatttcttatgaggaaacagataaatatggaaagatrtatgccgaaagatgtttactgcagcaatgcctaagataaagactgaaaacaatataaatatccatcaggagacgattgcttaagtatagtacagtaacacactggactatcatccagccaataagcagactaagttagatactaacaagattctaacaataaacacagtaagttagtactaacaagaaactatgtccatctgttgcccatgtgtccattaaatattgctaagaaaaagaagtaggacgcaaatagtatgtrtaatatgaactaatttttaactttgtatgtatgtttgagaaagagaaaagcgtaaaaatggtgaatcaaattaacagtgattttcatggaagactgggattgtagtgaatccttcattttctccctatgcacttctgaatggcttggattttgttacaatgagtatgtactgtttttataattagaaaaatgatattcctattagaaaaggaagataaagagactaattcttcactatgttttccaaattttaatattacttatatcagagattattttaagatattttaaactactcagtgtagtagaaacaatactggacctacaagccagtcttcagttgtgagttccagctctctgtttttcctatctgagcctcagctgtcttcatacacaaaatgagtggctgtatttactgactcacaaagtccctactagtactcacatttcataattctaactggaaataaatacaccaggcattcaatcctgtcttatgcaatatggcctaaaatgaggcccacaaactgstataatccaaagacaagtggactcttggaagagctgaattacataatagaataagtttctatcatagatccccagggaatgagtcttttttatacacttaccgtcagaagttctgtcaaaaattctacaatcatctccagccccaacatacacaatttactagacaggaaattgaggccacagaggcaaagggacttgtacaaaatctcacagctaatgagtagaaaattcaggattacaaatatttaatcatttctgggctgggtgtaatgcttcttagatcttagagttcaggctaaacatgtgataggttcaaaacaatgctttgaccgtcccccacagccctacaccaaatgaatttctttatgawatcctccacagcccgatccacatctctgaaactgaaacacattaaaaggaaaagatttttgaagaagtataatttccatttcctttttccacccacatatgtgcaggcacactgatataaaaagggactttaaaaaatttgtggaatcttaagcaaaaagaacaaagtcagaggtgtcacattacccaacttcaaactgtaccataaggctacaataaccaaaatggcatggtactggtacaaaaacagacacatagaccaatggaacagataagataacccagaaataatactgcacacctacagccatctaatcttcgacaaaggcaacaaaaataagcaatagggaaaggaccccctattcaataaaaggtgttggaataaatggctagccatatgcagaagaatgaaactggacccctacctttcaccatatgtaaaaattaactcaagatggattaaagatttaagtgtaagacctaaagatttaaataaaagaatcctagaggaaaacctaggaaatacaattttggacatcagctttgggaaagaatttgactaagtcctcaaagcaattgtaataaaaatgaaaattaacaagtgggacctaattaaactaaagggcttctacacagcaaaagaaactatcaacagagtaaatagacaacctacagaatgggagaaaatattcccataatatgtatctgacaaagatctaatatccagactctacaaggaacttaattcaacaagcaaaaaaataataataataacatcattaaaaagtgggaaaaggacatgaacagacacatctcaaaagaagacatacaagtggccaacaaacatatgaaaaaacgctcaacatcactaattatcagagaaatgcaaaccgaaaccacaaagaggcaccatcttacaccagtcagaatggctattattaaaaaatcataaaacaacagatgctggtgaggctgtggagaaaagagaatgcttatacattgttggtgggaatataaattacttcagccaatgtgaaaagcagtttggaggtttatcagagaccttagaacagaacttaaaatttaaaacattcaaaccagcaatccaattactggctacatatccaaaagaaaataaattgttctaccaaaaagacacatgcatttatatgttcatcacagccctagtcacaatagtaaagacatggactcaacctaggttcccatcaacagtggatcagataaagcaatggtccccaacctttttgacaccagggactggttttgcagaagacaatttttccccatatggaggtggggaggggaggtggggaaatggtttcaggatgaaactgttttacctcagatcatcaggcattagattctcataaggaacatgcagcctaggtccttctcacgtgcagttcacaatagggtttgcactactatgagaatctaatgccatggctgatctgacaggaggcagagctcaggtggtaatgctcacctgcccaccactcacctcatgctgtgcrgcccagttcctaacagcccatggactggtaccagtctgkggcccaggggctggggaccccttgggtacagaaaatgtagtatatatatgccatgmaatactacacagccatagcaaagaatgaaatcatgtcctttgtagcaacatggatgcagctggaggccattatcctaagtgaattaacagaggaacataaaaccaaatactgcatgttctcacttacaagtgggagctaaacattgggtactcatggacataaaaatggcaacaatagaaactgggaactactacatggggaaaggaggaaagtgaggaaaggggcaaaaaattatggggtgctatggtcactacctgggtgatgggatcattcagacctcaaacctcagcatcacatagtaaacccacgtaacaaatctaaaaccatttttctggaaaaatggaattaaaagataaaaataaaaaatataaactttatttctctataccatcaccatcaaattcatgacatttttttaagtgatgatactagccatttagccatccctaaaggactgagggtcctggtaagttaaccatgtctatacagtctttctacttgttaataaaataaaatgagtgtcttttaaaggtttcttaagattagaaaacaaaaagaagtcagaagaagtcaaatcaggacggtaaggtggatacctaatgagttcccatcaaaactcytgcaaaattgccctagtttgttgagaagcatgagcaggagcattgttgtggtggagaaggtctctctggtgatgttttccaaggtggtggtgtgctaaagctttggctaactttctcaaaacactcctaagaagaagatgttatcattctttggtcctccagaaagtcaacaagcaaaatgccttgaacatccaaagaaactactgccatgacctatgctcttgacagttctgcttttcctttgactggaccatttctatccctttgtagccattgtttcgaatgtgctttatcttcagcattgtatcagtaaaaccatgttccattttctgttacaattcttcaaataaatgctccaggatcttgatcacacttgtttaaaatttccattgaaagctctgctcttgtctgcagctgagctgagcacaaaagtttggcacccatccagtagaaagcttgttcaactttaatttttcaaacagaatgtggttggaaccactatctatggtgtatactattgtttgtgttgttaatccttggtcctcttcaatgagggcatgaacaagatgaatttttttcttccaagttgatagggatggcctgccactgcaggcttcatcctcaaaatcatcttgtctcttcttaaaacaaatcatccatttgtgaactgctgatttctttggggcaccatccctataaccttttggtaaagcatcaatgatttcacccaagcatcattataaatttgatgttcatattgctctgatagggctcttttcaaactgatgtcttatccttcttattatctcaaagtagtttctgttcagacatgttataattagtacaaatttattttgatgcaaaaaaaaattttaatctatgcatagttttttcataacacacattttctatgaacttgtgaagagccctcatacacctctcacttactttgtataatttactttmaagctgcaaccacactcaaggtgtggrtcacagctatcctggccacgtgcaaggaacaaaacaaaaaacgactttaagatggaagatatattaaaaattagggctgacttagaagtgtagagcagctgtgtttaataaaaaatcatgaaactaggaaataaaagacctaggttcaagttctacctctgctactcagttgtggtaggaccttggtcaagctatttaagatttctaagcctagtttccatatgtataatttaagaaccattcactcattctcatggtttttatggtatagagggagagttaagtattaaataatcatacaacaaatgaatgaggatttgaagacaactaatatggtcctttcagagaatagaacaaaagtacctgacctccttcgtagcaggtgatgcttcaacttggatttgacagatgagtggtcattaattcactgaaaggaggaaggagttaagaggaagtatattctaggagaaggtaccaccatgttcaaaggctccgtagtggcaggaagcatagctggtttgacgaaatgaaaagaagccagcaaaaatggccattgaaaagtttaaaatatgggagtgaatgttacagggtagctgtgagatgatatgaaacagggcacagaacatttctttaagtatgaaagcacaaaatatattaggtgttgataggataaaagtatacaaatcatctaaaagaactcttccccaacacaaaggcactgtcaaaacattagctggtgttgttcagtgactagggtactctgctaataaaggcaggaatggaataaaacatcaccacagtgacttttttcaagttgaaaatcttgcagcagaaagaacaaaagatacaggttcaccacgcataaaagaacctgactgtagggcaaacaaatgacagaatttgtcagaaatctccactgcagagccaccaatgaataccaacctagtttgacacagtacaggtgaaatgccagaagagaagcccccaggttgtgatcaaatgcagctgcttggaaacaattcaaaatgcaaacaacagacttcctgaactcctgggtcaagtttcaaccacagaaattataagctgactttgtcacaacaaaaatttgtcccacaaaatggatattttctttcgagcttgcatgaaactcaaaaaaaaaggtatcaatagaatggataggtcatttgtctctcaagaacactgctggggaaattacttataagacttataaatgagggtgatataatgtcagctctgataaggatattaattaaaagaaaattgactgttgacatttctgcaagttcagactatcagatcaaacacaaacccaaaggaagggagaaggtcaaggtgatattctataagccagaaagtagattaaaagtttctggacaagctaagatatatgaaattgcagacctgtgggcttttatgcttatagaaaatctaaactagaaccatctacaacttaaattggaaaggaatttgtagaaacaatgtactagatagcaatcagcatgataatacagagcacatcaatgtaaatttccttttttgacaaagtgaaagaccacataaacaaaggagaaaaggggtatataatctattataaccttagcaatcttttcaattctgccatgcaatacatagtaccatataagataaaaatctagatttttatagtaatgagatgactggaaagttatatgcaaaaagtggttaactaaacaacaggataatgtatactacaattttaaatatatacaaagctatttaaaaactaattgaatactaatcaaagctttggaaagagaaactagaagcaatttgaaaaaccagaaagaaaaagatggatatactatgtcacctatacatgaacacatttctgaatatcaaaagcataaccccaaatagagataaattatagattggggaaaacattgccaaataatatggtagacatcagattactatcttaaatatacaacaaggtcactaagataccaatgagaacaggggtaaagaatgataaagacgacagaattaaggcctgttttttatttgtttgtttatactttaagttctagggtacatgtgtacaacgtgtaggtttgttacatatgtatacatgtgccatgttggtgtgctgcacccattaactcgtcatttacattaggtatatctcctaatgctatccctcccccctccccccaccccacgacaggcccccgtgtgtgatgttccccttcctttatccaagtgttctcattgttcaattcccacctatgagggagaacatgtggtgtttggttttttgtccttgcaatagtttgctgagaatgatggtttccagctttatccatgtccctacaaaggacacaaattcatccttttttatggctgcatagtattccatggtgtatatgtgccacattttcttaatccagtctatcactgatggacatttgggttggttccaagtgcacttcatgtctaaaacaccaaaagcaatggcaacaaaagccaaacttgacaaatgggatctaattaaactaaagagctgcttcctcacagcaaaagaaactaccatcagagtaaacaggcaacctacagaatgagagaaaatttttgcaatctactcttctgacaaagggctaatatccagaatctacaaasaacttaaaaaaatttacaagaaaaaaacaaccccatcaaaaagtgggcaaaggatatgaacagacacttctcaaaagaagacatttatgcagccaacagacacatgaaaaaatgctcgtcatcactggccatcagagaaatgcaaatcaaaaccacaaagagataccatctcacaccagttagaatggagatcattaaaaagtcaggaaacaacaggtgctggagaggatgtggagaaataggaacacttttacactgttggtgggactgtaaactagttcaaccattgtggaagacagtgtggtgattcctcaatgatcttgaactagaaataccatttgacccagccatcccatacccaaaagattataaatcatgctgctataaagacacatgcacacgtatgtttattgcggcactattcacaatagcaaagacttggaaagcctggtttctaatgaggttttgtttagggtcattgctttgattcctctgtgtatttgttatctattgtcatataaaaaatacctgaaaactaagtagcttaaaacattaaacatttattatcttacagcttagcagcttagttggctggggcagcagtcatctgaaggcttgactgggggtggatgatcagtttccatatggttcacacacatggttatgggcaggaggcttcagtctcaccacataaacctccccgtaggctgccagaacatcctcacaacatggaagctgatttccccagaatgaatgatccaagaaagagcaagagaaagtcacactatattttgtgacctggcctcagcagtcacacactgccatttccacaatatcctactgattacacaaatcagccccatccagtgtgggagaggactaaactagggcttgaatgtcataagactagctactgattaataatagaaaatataaatctttcttttttcactaaatatttattgaatatctacaatgtgccatcgggagttctaccctggtaaaaaccaattcaaaatggtaaacctcacagtcacagaaacctcaagtaataatatcatatttcaacactgagcaacagtgagatctaagaactgcgcattcaggttgcagtctcaactcttcatccctgaaacatctatggatcattatgccaatgggaagttcataactttatttaatggccagaaaactgttcatctacatcgcaatacctcagcccaacatcagatctttcccaagcatgtcaacacaaatttccaaacagagattgcagctctctagctaggaccaacacaagaatcatcaaccaatgtttgaaagactcagatgtgaagcctgtagacattttctagattgttccaaattcattttatgtgcaaaagatgatatttctagcccgccacccctagagtgtgcatttcactttgtctactacccaatcaacacatatttgatggaatgcctgttagattttaggcagtagactagttgttgggaaacatattttgtcttcatgggagaaatagacagtgaagcaaaaataaataaataaacaaactgaataatatggctcaygataaatgccataaagccaataagcagaggacttgatagcgaatgctaagagaagggtagcagaagtggcctgggatgattttctgagataatactatatgccgagaccttggggagctagtcatttttaaaaggccagaaaaaagcactccaggtccagcatttcagactgataagtgccaaggtataaaaatgcttggtaagagcttggatctgttggatgacagtttggctgaaacaggaagcaaggagagcatccctcaaactgaggtaatagcaataagaggcagaagacaaacttttcagggacttaagagctgtgataaagagtttggggtttatgctgagtgtgatagggaaccagcaaatgtttttcatygggcaagtggcaaggtcagatgtaaatttgtagtttgtggcatagtccatgagacctgtggtttgtgtgacagctgccagagagcaccaagggcagtcagggcaaaggaaccaagcggctgattttgcccatagaaagataagacccttggccttatcttcatttgaacagtgccatttttattggggactgaaataaatgcatctgttgctactgatggttagtttgtcctcatttgctgaaagggaaaggtctcttcatgactcatccacaaatcctgctgatcctcctaattaaaaagttttcaaacaagttgatacattacttattaagagcccagacacaccaggcataaatccttcctgccatccatatgtatgccaggacttcactgctgtatctttcatcattatgagggatatccttcaatataattttcatgacaccatctgccatgttcttctctcaactttttttggtggggtgacaactcagtgrttatgaatgtcatatctggcatcttttaaaaataaaactctatcagagatctcaagggggaaaacaagtaataaaaacatatccggccaggagcagtggctcacgcctgtaatcccagcactttggcaggtcaaggcaggcagatcacctgaggtcgggagttcaaggccagcctggccaacaccrtgaaaccctgtctctactaaaaatacaaaaaaattagccgggcatggtggcaggctcctgtaatcccagctacttgggaagctgaggcaggagaactgcttgaaccctggaggcagaggttgcagtgagctgagatygtgtgactgcactccagcctgggcgacagagtgagactccgtctcacaaaacaaacaaacaaatatccactggcaagtgctatggaccacagacctaggaatgcattgcaggttagccttttttacaccaaaaacaatgcaactaagaatgaaggtaaactgaatttgtagccttcttagttttcagcaaattaattcttgcattcttttaaaacattgcacgttttcatcagtataattggttatgtgttgcaaactattaaaggtggaaagagcaattcttaaaattaaactctctctccattcaccttcaccttatgtatccaagacctttaaagttccacctcctctgagatgacttctctaatgaatccaaccacatggtttattcacattatgtgacattatatgtggcctctggcatgaarccattagcaaataagcatggatctaatttgtttttttatatatctccacccaaaataaataaataaataaacagagacaaggacttaggtgcaaggagtttattttggagatacccccaggaagcagcagttagggaatggggagattgaaacaaagaggtaggaagaaaccataagaggtgctgttmaccaccatgggcaagtggtgctcgatgcagctggggactaattcttgagtgacaggtaggatgtacctaagaatttccttctaagggacaggaggttaaggaatctatcatattttctagtggttgaagtttgcctctggagcatcaattttccaaagttctgtgctacccaaaaggcagatcaagccagctcctgggcctttggaaaaagtcttgaggcagaagtgcagaggggtgggaggtgcttaaagtgggatgacgtcattttgcatgggaactgtccagcacagctatagtggaaattagtggtggatcaagagattgtagcagagggcacaaaaagtgtctatttcagcataaaaactgtgttgttaattaaaaataaaattttgtttaaaatgatgtttttaacaatatcactgaagatataaacactcatttctcttagtgtcatagagagactgactgatcagctgactcagtctgagaatgcccaagtattaaatgagcacttgtcgaacactagttgagcagtatgaagcaatgcacaagttaaagtcaagatgcccaactctcaaggagcttgcaatcttacagggattatcaacattcacaaacaaactaacacataactggtagttctgactacaaaggcagaaaaagtgagagacagcatcatgtagcggttaaaagcttccactctggagtcagagagacctaggtttaaaattaatctaggatttgcagtgtgatcttggacaagggtcttaatctctctgtgtcacaatttcttcatctgatggttagaaaaataactatctgcttcatggagttgtctgaaaagtaaatgcaagtaaagcactaatcacagcacccggcacataaatattcmttaaatgtcagttgttttgtgaaaattaaagagaaacgtaacagtagaatggsatttaaagaagagaagtatctccttgtcagactctttctctttcttaaatatgaattttctatagcctctggcccctgttctagtaccattttcccttttttaaaagtttcattttctaaaaaagaactacttatattaagattgggaggccagtattaaaagatgtggaaatatagcacaaaatgcacgagctttggagcaatactagccaattttaaatccatgtatcttgccactgaatgaccttgggtaaatctcttaagcacactgccactcagttttctcatctacaaaatgggagcaatataacctgtcactgtgaagagtaaaggaatgtctctggaggatttccaacacattttagatcctcaaaagtattgattgctattactcactattsattcagtagacacttactaggcacctactatgtataaagcactgtactaggttctacagaataacaagacagacataaataagatatgggtccaacagtcaaaagtgttacaggttaaacttattaatacataaaaaaatctagatgtttgaaatgactcaaattaataagttacctgaatatcaaatgttactatcctaatttcaaagacaggaaaggagacagggaggaagagagagggggagggaggtggggaaggaggaaactaagctggttatctctgagacagagtttgcagaaatacaagatgatgagatctgtttaaattcacatctgctataggatactcagaagtctacaatgtgaactgaactcagagaagatttctcccatgaggctaagaatgtataaggccaactctaccaaccctgaacctgcaacatataacaatgctgctctatcccaaacttctaatccaggtgaaaccaggatgaaatgactgtcattgacaccctggaagggaaatgagtttgagtagagatgagaaaaattaatatggtgatgatgggatcattctactggctggaatgcatgtaaggcctcatctctttcctaagtcactgtcttaccaaaccagaatggggggattccaaaaagagcaggatctaagctagcaccccaagtttattaaactcaagaatggctctcaagatgagcatggtcttcacaagtatatacttctccttggttcaacaagtatcccttcctcacacttgcagaatactttatagttcacaaagcactttaatgacatttaatgtccatcatctcacttaactctcaggacagccctttgtgtttagtttccattttgtagacgaacaaactgaaacttgggaagcttaagcaaccggtttgaggtcccataccaagatgcagaggagcctggactgaaactcaagtcctctggttccatttccagggcattttccacacttgtgtacagcctctgagaaaagggaaggttgcatcaatgaaattggaaggcagtaattggaagccattttcctctgacttagagacctgaggcatctctgtcaaataaaaattcccaactaaaaaactggtggtaagccgggcatagtggcacaagcctgtagtcccagccactcaggaagctgagggaggaggatcacttgagaccaggagttcaaggccagcctaggcaacctagcgagacgtcatttctaaacaaacaaacacacacacacacacacacacacacacacacacgcacgcacgcacatgaaaaaattggtgtctctgaatctgtgctatccctccagatcctcagatgtgaaatccttaaatcctttatgaacatggagcctactccatgaagagcaccattagattcaagatagtaaaattcattygaaactaattggtgagtaatgaagttgctaaagtttatgagccttgcaccaacactaatacagaggtacagtgtcaacaataaaattgtaatcactgacaaaactagccttcatgcagaaaagggaagccttttccttttcccttggcctgtagacaatagcattagwyaatttttggagtgacaagatcacttsctcctgsctagttttaaagagtgaccacaaggaacagcttckcccttagaaataasttttgattatttgataatggaaaggaaaaaaagtgtacaactctcctctagttaaatttcaagcatttagagaagtggatatgtctatatcacaacatatcctgaaaaacagccatggccatacacaagagaataatacagtgcccctttgtactcctgtctacacaggcagttgtctgctaccaaagaggggttccagaagaaaatgttatttggggcagaaaagactggcctcccgccccccaacagatctataakaatatgttaacctcctgtgcaactcccagagagctgaatggataaatacactgagtactcagtaaaatctacctcaaaacaattattctggtttttgcttagttagtatttgttcttcctaattgtattaagagaaccagttgtttccagaggtcagtcctggagaatgccagcaagccctgggatctttattggctgggatcttcatgttggctctgatgctacactgaccaacraagttaccacaggtctcacacagctattgagcactgaaatagggccagtccaagtggcatggactgtgtgcagacaaagtgactccatattaaatgttaatagctatgttgacttattaacctcagtcccaggaatgctttctgattcccactctatttactgtcctcaatgtgagaacatgtacttgctataaatcccgcctttacatcaaagcaaccttgatgttattgcacaaattataggctatgangcacatagcattcttgycttttctggaggrctgcctttaattggctatagagcacatatgccctttctctgtggtatataagctcytggtctgaggagtaatggtgtggagatctacctgtcttgctgccacccaagaccatgaggcaagttccccagtaaatcaccctttactagcaaactggatttgtctgcctcattctttggtttctcagctccttctgtgcttggtggtcactttgcatatgtggycttttcacagaacagactatacatgtcaaatacacatcagattttgaagatttagaataaaaataataacattggtaatttctataytgattccatgtaaaaatggtagtagtttggagggattgttttagtaaaatagattacaaaatatatatttttaaaaataatttcacctgtttcttttcaccctaaataatatatgtactagaraatttaaaattacaaatgtagttcacatgtttgaattacattatatttttatagggctctaatgctctggaggacacatccttattctccaagatctctatcaagtcatttaggtaagtttaatagaagaggtataaatgccatgttttaatgaccctgaatttgggtaagttagaaagtgcttacttgctgtccaaggttctttgaaagtagaaagatgcaaaacagtgtgcttgtttgcctggttgttttgggcagtttgatctctcattgtctctggtaggaacagtgtctgtttaactgatctgtagggattcagcattgtgtgatggggcatgtgggtgtttaactgtaacacttgagaagaatgcttacagctcagctgttagaatctcgtgctaaggaatctaaggttaagggttgaatccccagccagacacacttagctcagctttttttgtggaccaggcatgcactccccacctgggcttgctttcttgcaaatgtccattcttggttacaataggggccagtgaaataatggtgctgtacacttatcaaatccatcaacaccactccaaaaagcagctcagcttcatccttcaggggaacagcatcacctgtaccaccttttcatataaaggaaagcatattattttcctgtgttaaaaaagaaggttttttttaaagcgatacctgttacaagtttcaaaagccaagcaaaggtaaaaacataaaaagtattgtgtttgctccctcatttgcttccagaaaaaccattcttaagctataaaggtccagatttgggtaagctaaatcctgcccatctaggagatttagaagatcatagagaaacatatttatgcttcttatttttcataaacttactattaagaaactcagtatattagattcttgcatgacttgtatccctcaaatttccaagaggaattggccagcagtgctgtgtaacagaagccagagtccagagattcaggccacaggctgactctgcaccaatggctrtgtggartgggacagttcatctccgtctctggttctgtgtgtccccctctgtaaaagcagagtttgtacttacatttagtctaattctatagtttcaaagcaccctagttgaccaccttgaaaggccaaatcaaacattcatgtttctcaagtctactttttttgttggtttgtttctcttcaagagcaatagaggtgatgcctcagaatttggccgaccttcattttaaacagctgtgccaggcagctttggaatgggctcctgtctccagtggcttttgcacctgcaatctggctggctcgagctttctgtttcccgcctgccccggcagcaggctaggagtaagagcagttgcctatgacgttctctgaacctcctgctccaggcgactgagccaggagatacctaaggggcttgtcaacacctaatgctgtctctccttctccttggctccaaacactgttctgggtattgcctcgctgggcctggctaaagctctgycttctgaagtgaaggttgaccttttattaaatactaaccctacaagaaaagtagaataaactagtcccattgtaacttgccaagattaatacatccatagaattggggcaggagataacaccgaatgtgtactacagactagatattgttaagtagtatatttctaatttaatctttaatctttataataagcctatgtaatagataggcactatgattattgccaatttacagatgtggaaactgtgggttagagaaataaggtaactttcccatagacttatagctattaagtgacagaggtaggatttagagataggtagatccacttgagtccagagcttatagaggtacctaccttaccaacaggacggctttttggaattcatttygataaaaaaaaaatcaagttggatatgacggacttgatcatttcttctgcctgagatgcctaacacatctaaaagagctgtacgttagttcatgttattgaaaagcagccaccaagacaggctagatgtcactatttctgagcctccttctactcctcttgtttttttccttttttaggagggaaagactggcggaaagagaaatacacaaacctcagaagggagcagacaattcacacatttctacagtttaaccttcagtgccagtaagtgtcaggtagtagagcttcaggtatgccccaaaagtctccttgcaaggaactgagaaacctggaacatttctgcgtttatgcttatccacctatttctatcctctaaattcatttgatatctgctcttcctttcaaaggtaattcagatcacaccatagcaccacrgaccataaatcattctgaacagaactctgtttctggggcacatcaatgttcattcaagggatcgtgctttagaaactaaccaccaatatgtatttcagtaatctactccaatacttataatgtgacacaaagaacaatcttcagccttcaccacttcctcaacaccacattttgctcagctttccagaactgcctttggaatctcatcttataggagggagcttatatgcaccagaaaagataatgagcaatcctgtttaccagaaactcatctaggaaaacagctaaggaaagaggatgaagcttattaataagccccaattctcagctttgactgcgttagatatatcaagttcactggaaccttactaggtatcctagtctcagccactgtatttctcaggtctgggacatatctctgagcctttcccctatgctgatgttggtttatcaggtagtgcctgccaacagcctatggctcatgctaaaaataattgagagttgctcaattatttctagagaggcagctggtgtagtggaaagaacactgactgataataacagctattgtttactcacttcatgcaagacattttacaagcattatctccattctgctgataacctaaggaaataggtatgattgcccccattttttacctgagtcagttaaagattagagaatatccatgatttacccaaggcctcaagtttattgtccaacagatccatgatgtgaattgaactctctctctgattccatataattctgatgtatcattactgcctccaaatagaaggcagaaaacttggtcagagtcctagaattgccacctgggtggcctataacaaaccttaatttcactctggatcttaattagctcagctacagaatggaaataatgctattgagtcttaggtgaggatgcagtcctaagagtcaaatagcctgggttaaaacctagtcccaagcttaccagatgcatgaccttgaagaagtaaattagctttacttttaacatggaaataatagcaacaactaccccaatagatattgagtagattaaacaaattaaaacatgccaaatgtattagtcagggttctctagagggacagagctaatggaatatatatatgtatgtatgtatgtatatatatatacacatacatacatatatatacatacatatatatacacatacatatatatatacacatacatatatatatatagagggagaggagtatgtgtgtgtgtgtgtgtgtgtgtrtrtatataatatatatataatatatatatataaaatatatataatatatgaatataccttgcatttatatatgaaaaaaacagaatgtattagcctgttttcacwctactgataaagacatacccaagactgggtaatttataaagaaaaagaggtttcatggactcacagttccacatgtctgggaggcctcacaatcatggcasaagagcaaggaagaacaaacggacatcttacatagaggccagcaaagagagaatgaaagccaagcgaaaagcgtttccccctataaaaccatcagacctcgtgagtcttattcactaccacaagaccagtgtgggggamctcaccccccatgattcaattacctcccaccaggtccctcccacaacatgtggggattatgggagctacaattcaagatgagatttgggtagggacacagagaaaccaaatcacagagccaccagstgatagtctgcaaactccttgttttaaaattattttctcctttgcctggcctagaggtatggaggctctattatcatagcatccagatggacataggagagcagcctgaatgccaagatgtctggtatcagatagctcagttaaaggcaaagtatggaaattactaagagcaggaaaaaaaagatacaaatattttcatctgataagagaagattacagtgatcacagagtgtagtggtttggcatcaggctgccaagagtgaaattccaacaagtttgcttatcagtgtctcagtttccttgtctgtargctccgcctgttaatagtgtctacctacagggtcactaagtaaggtatttatcacagggtaagtattaaataggtaatagatgtaaccctatgaggtattctatatatctgctgaggtaaattcttgttcctaataatgtttcctccaacttcctgtgagtttcggcggtgagaaagttagaatggaaaaggtctgaaattgagagaaagttgcgaaatgagcaataagatggtgttcgtgccctacgtcaaaaagacttggtcagaaacatacatctttgagacagacttgagagctcttgtttggctctctgaccttctgtgggaaattaaatctcccaagttgttaaatccaagccagtctttttctccttttcagttttccaaggtcrtaaacacagaaaagggattcctggccctggtactagagctcatcttataagcccaatgtagtatagttctaaactaagcatattctataagcaaagtccctagatttgtttcctggcttcaccacttaccatcaattggaccctcggcaagttatttaacctcactaggcctctcttttatcatctgtaaaatgggaacaatgaaatagagacactgagamaattcagtgagacaatgaatatgtgataggcagaacaatgtccccgtcccccaaaaaagtctacgtcctaattcccagaacctgtaaacacgtcatattacatagcaaaagggatgctgaaagtgaaattaaggtttcagatctttaaatagggagattgtcctggattatccgggtagacacaatctaaccacatgggctcttaaaagtggaagaagcagcagaaaagtcagagaagtggccagagagttccaaagcatgagagggattcaacccacacttgttggctctgaggactgaggaaggtggccacaggtaagtgggtggcctctagaagctagaaacagtactcagttgacagtcagcaaggaaacagggacttcagacctgtaacagcaaataactgaattctgccaacaacttgaattagcaggagtcagattctaccctagagcctccagaaaggaatacagtcctcgtaacacctggatttaatccaacaagacctgtgttggacttctgacctactgaactatgaggtagatttttgttgtgtcaagctctaaggctgtggtaatttgttatggcagcaaaggaattgtggtacggaatgtcaagtacttagaatgtccccagcacacagagtaaaatctcattcaaatccagcaatttgatgatggcaatgctgatgaggaagaggggaatgacaatgaatttttaggttacatctgaaattatgactattaagcctgcctataaacacaatattaagatttttaggtcctcttgtggatccaatatcctattaaatgttttctatttagtaaattactttatctaagcctcaaaactattctatgaaataggtacaattacacctattttcatgaggaattggagctcagaaaagttcatttatcttatgctgagtttcgctctgagtgattttgggttatgcagaagctatcaaggacataagacaatcctagtggagggaaaagttcataatgtccccaaagacaaaaatacagcacaatgagttattccttcaatgagcatacttaggcaacactttctttccatcaaygcctaaagcgatggttggagccctttgaaatcaagttaaatggggagaggtgcacagaagcactagaacttgcmattgtttaagagacagaaaagaattgtgctgtctgagcaagacaatcctagccatgtgcctgctgagagcccagagcatgtgagctttaactaaggaaaccaactccaaatcctcagcagctacggaartatgaaatggatttcaggtggactgagacagagtttagaaatgggaccaaatgtgcagtctcttttraccaaagtttaaaggatgatttgcttcttcttttcccaagcagaatgcaattttagatcactcattacatcccaagagaaattcataaaagtattactcaacaggtgaataccacaggagtttctagttcaaattttagaccactccaagtatggtcaggcaaccactgcctcaaaattacttgtgttgcctgaaagaaatatagcttcctgtccctctcccaaaagcaaagaaattgcagaagcccagaatctgcatttggtgattctctcgcaaattcaagtttgagaaaccctttgtagagacttacatgggtatccagaggtaagtcaggaggcatcagcaaatattccgtggcaggctccatgagaagtactgagataaaaattcttgccctggctccaagatttcacaggcaattgatgaactacaatacaggacagacagacataagtaatacatagaggtaggtataagtagactgctctgggcacacagaaatagagcaatcaattctagccagggctctccctccaggattttaggaaaaggtatcagtcagactaaacttgacaatgagatcagcagattacggtgtaagattggggaatagtaagttggttccacaagcagaaggaaggtccagaccaaggtcagcaaaggcacaaaagcatgtccaggcctatgctatggtggaagagaggtcctcaaagactgtgagtaaagacgtcagaaaatcagtccagctggaggacaacaaaggcactgatggccataataaagtgggggacattttgagtttttaaagcaatggtatgagttagtctatggtttcaaaatgaaataggctatgcattattttcctgtcactcccataagaaattatcacaaaatgaatggcttaaaacaacaagartgtactgtctcacagatctggaggctggaagtctgaaatcaagtgttggtagggctagattccacctaaaagctagagtgaagaatcctttgccacttccatctactggtagctccaggccatcattggcttgtggctctatcacttctayctctgcctctgcgttcatgtgagtttctcatcttctccctgttatcatcctcttttgtctcttatgagagcatctgtgattggattaagatcccaaccagatcattcaaaatgatctcatatttagctgcttaatttaattacacctgaataaaaccttttttccaaataaaagcatattcacagaagattaggacaaggatatattttagagaggccacaactcaacctwctataggcttccattaggctgtatgatagatagacagagaccagtttttgaagacagacctaccctggtttgtaaaatcaattctgctacttattgggcatagaacaaatgtgcccaatggtgataataaatattttgtagggttgttgtgaggattcgaataatgtctatacctttctaagatagtaggtgtctggtgcataatgcggtctcaataaactgtagtaatattagtgacatgaagtacttgtgctttgtgagatatgttaaagagacactgcagtttagggggtgagtggacagggttgagaaatgaatgctttgggtgcagttcttagcctatgtgaccaatggcctatgtgacctgaggaaaatgactttgtctgctggagtttttttaatctgatatttgtgaaaggaaatttgtaatatttactacatcaggagattgctattagtgtttaaaaaaataatgaatgtatttagctcccactagaatatgagaaaacaaaacaaaaccaagcaatgaatgtaaaacatttatcccagtgcctatcttagcacatagtaattgagctactcagtgattatgaggatgagacaaaggatcatgtgtatgagaaagtagtcattcacacatggagacctcatgtttagaatgtaaacaaagtacttttgtgtgaaatagctcatttagagctcctataaactgttatcttattttgaggctctgcctggggcaagaactctgcccttccagatgttcagggagagaccacctccctggatcacatttcttatcaaattaagtactgctgaaaattttctgttgacttttggagggcagaggccaaaaagaaaaaatgaaggctctttggggaagacctgcatgagggttctataactcttcccataggcctgagtgaaggctgctgcaggaggagttttctcactcctcacttccatttccttcttgctatgatcctcagaaatgaatccattaaaaaaaaaaaaaaacagagctggtcaaccaagacctgctcagtccagagaagctacacagagccccactgtgaggagaaactaacatgataatctattctggtgctgaatgttctgtctctacctcaacaaagcagaggggctttgctttaaattttttttctaattttaaaacaagacagcaaattaattgttagtgtccaggcaaagcagatctgctgaggtcagtgaggcaaaaaaaaaaaaaawawaaaaaaagagaccatggtgaaatcacaaggagaatcatacagaactaggtggagatactgagggaaccaacacactgttctgaacactttgggggcttcagagyatgaagatgaccaggttccaagatatacacacagcttaaaagtttcaaggagacacaaatcagaaaggtgtatcaccacaggaggagaaacaaataaattcaagtattcccaaactagactacaccacagaaatattctaagactaagatctagtcaaatacattgagagaagagtgatctattggcatgagtgacacagagtaaggaaataatatggatagaccacatttattttcaatgaagaaagtaacatagcaaagataaaattgaaactaagtttctaaataattccttatctggtcccttccttctcattctgacatcaccgcctccttccttcaacttctatagtaagttctaastggtctccttatccacctccacttttaacccattcttttcacatcttccattttaacattcttcccagaaaacataaatggccaatacatcggaataaaatttcacatatgccaatataacaagagatgaaggaaasttaatggtagagggaggaatagtgtgttttttagttctatcagattcttttttatactggcattttcatctgtcaactcctgtatcatttttttgygattcttagtttcctttgattggattttgctgttctcccaaatcttgatgatcttcattcctatctatattctcaattctatttctgtcatttcagacaactcagctggttaagaacccttgttggagaactgatgcaatcatttagaggacatagacacttgggtcatttgggttgccagagttcttatgttgattctttctcatctctacatgtgtgtgttcctttaactgtgatatagattgaatatggtcagtagacttcttttctggatgtgttcacagggccaaggctttgcgcagggtctttatttgtaactgacatcttgcctttggtttcacagtkggcgggttatgttattgaggtattttggtattgaagctttggagtatgatccaataggtggcacttagatgtagtggtcagttagcaggttcttgctcagttgctgtgttctcggtcaatgatctgaaagtgtgagttcctctcccacttaagagctggctgtagatcgtggcttgacattcctgggctgcccaccaccgctgcagggtgatcttcaggtttatatttcctcaccaacttggaggcagcagaggaagaggccttatcaatagatgtggctgatggtctttcacttgtctcctgggggctccaccccagagatatgcaggtcagcaatcgctcactgcaatcagcccaggataaggggtctgtgctgtgggcccaaggcaggggttccctgcttggtgatgggtgatggggtggagtctgtgggagaaggactggcctcctccccataggtcgactgcagcttgttagaggtgtgaataagacacttacggtctttgctccttcattagactgagggtagcagggatagtaccactacagaggcagtagcagagtggctttcagttgctcccgggggatccgcctctgataaatgtggactcccagctgttgcccagagtgttcagccattggggtggggcagctgcactgttggtgtgagcttggggctccacttgctggggagcaaagggcgaagggctcactgggaagagagactagtctactctccatatggtgayagtggcatgctgtaagctcaggtgtagccctcaggctctttgtttcttccccagactgagggcagcaggaatagaaccactgctgtggcagtggaagagaggcagtcagatggctctgggagtctctccccagggaaactccagaccactaccactgggtatgctcaggatagctaagttttaccaggaaaatgcaaatcaaaagagttcaggggttgcgatattagtatcagacaatgcttaattcaagaaaaaagcaataaagagcataaacagattaatttactaactcacaattaagacagcaacttaaccatttataaacaaaatagcatatcataatatttacattttgtttgaaaagagaactacctaaatgcaacagcaatggcaaacattaaagcactccccccttaattttttatagttcaagtagaaaaaaattacagagaattgaaatacagaaaatacatttaatatatatcataatccatatcctaaaaatggatctataacttccttcaagcatgcctgaaacatctatgcawwtttttttttttttttttttttttttattatactctaagttttagggtacatgtgcacattgtgcaggttagttacatatgtatacatgtgccatgctggtgcgctgcacccactaatgtgtcatctagcattaggtatatctcccaatgctatccctcccccctcccccgaccccaccacagtccccagagtgtgatattccccttcctgkgtccatgtgatctcattgttcaattcccacctatgagtgagaatatgcggtgtttggttttttgttcttgcgatagtttactgagaatgatggtttccaatttcatccatgtccctacaaaggatatgaactcatcattttttatggctgcatagtattccatggtgtatatgtgccacattttcttaatccagtctatcattgttggacatttgggttggttccaagtctttgctattgtgattaaaaggtgaagaaagctcaatattctaaaaacaataggtcctaatgactatagttaattataatgttttgtatggtcaggtatggtgactcatacccataatctcagcacttttggaggctgaggcaggaggatcacttgatgccaggagtttgagaccagcctgggcaatacagtgagacctagtttctacaaaaaaaattttcaaattcactggacacggtggcatatacctataatttcagctacttgggagcctgagataggaggatcacttgagcccaggagttaaggctgcaatgagccatgatcacaccatagcactccaacatgggcaacagagacctgtctcaagaaaaaaaatgttttgtatacttgaaaatttgctaaaagagtagatcttaagtatttttaccacacacacaaaagagagataactatgtaaggtgatagatatgttgattagcttaattttggtcacatttcacaatctggaaatatatcaaaacatcattttgtactccttaaatatatacaattttaatttgtcaattatacttcaataaagcttgggaaaataaataaaacaacaggtcaaattatgtacctcagaatggggaaaagttcttccctaggctccttataacctacttttctaggcctattgctactaactcattaattttacaacatactatggtcactcttcataatttattcttccccatgtctccctactatagtgaccaggaacccagcaggcgtctaataacccttcctccagccctgtttagcattttaatcaatgatttagatgaagatatasgggatatatttattgaacatgcaattgaaacaatagcaactatatgaacaaaatcaacttccaaaatactcgtaacartcaagccagtctaaatagaaggaagtttaacagacatataaatacaagattgggtataaaacctaaagaagtgaagaatgtctgagatttgatttagcagcagtatgtcacgtaaaactaacaaattgtaatctggttttagtagacagtgagcttaatacagttcaacagtgtgcaatgttgatgccgaaatgggctaattgtgtattactagatgcagagtaactagaaccagagaggcaatccattccaatttcagtttggggtgtgaaacatttttattgaactctttatggactgagtgggctaactcagagggcactgagttccccataaccaaaagtgttcaagcaaagccagaactatgttagtagactcatttattcagttttcaggagtaacctcaggttgggtgcccttggggtctgaagtttatggcagttcccaaagagtgccttcctcctgggatattcagattcaatcaatgcaaccattcttttttgtttttgcttttgtttttttgagacagaatctcactctgtagcccaggctggaatgcagtggtgcgatctcagctcaccgcaacctccgcctccggagttcaagcaattctcctgcctcagcctctgagtagctgggactacaggcacacaccaccatgcccaggtaatttttgkatttttactagagataggctttcaccatgttggccaggctggtcttgaactcctgacctcaagtgatctgccctcctcggcctcccaaagtgctgaaattacaggcatgagccacagcacccagtcaaccattctttatgatgatatatcaggtgacttactttttatttccctttcrygttcacctgacacaataactacttttgtagacaatacccttcagagagcttcagcactgcaatcctgctcaggtggaaacttagtgagtaagaaggaagtgccacataaaagcagcagatggtaaaattcccctaatacagcaggatctgattgtcccagatagytggcatatctacagaccagacacaagytggggggaagaaaasttgcccccattagtagcatttttatgcgtaggtgacattctacaggtaagttacaagagggcaaaaataaaaaataacacatcttgtaaggcacaggcatacacatgaggtaactccaatttgttgctgtgtgctacctgcatgagctatacctctttttgcctttttcacagagagaaacagaagtggctggttatgaaaaccggcagcacagctttttccctccctgtggtgtcttcccagataagaaagcaggcctgaatcccgggtgctgttcttccagaccacatgaaaggtactgtctcaggctcctcatctggaacttttatgctttacaaagatgataatagtccctcaaaatcacctacaatgctgaattaaatagcattcaaagtatactaggagaaaattacagtcaagtttgagtcaacagatctcttaacctggtaacttttaggaaaccacttaatttctgcaactcagtcatcttccctataaaatgggaataataaaacctatcttgactactctaaagactagtattgagaagcaaatgaggtaagagacatgagaaagatttagaaattataaaattcaacataaatacaaattaatgaggtacatctattatgtcacstgatctttataacgtgacaattgtccaaatcaaaatggagtcactaaagtttttttttgtttgcttgtttgcttgtttgtttttaaaaaaaccctgataaatagagccacagaagtccatgaagagaggattctcatattcgtatacctgacaagaaacactatcacaatgactgcaaaaaacacaaccttgtacaaagaccattacaaacttacacaaaagaatacctttgcaaggacatctgcccagcaattgcctgtccaatctcagactggtgtcactcttgttatttatctttgtaaccaaggataattatttcaaaacaattatgtaattctcctcattttttcctttaaaaaccatttctttcttttacctccctgagtactcatatgggcacagcagtctcattgcagtgtattctcatgcactattcccaaataaatatttttttcttttagaaagcctctctctgtttgttatttaggctgacaataacaaccccaggaaatgggtaagttattatccctatttattgatgggttgcgggggagaaacagaaaaggatcaggctatttgcttaaagtccctcagcaagttggctcccaaggcaagtccagtgcccttgcrtcccatcacctcctagaccctccaccagtgctgcttattctctctgctgttttcccagaatcattcactgcccttctccacatcacaggagctcctgtctcctctgacttcaggttggactggctaatagamagaccaaaaggtggcaggagagcagagttgagcattcgttccctggctctccccctgcctcagcactgtggctctgacaatgactggatccctctacaacttcgactcttatctagagcctccttccacagtggtaggtcatggcaccccatgaacactggatccccatgctcaccccatgctcttcaggcctgggcagtacaacagcttcctgctattgctaaaacctggcacctcgtcctctcttcctaggtgcctcagccctgcccacacatctctaaattgtacctttaaattgtatatctttaaattgtacctttattcaattatctgtaaaattccagttgagcatgtcttctatttctgctgagaaaactaagaaactcctccttttcaaactatttgttcacaggctgccaaaaacttttaccacctgtccccaattcctctctcagccctctcctcactttacccagactcctttcacaggaagtcataagccaccccccattcctctccaggcgcgaatttaccatggctctggacttgccctttaccagttctctattaatttaaaagctgataagtcctctcccwagctcctatttccccatcctctcttcttcgtctatctcacactttatttctccataggaaagaatttgaactatcgatctgtctgctgtataatttggattgagaaacagagcatgaaaacactctttgaataccttcagggaaacatactctattcaaactatgtttctttcaactctaaatttgtaaactattcttttttttaaggtagttctgcctaaaagagttaaaaaattgactaccctatcaattttgccctcgaggttataccaactatttctatactggcaataaaatcaactccatttcttccaggctagatcacaattattactaggcacataggctgctaactgtctccaaggctgcaataattcagtggcccaatactatttcaaatttatagcagaaagaggcacaatagtcattttggcctctagggtgccttctcactaaagaccatgagctcagaggttacacataacctataataatagttgtgtcttcctagggtgtgattgaagaaaagaaaataaataaaaatgcccttgccttcttatgttagaatgcgtaaccaaaagcacccaagagctgacattcagttcaggatttctgagacccttcctcctttccttgctgtgaaaaataatgatctgctgttctctgactgtcattcaaacaatgggcccaagaagccagcatctctctcctcactggcctcttgttctctaaatgtactgcccatcaccactttccaaaccacattagtcatgaagtgctgacaataattactaacacattgaaatggttgcccaaaatgatgactgtacaggcctacagaattggtatttttactgcagtaaaagggtatgagtatgaggcttcataagaaattttatggcattttggctactgatcacaggtacaaattatccatgctcaattaaagaaagatgaaagttcagctttctataattaaaccaataacttgttcagcctcaggctggaagtaaatgttaaggattcgtgtcttgcaatcctgcatgaagaattaaagaagcaaactctattatcaccgacttacttaaaatcaaggccttatgcatattggaaattattcatgatgagacttttagatcaggaaaaaataagtcattctcacactcttttggctgccttgcaggcaataactttcttcactattctgtttggaatattgcatcatttagatcattcttcttaagtcaatccagacattttctttagattctgctaagaatattatatgaaatttaaggactggaaaaaatacttaaagagatattttaacatgataaaaaaaagtccaacaaccagctctgcaacttcctaccctctgcttctatttccttacctataaaatgggctgtgatgattagttttatttgttcagtttagctaggctgcaatccttatttattcaaccaaacactaatctaggtgtttctgcaaaggtgttttgtagatgtgattacagtccacagtcagttaattataagtacaggagattatcctaggtaatctgggtgggtctagttcaatccattgaaagtccttaagagcagaactgaggcttccctgaggaagaagttctgcctgtgtcttcagatcatgccaaggagttctagcctccccctcctaacagcatgccttacagattttgaaattacctagcggcccccagttgtgtaaaccaattccttccaataattctatgtccaaccatccacccatccatccatccatccatccatccattcatccatccatctttctgcttgtttctcttgttataccttgactgatacatgaggataataatgcctattctgcagcagtgctataagaataaaatgagattgtatatataaaaattattttaacacaaaataaatgtaaggatgtgtatgtagaattactatttgatttgactaactcaaatcgagctaacaactccatataatcactgctctttcctaacaggccttgtgattttgttttccagaytctgcatatctgttacattctaaggccacttcacaacactaccaaacccagctttacagtttggaagactgagagaatcatacccaaagccacaaacatccaaatatggtgttcttcacaagaaactaataatgaacttgagacagagtctgcagggataggtatcagaagtcaagtctaaagtatatgaggtctatgttcaaacaggagcctggacatgactgagataaagaatgattcccgagctgggcacactggcttatgcctataattccagtgactcagaaggctgaggcaagaggattgcttsaggccaagagtctgaggctctattgagctatgattgcaccactactgtccaacctgggggacacagcaagagcttgtctcttaaaaaagaaaaaaaaagattgagtccagagttagagctacaggataaaaayaagttaactgaactcagggggagaaaggaggggaacctactccaaattctagctcaggtcttacctaaatgtggrctggctcagctcccaagtggctgagtgaggtcatgactgagaagaaaggacccctggcccaagtcgtgagttgaatgactcttaggttgagaagctttcgtacctaagaatcaagtggccagtggtgcaccatgggagagatgatcaccaaacttttcttctctttgaggtcacacacctagattacctgccccagtctcccttgcagttagatctggctgtgaggttgagttttagccagtgggataaagatggaagtttccactggcctaacccataaattcctccacaactcttcccacttttaatcttatgcccccatgtcgtctcttctcccagccttcttcgtctcaataaatgtcactagcacatatccagtcattcaaggaaaaacacaatggagaaaaccatcctcaactacccattccctttacctcactctttcccagcatcctgcaaaatctcgctccaaatatagctccagtttgtccacttccctcccttttctccagtctataaccttggtttactccatcactatctctcaattagactattgaaataaaatcctacctggaatttaaactcttaactgtctctctgtttctattctcatcctccaatagcctattctatataccatggcagaatgatctttcaaatcactaatccagttttgtcacttcactgcttgaaactttccaggaggcttcccttccttcgtaattaaataaaatttgaaccctgaatgtggcctaaaccctacacattttgcctcaccaacctctgtcaccgcatcgcttaccactaacaccctagctcactgggatttgtgccacaccaaacttcaaacacaccaaacgtatttctgccttatgaactttgaacttgctactccttttcactcccggaacactcctgccccagatctttgctggtgcctttacatctttcaagtctcagtttaaatatcacctcttccaagagacatcctttgactaccatatatcaaatatcccctaagctcattattctttgccattgtactctgttttacttttggaattatttgttttcttgcatgttgtcaatctccctcactgaatctttagcttcataagagcagggaccttacctaacttctttatttcactgctatatccccaacagtataatcttggtcatctcattcccctttctaacccttattttctccattttcaagatgatgacttgggattcggtgcttacaggagactggctcttcacattctttgcatccacagttccaaggaggctttagagctcaatactttccagccagtgacatttctaaatgcattttccaaatgaagtcaatgccctcaggcagcccagtggggaggtcatggagagccagtgagaaggaagtctggtgagttggattacatagttcctttgctacaccattccagccatactaaggagatgcacctcattaggtactaaatgtttagtgactgtcactattaattggtggggattaatactcaaaggagacagtaaatctcatgctgtactcaatgacatcacccccttgcagtcagacaatgcactgggagtttgaatctaaagcactacaaaaaaagaacccagagactatcccttctctgcttataagagtaaatattggttgccaattatatggagcatctcctcagttaccaggatctgtattaaatatcttacatgcttttatcatttcatctttacctcgatcctatggcatagttccaatattatcctcattttatggatggggaaacttccaaatagagagaagaggcaccttccccaaggtcacagagctaataatgatggatcctttgattagggtctgtttcattcagaagcctatgatcttagctactaagtaatattccatttcctataattatcatctcaccatatgattacaattatttttattcaaaccttttccattcttcaagtctgggctcaaatgctactttttttcacaaaactttctctaacccccagaaagacccatactcgccatcagcatcctctgcattggtcatatagaatcaatcacataggggaaggagactcagtaacaaacatttaatagcatatacggtatgcaggcactgccacagtcaaaagcttatgttagtcttacaactaccctgagaaaaatacattcatatctgttttgaaaagtaaaatgccttgagcagagtcttatggctcaaagtggcagaaccagaatttaaacccaggtctgcttgattgcagagcccaaggcatttccacaaactaactatgagctcttcattatgcccttggactaaataattccccctgttataagtcctcatagcaccatgtgcttctttatagcccccaccccagttataatttcatctatgtttgtgtgattaattttaatttccttttttaggccctaactccatgtacaaatgaccatatctctttttgctctacaaaatccccaacacttgacaaatacagtagtcatggaccttatacaagtatatttgaataaatgcacaaaccatgtacatttcattgcatacatttaatacataaatagagcccttccctgctagattctaatttctctgaggcaggttaccaacctaatttatttctggatccctcatgatgttctgcacttcataggaactcaataaacatttactggataaattttgcttatcagtctgtctgtaccatttgaaactctgtaacatccaaggcttctaagtaggccttggatttaattatagaataagatgaccacagaagagttttctaacctaacagatatagatttgaaagccatggggagcatgaaacccatgtcacaaaagtgtatcagtcaaaataagttaagctatgctgctatgataaacacagcagcttaaagaaaaggtttgtttctcacttgcactacacagacattgcaggctgtctgaggtcattgttctacatcatcctaactccaggacctaagctaacagagcatttccagttgccatggcagaaggaaaatggggcaaaggcaaataattcaatagctctcacagcttttactggaggtaatgctgtatcacttcttctcgtatttcactgtctatgtctaccttcaagaaagtgatgaaatgccctcttactccacagcagggagctcatgccaaaatatttgctggatggcactaatgaccaccaccacaacagactgcgtaggagaaaacactgagaaattgaaatgggagaattccctgacaccccttgctgaacgtgagacagggatgtgactcatctgttcagtaaccactgctcctcaaaccccttatgtgaggggagcatgcagacaggtaggttcaggagccagagtaagcacccctgggctccagccccagggcagcattcagggttgagagcctgcaactcccaaagcccaaatgggctgtgttacagtgtactctttcagccttgccattcgcgggcagcttatctgttaaccagctcagtgaattctctgccttttcacaatggcagagggccagtgtgacagctttctgtacccaagctctcgtccaacatcccagaagagtcaggtcacatacagacttgaaggatgaatgtgggggtattattgagtggtggaaattgctctcaatgagacgaatggggagctggaagggggatggagtgggaagatgttcttcccctggagtttggccatccagtagccaatctcctctctgaccatccccagccaaacttctctcagcattcggatggcccttctcttctctctcccacgccattctgccacttgtctactcttctccttgtctgcttctggagcctgcagtctggggtttacatgggtacaggataggggctgtggtgagccaaaaggcagcttttgggcatgaaaacaggaatgcctgtctccatttaggggcatgagtatcctggcttgatagtggggcacttgccagggaaccacccttttctacccagtatttccctatctcctgtccgttctaaatgatccatttagaacctgacctactttccgaaaaaaaaaatacatctccaaggcaatctattgttataaaatcactgaaattgctagagtctttccctagacttttgagcagttgctttctgggtctcaatgtccttaactgtaaaatgggaataaaaatagaatttcagaggggctttgaaaattgtcatgatggccaggtgtagtggctcatgcctgtaatcccagcattttgggaggctgaggtgggtggattgtttgagtccaggagttcaagaccagcctgggcaacatagcaagaccccgtctccactaaaaatacaaaaaattcgtcaggtgtgttggcacacacctgtactgccagctactcaggaggctgaggtgggagaatcacctgagcctgggaggtggaggctgcagtgagccgagatcatgccactgcactccacttcagcctgggcaaccagagtgagaccctgtctcaaaaaaaaaaaaaaaaaaagaaagaaaaaagaaaagaaaaagaaaaagaaaaagaaaaatgtaatgatgtacatgaaagcacccatcatagggcctggcacaaacagttgatcactaaatattagccttctaagaaacataatcttcaaatccaagtatgggctttagaaatgtaagaaaatttaattcctccaaatatattaataagtgagagaaaactacgcactcaccctctaaacttgacgttttattttgctgatattgttgattgtctacccgctaaaatgacttgctgcgcacaactacccacatatccctgcaatgcgagtactcaagtaatttgaacagggctaaatatactacattctaaggcaaaaaaaagaaaaaaaaaaagggtggggaaaggaaagcagtggaagaaagctcctaaaacaactggaaactacctgttcctcccaggcagaaccaaccaccccatccaataggctatacaagttaccacagtttttctacccttctgctttatttcctatctccacatccctcctgagcatagggcctggtgcaggatcacagtgttgtacattcctacgttcttttctttgtaactaagtcacaggacaaagagccccaagaaagtggttttgtccagtgatgcacagccttcctgctcctctactgtccacactcgctcaagtgtgcgatccaaggagctgtaaaggaaaaaaatccccaaattaaatattattgtattcccactcctacttatgcctccatacagatgttctacaggcaaggggagaagcacatgttaaagttgtaacgtttctaaatagacgtaccatgtaaatgcctaagagagagaaggctcccacttttttcctccctcctaccatctttgacagtcctcaaggacaagtctcaattccaggacactagccatgcctgttagcagaggggctattaggcaataaaatatcaccacttacatgttcacttctgtcttctctccttttcatgccactggatcataagaatgtagactggtttgcacatcggaaaagacctggctgtctgatcagtttgcttttcttccttcttttctacccctgcagcctaagtggtaaaccggtctgagtaaggtcagtactgcactttagattatgagtgacgtaaaccaagaaagtatcaactaacaaccatagggcactttgattctcaaaatggttttggttctctgtcttactctatcttcatagcaacctgtacttgtttcctaaggctgccatatcaccatgccaaagctgcttggcttaaaacaacagaaatttattgtctcatagctctggaggctaacaagtccaagatcaaggcaccagaaaatctggtatctggtaagagcctgtttccctgtttccaaggtcacagatggcaccttctcaatgtgtctccacatgatggacggggcaaggcagctctctttggtctcttttacaagagcactaatcccattcataagggctccactgccatgatgtaatcaccttccaaaggccttccagtatcatcacattaggggttaggaacttaacatataaatttggcaaggacacaaatattcaagcacagcaaaaagtttatatgtatttatctgccccttcctagaactgaccaaagactagagcttggggctagcccactgctctggacatacatgctttcccctcccatctcatgcctcccagagaaactgcagctcctgcatgcttcaagtggaactactctaacaacaaacagctactggagaagcaatgttgccctctcaaatgcaatattcccggactatgtgctaataagttacttttaagaaaactactacttacccatccactattttctttgcattttttgtctactgtttttgtccacataatcttcttctcatgataccctcaagagataggcagaacaattattacaggtataccttggacatattgtgggtttggtcctagaccaca

SEQ ID NO: 97011 - DNA, 30039 bp, Homo sapiens
gcagtttcccctgcacgctgtcaccccaggggactgtatgccaagcctgggcaggcctgggagcctggggtctggtgcaggcggccccctgaaggaaggtggacagcccttctgacggccacctgcattcacaccaagcccatctgcaaggagaaatcattgactttgcaccaacacctgtctccccctgggacctctgacaagccctgggcactaggtgagctcagctcgggaggtggagatcccaagccagccactcctggcccagctggtgagggcctgtgacaaagacacgggctcagttctcggcacggcagggagcgttgtggtgagccaggcctcccctgtgccttctacttccaggtgaaaactgttcttcaagacagaaaacgatggatatgattacggtatctttgatcaatgttccacttttatgccctatgccccaactgttaatctagggggtattcctgatccaagcgttggatcaagagtttaaaaataagacttcaaaacagggatgctcatgaagtggacatgtccagcctttattagataaagccactgggcccatctgaccaggcgagctcagctgtaaacaagctcgccagttagaggaagggccctcaacagagcatgaccccgcaagcctagggactccgacatgctgttggggctgctccccatgggtgtctcaactaggtaggtaaggggttggggtctctgcaggacccccccgtctgggggtgctccccttcctttcctaccacagtgtgatgtttcatccgcagcccagtggacatcgagggggtcccccaagcctgcaggtccttgggccaaggcagtggcctcgtccccctgaaaacgcgggtcgggtggtttcaacaaaacctgcactcatctttccctcctcagcgccttcccttctccagcccccacaagcccaggaactctgacaatgatgctgacacgggggtcactaactggaagagcagtgaacaggagctgggggctcttgggggccatctgagctgaggacagctggctgtacctccgaggccacaggcacccccacccacccctgcgcctgcagggaatgtgcagaatctgccagagcggaggccagagcccgcaggcagccacggctgttagaggaagcagatgcagcctcaccccagcccacgtctgtcaccacagccagggcctggcaggcgatggcacccgcgcagctttgggaaagaacacttggcctcccaaagggttctgccacccctgggggccgctacagccaccaaccctggggtctttccatcacttcagacactgagcagaacccagagagggttagtgagctgcaggtagggctgggacggggccccaggttccagcccagggtctcagggatccatggctggcactgcccacagggccaggcatgggcggagcagccttctcagcagcggggcccagcggccaagcctctgtcacacagcaccctgtgccagcatgccccgtgctagggagatgctttttaagccctctttagggggtatttcccgtctagtaagtgccagcaggcagacccactcttgacaggctcctaatgtccccaccagcgtgcacctgcactttttttttttttttttttttgagacagagtctcgctctgtcgcgcagactggagcgcggtgttgtgatctcggctcactgcaatctctgccttctggcttcaagcatttctcgtgcctcagcctcctgagtagctggggttacaggcacctgccaccacgcccagctaatttttgtatttttagtagagacggggttttcaccatgttggccaggctggtctcgaactcccaatctcaggtgatccacccgcctcagcctcccaaagtgctgggatgacaggtgtgagccaacgtgcctggcctcttttaccttatagcaaaaattagtgctgccttgtttatagaaagtgaccattgagggactgggggacaggccacagccaccccgatgagaggagcgggcctgccctcaccgacaccagcctcctgggacccgggccaacaaaagggctgagatgggaagaaaggttggaaatgaaagcctcgccaaagacgcagcggcaatgagtagttgggctgaagggcagcgccacgggccgcccagactacagacaaggcctggctatgcagccctcactggcaccgcggccgtgaagtcagcttctcctcagagccctggaggcaggcctggcagagcagaggtggtgtccccgccttgggggcctgtgcccctgggaaggtgctggcccaaatgtctcaggctttctgcagcccatccccagcagttcaggccagaggctcttcctgcaggtggcggtggcctgatgggctcagcaggcatgcctggagctgctgccctgagctctgctcagggagtctgtttcttcttccccaaatttccacggcctccctgagctctcagattttgagatatagatatatacatatatatgtatatatttcttcacttgcgggcagttccaaggaactgtttgttcctggacctgtataaaggtcacttttgggggacaccctccagctgccccactgccaagctggtgcacagcccttcccttccccgtgcaggcctccagcctacccctgcactccacaactctgggttttcaaggttccctctcctaggaggacactgggggcagatggggacgaggggtcaacacctggaggcaagcaggccagctccctgcccctcacaccagctcgggcagcatctctgcaaaggcagttcccaccctacctgaggaggcatgggcatccctggccccagtccaaccagaaggactgtaggtctagacctggccagagcagaacagaaccagggtttgacaggccctggggccctttcctcctttcaaagtaggcctcccaggagcagcttgtcagccacatccttggcagtcccaggagaggcagaaaagtctgagggtggggaggagagcccacagagggtggcactgcgtattgccctgggggctaatgccagggcctgcttccaggtaagtcaggtggctccaggccctgggactggacagaatggtctgtggctgatgaggaagcaggggaaactctcctgccgttggccaagtcaccagggcccaaagccaggcagctgccaatcccacggaataagagatctgttcagttttcttagggaaaactaaaaatccaaggaaacggaactctacacctccctgctgcacccagaacctaatacagggctccacccctcccactccacagtgatgctccagtacctggggcctctgacctccagagaaaccgcagggcggcccgagaccagcccacccggcccctgttctcacggcccctctgaagagtatctttaaaaacagatttaatgtgttaaaaaaaaatagaatcaagtggtgtgcttcgccactgagatgattgtgctgtggctccggggccacatagcaccagggctcgatagcagacaggagtttcggccctcgtccagtgcatgtgactggtgcaggggcggaggcccagccgcacgggggccagagcaggaacacagccacctgttccaacaggcgctgtgccttgtatgccccgtacatgtgcctgccctgagaggagcatgggccaggcctctcttccagctgtgcccccagggtgccagtgaggcagggcgacctctcaccaacagagctcctccaagccatgctggatttggattcctggaaccccctgtacccatgcggtgggccaccccagggggaggggaggagagatgggagactgtgtgtatgtcccctccctccaagtgcagcaggagaaaggtcactgggctggcctggtcacacaccgtcataggggcctgctggggtatgcccgatgccccccagcctccgggccatgctgatgagtgagcgcaactgcaccagcctcagtggccccacctctctggggtcctggttctccagccaccgcagagctgtttctagcccccgcacggcctccccggcagtcggcactgaggtccctccatagtcggtggcctcctcctcgtcctctccgcccccaatggcagagggcagactggctggggccggaggcgctgcagggggcagggctgggcccacctcctccctgcagccctcgggcggacccccatcatcgtccaggtgcagccactccgcaacctcctccggagccaggcacttgtaggccagagccgccaggtgggtgaggtcgctgagcaccctgctgtgctcggcggcttcctcggcctgggccggctgcccagcactgtcctcgccgggccggggctcgaaggcagcccgcaggcccagcagccagcagcgctcaatgctgcccgcctgcaccaggtcccaggagaggccagccaggtagagcatgtccttgagcatgaagctgcgcatgaagtccagcggggagccgctggcgcaggacacagccagtcgcagcagctcgcgcttgtacagctgtttgaaggcggccaccacgccctgctccagcggtgcggggatatgtgcccggctgctgcctttggacaggaacagcacccgcacagcgccatccggtgtctgcagctcctccgggggaccgaggggctccggcctgcaccgcacgggggcatcctcgctgtccagggcgggcatactggcagctgggcttgggcagggcgggtgggccaccagcagcacggccttctgctgcaggcagcttcggcgcaggtagcgtttgacgcctgggacaaattcctcaaagaaccagccccgcagcagcgggcggctgagccaggcgtcggggctgtagcggtaggaggccgggaacttgtcctggttgtggtggcgcaggctgggcgggtccggcagccgcccgatgaccagcggcttcagcttgtggctgccggtcaggtttgcggccagcagcaccgttacgcggtcgccccgccagcgccggccacagccccccgccccggggtcccctgcgcccgggggcgcagcctgctccggaagcagcttccagtagaggccggtgacgctggcgctgtaaatctgctcgtccccgtagccgccctcggccgggggcggcggggccggggcgcggtcgggcagggggccggcgccggagggcagcgcgggctcctccttgacgggcgggccgggcgcggggctcggggctgggggcccggcctcgccgtagaagcgctggctggagatgccgtggcgcttctgccagcgccagaaccagccgtggctggccttgaaggtgcactcgggcccgtagatctggcgcgcgaaggcctcggcctgcgcctggatgagcgggccagacagcggcaccccgtgctggcgcagcgccaggaaccaggcgtacacggcgcggtcgatctcctcctcgttggccagccgcatcttcttgcgctgagtgcccacctcaccgcccagctgctccaggaaccagcgcagcttgggctcgtccttgagccagccgcgcagcgtcccgcccggcacgccgaagtcgcggcacacactggcctgccgctcgccgcccttgacgcgctcgatggcctgcagcttgtccttgatggagtaggccttgcggaaggccatcttcacggccacgcggggccgcggcccgggcgcggggggcggcggccgtgcagcggggacgggggctggggcgggcgcggggggcccgggcaggggacggcggccgcggcgcggtaccgggccggccggggggcccgcggggtacatggctgcggcgggggggacccgggccgcgcgggtcgcgggagccacacgcccagccgctcggggcggggcactcgggggcggggccgcacgggtccctcccctttgtcccgcagcttggcgggcgcacgcgcgctgacctagcccggcccggccccgccccgcgcctgcgcgctggccgcctcgtgcgtcactcggctcttgccggctgccggacccttccccaccggcgacaccactggccgcgaagcgcagggggggcgcgcgcgctgccgcccgttcccagcacttgtgcagactcctccggggaagagcggcctccgcggtcatctccaacggaattctgcctttgaagtgtcggggcacggcgcgtcgagggtcctggcggccaggcggggcgtgtgcaagggtcgcgtcccccccccgggcccccggcccgtggctcttggtagagcccagtgcttcatttcccgtgcgcggcccgggcggccctccctttcatcagtcttcccgcgtccgccgattcctcctccttggtcgccgcgtccttggctggcgtgtgagtaccgcggcccccgccggaaggagtcgggcgcgacagagacgcccgaggggccgggagggcgggcggcccgggctgcgccagaagctcgcgccgttagggactgaggcacaagtgcgccagcgcgggcttaggggccgtgggccaagtgcggcacttggggcgagcgcagagaggcggggcgacggaggccacgtggccggcttggagggcgtccgcgggacgggggcgccgggagcactgtctcacggcgcatcccggtcgtggaagcccctcggccaggctgctggggcctaaggcctgtgtttgctgccgtctccgtgggagaccagacatctgccccagctgtttctctggcctgcagaccttcgtacaccacgtctttgtcaagcaccagttactgcacgcatcagctgagcacggaggggataggcacggacgcaacacttttggaacttagacgctagtgagcacggaaaggaataagcctgtactgtgactgggtcaaaatttctgtctcttgatttggatagggtggtcgggcagtctctgaagggggcggggatgctgttgctaagaagtagtactttcagaggctttaagtggaaggaagaaggcaaagggggcggagtgggttgggracctgatgagacgtcaggattggtttccagaatgaaggaccgcctggcagcagaagaactgtgtagctaaacttggggttgtccctgcccgacagggcggggtgcttcttaagttgacactgcctgcggctcacctcccagggaggcaggccaggccatctcacctgagcagcctccttctacagctccgcccaccccgtcatctggaccccatgagccttaagcagctggctcgcaggcagttggttacttccggagcccgtgtgtgcccagccccgttctgggggtgggggatgcagctgaggggctgggcaggtgtggaaggagcccccgagcgtcctctgaggaagtagacgctcaccttcgccttctcaccacatgcctcaggcccagccaggctcctagacctgcctctgtagaggctttctgggcgcagtgccaatcctgtgagacagcagcatctcccctgggctgctgcagggttcacacgcagtcagtgctggcagagtgagcgcccagccgacagagcccccgctgcctcccgcctcctctggaggactaggccctctgggctttgctcccgggttgctgggtgaggctgcaaggtttagcacaggtgggcacacgtgcttgatgatggacaaagagtacctgggctgtgccgtgcactggcgtcagccttctgggggctgaggacaggaaatgtggcattgaggatttgtgggtcatcatcctgtgccagtgtgttaaggtgacatcagcgtgttggaagctggtggcagtgagttatgctaagtgctggtgtaggagcctgccacaggtctccagctctcccacctcgctgacagccaagggtgccgtgtgaggtgtggcgtgggtattgtctggggttccagaaagcctgtgccgtgctggagtcacccaggaggcacgggggctgcgccgggcgggcaggtcggccagagcccctcaagcagggctggccatggagctggcctgcagtggcatttaagaaaagacgtggttggggcggggcttggcctggggcagggtgggttgggtagctacagtgagtgctctgagatatgcaggacaggctggcgtttcccagtggggctggaatatccaggggtcagacaggaaagtggctgagtgggaatgtggaactgtggagttttttctcttaaaaagaccaaaggcggctgggcgtggtggctcatgctggtgatcccagcactttgggaggccgaggcaggcagatcatgaggtcaggatatcgagaccatcctggccaacatggtgaaaccccgtctctactaaaaatacgaaaattaggccgggcgcatggctcatgtctgtaatcccagcactgtgggaggccaaggcaggcagatcacctgaggtcaggagttcgagaccagcctggcaaacatggtgaaaccccatctctactaaaaatatgaaaaaaaattagccaggtgtggtggcacacgcctgtaatcccagctacttgggaggctgaggtaggagaattgcttggacccgggaggtggaagttgcagtgagctgagatcgtaccactgcactccagcctggtgacagagtgaggctccgtctcaaaaaaaacccaaaaattagctggccgtggttgcgcrtgcctgtagtcccagctacttgggaggctgaggcaggagaatcgcttgaaccggggagttggaggttgcagtgagccaagatcgcgccactgcactccagcctgggtgacagagtgagactccgtctcaaaaaaagaccgaaggcctcactcccgcaggaagacattgatctgtcctgtggctgctctgccgtgcggtggttttgcctaaagacccgcttcctcaggggctccagcctcttttaagggctagtcgtcgcgccctttgggcactgaaggtactgaaagttctatcaggcagtgccagtccacakactcaggccagccaggtgggccggagaggggtgctgctgggagggatgggcgtgcacaggctgagccggtggctgaccccgtcccctgcccacctccctgacttctccctgtggagggtggacaatctgggagcctgtctgtgtgtgcgactgtgatggggtggcgtggagagcagggcctgggagccagctcctcccagaaagcttccgtttgcccagatgtgtggagacctccaggccgtgcagcaccttggtggccacagctctccaggatgtcctcaccttcctcagggccctgccctcctgacctggagtgttctgggtaggagtctttgccggggctgctcccaggacagggacaggggaggctgtgagggccatgccgctgcagtgggtcttgctggctgccacctgtgtcacaggccctgttagctgggtggagccttccagagccaggaccccagggcactctcaaactctgggcagctgccagaggctcaggtgctyggcagacactgtctacccctcagggaagagccttggtggtgagcctggcctgcttccaggagcagagtagggacacttkggccacttccccctggggcctggctctggcgtttccaagactgcttctctggcagccagctgtctccctgtgttctctttagaaagctcctcctgagcttggataaactgcaggagcgaaggggctgaccgtttgtcgggacgcagttgaaagagtcgctgtgtcctgctccgggctctcctgctggagaggagaggcttgcacgtgcctgtcgtctgcgcaagctttgaagctcagacttggtctctgttaggagagatggtgcgctgcgtccggcaggtcctcccatgcttgggaatgcgggaagcggggaaatgaggaggtgggctcggacgtgtggggggctgtgctggctgtcctgggaggctctctgcccgctgttagtggccagctccccaggtgacgggcctggcctccaggtctccagcatggcttactgtggtgtctcctgagggcttcctctctgcagggaagcccacccaagatccctcttactggtcccatggggcagctgcctccgtagcatcctcgtctccaccagacccctgcagggtgcccagttcctccctgcagggtgctccctgctgcagtgtggggtgcacagaggtgggcagggccctggggccggagctcccgttggtgaaggaagacggatcccagccagggctctcgggttgatcagcagtaggaggtggcccctcctgcccagtcccacccaggacatgggctggtggctgggctttcagctgtgcccagctgcccttcgcagagcttgcagggtttatgaggtggctctggtgagattaggggcaggacacctagtgtctccagccgaggagtgaactgggtggaggtcctgtccttgtgtgcacattgtgggagagtcagtctgggaggcctttgtagcttgtgctggggcccttgggtgccagccctgtcttgacggtggctcctgctgagagagaggccctgtattaatgtgagccctgggctgcctcccccttgagggtccttgtcatcttccgggcctccttcagcagaccggacacaggggcagtgcaggtgaggggcttgggggagctccttggcagctccaggggatgcttgtgggcgctggcttatcttgtctcaggctaccttgctcaggtgacgacagggtgggtggatttgggaaaggttggctcagatagtggtccctgcttgtcccccagggcctgcctaggctccaactgacagtaatcccaagagctcccctttcaggggatgacggagtgaygtcacctgtgtggactcagctgccacctgggattgtggtggcggcgggtctgtctggcgctcagcttccatctccaccagtgtcacctccacaccacctcgccaagcagcttctggaaaggcccccggccgccccgggctgacctgctgctgtgtctgacccggttagtctttctggctgcctctaaccttgctgcttttccttcatgctgtcctaggaggccaaagcaaagtaagtactcgcctgtcctcatgccccattccccttcatttgacyggggaacccccagccctcgctgcacctgagggaacccagcaccacctgcgcatggcccagtctgcccagagggcctcagtttcccatctggaaagtggaggaattgggttttctggatggggcagcagcaggtgggcaccctgtgtggccgtgagcagggtcctgtcctgggctggcgggtcagcagctgacatgcggctccctgcagggaacgggtggcagtgccaggtctcggtaggagccttgaagtggcttaccctccctgagcggcggcttctgcccggagcccccaagaacatagtctgaggccactttggccaataaagtctggtagggcatcaacactgggggccagctcagtggcactgctgatgggacctgcacggctccatgggagcagagagactggtgggggtaccaccgcacgatgtcacaatgccctgtctcctgggctcttgctcccaccccacccccaacccacaacccctgcctctgcccatcagcctggccttggtaagtgctgccccagcctggggaaggaatgagcaggggagcctagggagcgtcttcatgggccctgtggcctcccatgggccccggttcctcgttggtgccattagaacttgttgctgggactgcgggattcgggccacatgcccgcaaagaactccatgttccacttagaggctkcagagtgcagtgccaggggtgccttcccaaaagtcctccctgcctgggtggagcgtagacagctcagcaccccacggggggcgttggagccagccttggttttgttgggtaaggatgttagaagaggggcgaagacccatagccactggtgtgaagggtctgctcttgaccgaaggctgcctccctctgggtgcagaccaggcaggtggtcccagtcacggtgccctggggccactgggtctgtctgccctcaggctccactagacacacctgcggaggcagcagactagcagcggtgtctgtgaggggcagctgcacagccccctcttgagggtgctcctaggcgttggttaggcccakgcgtttctgcttttggggagcagagcctggagtcgggcatggctggggaggaagctatcgcaggctgagcgcgggctggggtgctgacctgcatcccaagagcagatttgcccctggccttctgggcctgtcctttctgtaacaccacactggacacctgggagcagagcgtgcccccggcaggatcccacatggctgctggagcactggggcagcaggtgactgaggtcgcccagagcttgagggaacacctcatccagggaggaggctgaggctcccaggccacagtagcaagtggggagtggagcctcacaacctgcctcccaccaagatggtccctcttaacattacacagaagcaaaaccttagagggggccctgatgtcctgggactgtgagagccccatgattcccctttagcttggatggacccaaaggtatggactccagctgggaggcgggggcagctgatagagagcctagagccgtctcagtgctccaggcgcttggcccctcctttctacacagtggtcaccagcatcctccctggcgtctccttcatgagtgggcactccaccctctgcccggccacctggccccctcctggggaggacagtcaggcccacaaagaagctccctctttttttttcttttcccctgctctgttgtccaggctggagkgcagtggcgccatctcggttcactgcaagctccgcctcccggcttcacgccattctcctgcctcagcctccctaggagctgggactacaggcgcctgccaccacgcccggctaatttttatttttatttttagtagagacagggtttcaacgtgttagccaggatggtctcagtctccagaccctgtgatccgcccgcctcggcctcccaaagtgttgggattacaggtgtgagccaccgtgcctggccgaggctccttcttttgtaagaactttgagggtgctctgggtgtggcagtggtgtggccaggacagccacagagaccgttctgtagaatgggaacaccagccaccatggtggggtggccaggcctggcctgtggaaaaatgcagggaaagctagttagccagttaaagcttatttcagataaatgacgaaaaatttttagtgtaagtatgtctcagatacttcatgggccatacattcactaacaaaattatrtattgttcatgtattgggaggcacttggcctcccagagtactgagattacaggcatgagccactgcgcccggcctgttttctcttcacaacaaaacgtccccacatgggcttgacttcgaagtcctcgaatgtcatctcatggaagccccactgggragcatcctcagcccctgcccagggagggcagccacggggagggcgggcacggggagggtgrgcacggggctgcggccacccgctgtgttgcaactctgccctctgcttgctttttatcgctgtgtccggaagatgaggagcgggaaggcctcctgcaccctggagaccgtgtgggaagacaagcacaagtatgaggaggccgagcggcgcttctacgaacacgaggccacacaggcggccgcctccgcccagcagctgccagccgaggggccagccatgaatgggcccggccaggacgaccctgaggacgctgatgaggcggaagcccctgacggcggcascaggcgtgatcccaggaagagccaggacagcaggaagcccctgcagaaaaagaggaagcgctcccccaagagcgggctcggccccgyrgacctggccctcctgggcctctcggccgaacgygtgtggctggacaagtyacttttcgaccaggcagagagctcctaccgccagaagctggcagatgtggctgcccrggcagcctggcctcctgccttggccccttggggtctctgcacccatggaaaccaggtggcctgccaccacgtgacctgggggatctgggtcaacaagtcctccttcgaccaggctgagcgggccttcgtggagtggtctcaggccctgttgctggcccccgasggcagccgcaggcaggggactcccaacacaggccagcaggtggccgtccccgacctggcccaccagcccagcccaccggtcaatggccagcccccgctgggcagcctgcaggcactggttcgggaggtgtggctggagaagccccggtatgatgcagccgagaggggcttctacgaggccctgtttgacggccatcccccagggaaggtgcgcctgcaagagcgagccggcctggccgagggtgcccggcggggccgcagagaccggcggggccgcaacatcttagggaacaagcgggccgggctgcgacgggccgatggggaggccccctctgccttgccctactgttacttcctgcagaaggatgcagaggccccctggctcagcaagcctgcctacgacagcgccgagtgccgccaccacgctgccgaggccctgcgkgtggcctggtgcctcgaagctgcctccctgtctcaccgaccsggtcctcggtctggcctgtccgtgtccagcctgagacccaagtaggagaaacgtgctgggtgggcacccagcctgggctgtgggcacagggacagccatcccaggctggggctcctccagcttcctcccctgcccacctggggtgggggctccccgagacccgtgggcccagcagagttgaatgcaggagcaggctgagtaaaggtggtgctgcrcttgtgggttccagggacactgcttgaggttacaaarttccaggctgcctggatgagggcagggaagggctcagcacagggcagaatctctgccttgcccagggtccctctttggctgggaagctccccaagtcccctgtggctgtcacatgccagggctgagaagataaggctacttataggggcgggaagcattgaagctggtttctggccctagcgctcccctgcgatgagatgtgggagccagtgtgtccctgcctgtccatcctgtgcacccccagctttccttgtcacctgaaaccacctctgagggaaggtggtggcgtctcagatgcatgggcatgtgactggtcaggtggcctccatcccagggtgccccgtctgtgtgacctccctctgggtgctgtgggcttgctccagggtgcaggtgcaaccccagcagcggtctctggggccaggcaggtgggtggacgattggacttggaggggaatacagagggcatggaagtggcgaggctggcctgttggcgagggtatcctggtggtggggcgggctgagtcagggaaggactctgaaggtcccaagcagctgctgaggcccccaaggaagtggttccaaccttggacccctaggggtctggatttgctggttaacaagataacctgagggcaggaccccataggggaatgctacctcctgcccttccacctgccctggtgttcacggtggcctggtccctccttgccgagagagtgtcctgggtcagggacgcagaggacgctcacagactccagccctttgttaccgagaggacacttggcaaggtccagcgatggtccggagtccacacacagactggcggcagggcaggagggggacagttctgttgtgcttggttggacagtaagagggtcttggccagtccagggtggggggcggcaaactccataaagaaccagagggtctgggccccggccacagagtcatctgcccagctcctctgctgctggccagtgggagtggcacgaggtggggctttgtgccagtaaaaccacaggctggatttgcctgcgggccatggtccctgtctagggcagcaattctcaaccttcttgctctcaggaccccaaagagctttcattgtatctattgatttttaccacattagcaattaaaactgagaaatgggccgggcacggtggctcacgcctgtaatcccagcactttgggaggccgaggcgggtggatcacctgagatcaggagttcaagaccagcctggccaacatggtgaaaccttgtctactaaaaatacaaaaaattagccaggcacagtggtgtgcactggtagtcccagttactcgggaggctgaggcaggaaaatcgcttgaacccaggaggcggacgttgcggtragccgagatcgcgccgctgattccagcctgggcgacaagagtgagactccatctcacacaaaaaaaaaataacaaaaaaactcagaaatgctaagtgtacttatttgttgaagaaacttgttacatattactaacatcttttttttttatgagaaatacttttcccataaccaaaaaattyagtgagcagaatggccttgcttgaggtttttgcaaatctctcgggtgtctggcttagtgggaggcagctgggccctcatacctgcctccgcacttcagctgtttgacataaacccagcttcgtgtgagtgaaagggaagggcctggggaccctcagaggttctcggaccacactttgagaactcctcgtctggaagacaggcctggggatgccatgtggggtgagggcttacgggcttggtgtcgctttgtggagaaccgctggtgtctgaagcgggtgtcagccccactgcaccttggtgcttctgggctgtcctgatgccgaggcccacttcccagccatgctgactttgcctctttcccctcccagcagaaaaatggctacaaacttcctagcacatgagaagatctggttcgacaagttcaaatatgacgacgcagaaaggagattctacgagcagatgaacgggcctgtggcaggtgcctcccgccaggtgagagctgcacgtggggcggctgggcggctctgctgcccgacaggagtggccrgggcacacaaagcggattcagccaggccaggaaggcagaggcaccctggcccagtggctctgctgtgggtgctgggagtggggtctcggggcaggcggccttggccgggcccccgggccgggtctgctcagggccctcctgccggcgcctgtgcacttggtgtggggccaggcctggcactccttcccccgcagacatgggcgcctttgcctgtcgtcacagcctcaggcatctcccgcttttctggcccgccragctctcgttctgtgcagtactttcttgctgtctctatgtgagggttcatggggttttttggtttgttttttaattaaattcttttttaataataaaaaaaagactggttctttctgcactgtctgcaggagaacggcgccagcgtgatcctccgtgacattgcgagagccagagagaacatccagaaatccctggctggagtgagtacccgcggcccacggacctgcgggctcctgctcggccaagcagcatgtctgatttttcctgatgctgctggttgttttggcttcacagcagagtcagggcagggtgcacggcgctgtgctccttgggacgtgtggctctgtgacctccatgcccggactgccacggacagtgttcttattctcgcgtcccttccgtgcttacctcgtctgccggctggcggtcacactggccgctcctgtggggccggctgggagctgagtggtgccatttgcagggtgtcctgtgggcacctggcatgagagcctgtgcctccctgcttgctccctgtggcaggactgtgtgtctgctgggccttcccacattccctcttagatcttgcctcactggggagagagaagtggtggttctgcaaggcgcaaggagttcagagcctagagttggcaccgtcttgagttggagacccagaaggagccctgtatccctgcttggcctccaggccccgggccaagatcaggagttggaggcagtagctgtggcctgacaggctggctggggaaggggtgtcctccgggaggtggcagccctggtgttcccgaggagttgggactgcgttctccccgggacggrgtggtgtcctggccccaagaacggggtcagtgtttctgtggctgctgctatggctttccacagcctcacgctggaaacagtacatctgtatcatgccgggtttccaggccagaaatctgaaatgtgtctcacgaggctgtccccagtgtcagcaaggtcgccatccttccaaaggctcaggaggagtctgttcctttgcctctcccagattctggtggatgcccacgttgcttgtttcaaggtgctcagcaggcagcctcatccccgccccgcctccacttccatctcgcgcctctctcgaacctcctgcctcgctctgtcacttacgtggttcttgtacttgctttgggcccccaggatcccaggtccaggatgttcccacctcaaaatcctgaatttaatcgtgtttgccaattcttctttttgccatgtaaggtagtggatttgcaggctctgggggttgggacgtgggcgccggagattctcaktgtctcatttgtaaggtgcattgctcctcaccaacatctgcagaagcctgggtcccccacagtgtccctccaaagtccagaatcccatccaatcaggcatgggggattgcgtggtccatcctgaggcaaaattcctctccatctgtggaccagtgaaactggaaagcaagttatctgctcccaaaatacaattgtgggacaggcattccctttcaaaatgggaaaaagaagaaggaaacagggcgtcactagtcccaggcagtttcacagtccagcccggcgggtcacgtgaggtttgaagggagcgctcctgtgtggcccatggtcccccccgctgtcattttttaacatccctattcctaccaacagcawgttcgtggcagtttaggtttaggttgttctagaagatgacgtgttttctctgccctgctcctcacctcctctgagtcctcaccgagggccttagcatctgaattctgccaacagggtgctcaagacaggctagggtttttcttttggagggggtgggtgagttgtggacagagtcttgctctgtcgcccaggctggagtacagtggcatgatcctggctcactgcaacctcagcctctggggttcaagcgattctcctgcgtcagcctcccgagtagctgagactgcaggtgtctgccaccaagcccagctgacatttttttttcttttttttttttttttagtagcggcagggtttcgccatgttggccaggctggtcttgaactcctgaccttatgatctgcccacctcggcctctcaaagtgctgggattacaggcgtgagccactgtgcccggcccagtctaggggttttctgtcacgctcctcaaaattcttcccgcctcaccactgcccaactccaaagccatctccacattgttaggcattccagcagcaccccacttcctgggccaggatctgtgttggtttccacttgatgttgctgtaacgttgccacacttccgtggcttaaaacagcacaagttcctcaccttacagttccgggggccagaagtctgagatcatcttatggggcaaaatcaaggctgtggtccttctggtgtctctgcggggagaatccgcttccttgtctcttctggctgctggaagctgctcacggtccttggcccaaggctcccaggcagctgtcttgtcactcagcctccctctcccctccctcgctcctgctgcctagtgtgggcccttgtgatgacagtgggcccacctgggtgatccagcatcctctctgccgcttaacttaatcttatcacatctacagaatccctttgccatgggagaccatatttacaggctctgcggactcgtatgtggctttgtgggggccattgttctgtctgccacagccacagccacctaggggtgtgctggctcccgggccataagctgggcatccctgggtgggtgggcccaggaagggctgccactcctgtctgccaggtggggtgctcctttgtgcyttgcgttctgcccactggcttgcacccctggcttgcccaggcacctgaccaagtccaggctaggcagacatgagattaagggagcacagatttttgcgcccaagtcaggcatattgcactccagtgcccagaaggcagcggtcgggggcttggccctggggctgcaggaactcttcagccctggctgtgtggggtcaaccctaaggtgtctctgggacaggcaggtggtcgcactgttagggcttagggactggtttgctgctataacaaaggtccatagactgggtgacttaaaccacatgtattttctcacagctctggaggctggaagtccatgatcgaggtggcagcaaggctggtttctcctgaggcctctctcagcatgtagaccgtcttctccatgtcttcacacggtcatccatctgagtgtgtgtgtgtcctgatgtcttcttattggacaccagtcagattggattagccccctgcccctcagtgacagttacctctgcaaaggccctgtctccaaataaggtcacatcctaagataccgggggataagactccagcatgtggatttggaaggacattattcagcccatggcaggggcccagtctcatcttggatttggggtgggagtgctcagcagacactggggtttcagaactgcagggtttctggtagcgtggtgctggcacagggttacaggcatgggtctggctctgaagtgtttgcctttggcatcccccaagtccctgaggggctctctgaggcccgctgtgactgcactgggtgacctgagcctgcccgttgaagctgtgctcagggattctgatgcctggcatccctagtccccccgagtcagcatcaaaggaggggactctccctgtgtcctgagtgctgtgggctctggcctagtggcccgcagagccaggcagtggtgaaacggcccccactgctcatcatgcagcccggggccagtgctgacttagtgcctcttccagaggggaccttttccctgtccttgggcctgctgtgtggggtgcatgaggcctcaggtgccactcacagactccggcctcctcaggacccagccccactcccgcrggaggtctgctgtgattctccatgccccctgrcgccccaaagcctggccctcccgtgctccrgcttctgcccccgagtttgtcagtttctgccggtgcctcccgtacccccaccaccattcacgcgcctctgccagcctggcctttccctgtccatttcctcctggccttgctgccaggtgggcctcctgggccagtttggctcggccttgcccatgatctgcggggcttagctcccacaccctccagatacataaacaagcattccccacagcatggtcccaaggacggtggcaggagggccccagggatgggtttgcaygttgggcaaaggcctsagtatgtccgcacctgctgyaaggagcggctttgcctgcccggctactccaggcccctccccacagagagggagccccggggagckgccgagatggggtttgctgagagctccatgcagccaggtgcaccctgtccttcgagccatcctgttggagggtgggcaggctaaatggcccatgcgtgcaggtagatgcttaaggactggctagtgttaagggccaggaggctgggatcctgtctgggccccgaggtatcagtctcagctatggcagagtatgaggtgggcttggggccctggatcacctagagactggcttgctgagtgagatggcaggcgtgaggcccagggagacaaagctttgggtggctgctgtccacacaggtgggctccttccttcttcccccactgggccctcagctgctcccgcctcccatttccagtgctgcctggtcccctgaggcgtgtcccaggttgtccctaggactgtgagtccttcagcacctcccacccagcctctgagcctggctgctcagcaggattccgccgggcagcagcagccatggcccagctccccacagcctccgtctctggggcaccaagagcctcctgtcctggactttgcctggctgagaatttcactgtggtctgtggtggcygccacctctgaggtcataagtttgagctgggcatcagcggggggcacctcctgctctcccgagctgtagttttccttccgtgagttcctgcagtcctgagcatggcagggggaccctaggagcaggctgggcactgagccctcccctcctcctgccttgcagagctcaggccccggggcctccagcggcaccagyggagaccacggtgagctcgtcgtccggattgccagtctggaagtggagaaccagagtctgcgtggcggtgaggccccgggccagtgggttggggctgtccctggcccctgccatctaaccgtgctccccttgcccccccagtggtacaggagctgcagcaggccatctccaagctggaggcccggctgaacgtgctggagaagagctcgcctggccaccgggccacggccccacagacccaggtgaatgctctccccacgcctgacactgcaggggacyacgtggccctgctggcttccaygtcgccctgtgggctggccccagcagcagtgatgagctggcagccaggatactggagtcctcaggtycccaggaaggtttacagttagcyctgggcaggtggaggcagtttttgtctttcctggggccctgcatgtacacagctgcggtacacaggggctgcccttcctccagtcaaaggagggaggagggccaggaggtggccaggcagctctgggccctggttggggcgtctcagccgtgcctcctgtcccttcccctgtggcagcacgtatctcccatgcgccaagtggagcccccagccaagaagccagccacaccagcagaggatgacgaggatgatgacattgacctgtttggcagtgacaatgaggaggaggacaaggaggcggcacagctgcgggaggagcggctacggcagtacgcggagaagaaggccaagaagcctgcactggtggccaagtcctccatcctgctggatgtcaagcctgtgagtgggcggggtggggcttcagggggccaggcactgccctggtgcccgcctagccggctcagcctgtgaccctccccctgccctctgggttctggggagactttaaagccgagtttagaagtcttgggataaacacaaacttggaggcaggaaggtgtgaatttggattgttttctgtgggccctttaaggaaacagaattgtggacacacagtggttgagggtagggtgcatgcaggtacttcctgggtgttctgagggtggctgaccccagcttttcctcccctttccccacagtgggatgatgagacggacatggcycagctggaggcctgtgtgcgctctatccagctggacgggctggtctggggggcttccaagctggtgcccgtgggctacggtatccggaagctacagattcagbstgysgwgraggacgacaagrwggggacagacttgctggaggaggagatcaccaagtttgaggagcacgtgagtgagccggccggggagaggaggggagaggagactggggaccctggcccataccctgcactccaccccacggcagtggggagcgagtcccagagtgaaccccacctcagaggaggctcctggctccgagtgggctgtaggggaacagccctgaccgtcaccctccgcctctcctcaggtgcagagtgtcgatatcgcagctttcaacaagatctgaagcctgagtgtgtgtacgtgcgcgcgtgcgtgaggccctgccacgattaaagactgagaccggccctctggctccgtcctggtcatttcctgctcgtacctggcctgtctccctccctgtctcagccccatctctgccctgctgttcccacacagtcatcctggctgctgccaccctctgtggccatgtcaccttgcccccagcagacctccgcctgtccctccatctcctggccactccctcccaaagctctggccctccctcttctttccattgcaaaagcaagtccagttcagggggtttaaaaagccagaaacagaaactgttaggtcactatctggagaggccaccaccccaccactctgcctcctgttggcattgtccccatgggagcaagcgtgcaagcctggaattgtccaggaaagaagtcccagtagcacccggccctgctgccatgccctttgtcatgtgctgtcccggccctcccctcacctcattcattcctggaatccctgccccttgctccagggactgtgcccctcccatgatgttctggggtggccagagcgtggctgcctgggctctgtggagctgtgcctcagcatcctgacagccgtatgtggtcagcatgggtggccacactccctcccctggaccacccgtgtttgcattggggtgaaagaggatggggtgtaattacttgattacttctggtcagactctgtcctcggggccccaagccacaggggaatggattctccctgggtagtggcccctgactttgccctcaaacctttagaaagtttcctgtggggcttggactgcaggaccccataaaagccaccactgagggacactgggccttcatagccacaaaaggtcttttggtgccagccgacagtgggcatgcgcccccctgccccacgccgccctttcctgggtgccaagctctttccaagcgacatttgcgtccatctgggctgcctcgtcctagcctggctgctcaagctctaactaaggcagcctctggcctccctccccaggcccagggcaggagctggctgctggccagcggttgtcttctgggtcggtgggggtggagtctggctggtctgtcctccaccctttccgcctcctggcaagtcctgagctgcacctcattgcccggccaaagggcagagacacgagcgactgggggcacctctggtgaccaagaccgggctgcgctccaaagaggccgttgggcctggagtggggttggggggtccgagaggagttgggtgacatcccccaccccatcccgggtccagctgtttcagcccctctcggcgcgccgatactattagccccacccgtcctccatcgagtcccgtgccgctcccaaaccgcacgataagccccacagggagtgcgccataggccggggcgcgtcacggggccggggcggggcggagtccggacgtcgggagcaggatggcggcggagcaggaccccgaggcgcgcgcggcggcgcggccgctgctcactgacctctaccaggccaccatggcgttgggctattggcgcgcgggccgggcgcgggacgccgccgagttcgagctcttcttccgccgctgcccgttcggcggcgccttcgccttggccgccggcttgcgcgactgtgtgcgcttcctgcgcgccttccgcctgcgggacgccggtagtcccccgtccgcgcgacgagccccccacgcccggcagaaacccccacctatggccggtggaagtccttgcccccccgtggaaccccccatgtcccacgaccggtctgtccccgcgctggtctcagcgcagttacctcgtttccagacgtgcagttcctggcctcggtgctgcccccagacacggatcctgcgttcttcgagcaccttcgggccctcgactgctccgaggtgacggtgcgagccctgcccgagggctccctcgccttccccggagtgagtaggggtaagcgggcggcgcggcggccacggggtgctgggccgagcgcggagctgacttctctccccgcaggtgccgctcctgcaggtgtccgggccgctcctggtggtgcagctgctggagacaccgctgctctgcctggtcagctacgccaggtgggctgcgggccactggcagggagcgtgggcatgggatgggcccccagcgccggggctccgtgctggactgtggcggcggggctggctgcccaggggtcccaggactggcctcccgcccccactcttcagggtgtaaggaggggctgggtgagggtggagctcccaggttggaagttccaggccccaggtaaccgccgtcttgggtggcctagtgaccctcaccctgggaccccctgactcttggctccccacagcctggtggccaccaacgcagcgcggcttcgcttgatcgcagggccagagaagcggctgctagagatgggcctgaggcgggctcagggccccgatgggggcctgacagcctccacctacagctacctgggcggtgagtgtctggtgcggggcaaggcaagggccgggaaggaggagccccatcttggcccgaggtcccccaatcccaccgccttcctccccaggcttcgacagcagcagcaacgtgctagcgggccagctgcgaggtgtgccggtggccgggaccctggcccactccttcgtcacttccttttcaggcagcgaggtgccccctgacccggtcagtccctcctctaaaccctgctgtctccaggcgacaggccccaagccagcccttgccctggcgagaggtgtgccacccaggcaggtcaccccagtgctgtcccaggaagctggcacgggctgcattacctttgctctcaaactagggtgtccctggctgctcccaggcctcatcctgcattcctggcccccattcttcaccgactctgttccacagatgttggcgccagcagctggtgagggccctggggtggacctggcggccaaagcccaggtgtggctggagcaggtgtgtgcccacctggggctgggggtgcaggagccgcatccaggcgagcgggcagcctttgtggcctatgccttggcttttccccgggccttccagggcctcctggacacctacagcgtgtggaggtgagcccgggcactttaggggtgggctcagcagaacctcagcagcctctgactcccttatctatttctgcaggagtggtctccccaacttcctagcagtcgccttggccctgggagagctgggctaccgggcagtgggcgtgaggctggacagtggtgacctgctacagcaggctcaggagatccgcaaggtcttccgagctgctgcagcccagtgagtttcccggggaggaggtgtgcctggtgggagatccccggggtttgggaatgggcagggaaggacagtgaggtactctgctgaagtttcagcggtgatactgcaggccgtggcagggaagtaagtggtggggctccctaggagctcccaagcagaaggtgagcacaggtgtccttgactgaggcggggcggggagcagggggacaccagggtgaatcaggaagacccgaggggtggcccccaccctttctccacccacgcggcaggttccaggtgccctggctggagtcagtcctcatcgtagtcagcaacaacattgacgaggaggcgctggcccgactggcccaggaggtggggtggatgagtgggtaggcggagggtggctggggggctctgggggcccctgcaggttctggctgggctcattgccacctccttccccgcccagggcactgccacccccttccccacccagggcactgccacctccttcccccacccagggcactgccacccccttccccacccagggcactgccacccccttcacccagggcagtgccacctccttccccacctagggcactggcacctccttccccacccagggcactgccacccccttccccacccagggcagtgccacctccttccccacccagggcagtgccacccccttccccacccagggcagctgggctcacggccacccccttccccacccagggcagtgaggtgaatgtcattggcattggcaccagtgtggtcacctgcccccaacagccttccctgggtggtgtctataaggtagggacagtgtcgggggcccaggtgggggcaggtctgagggatggtgctgggtgggggataaggaccagccagctcaacgccctcttcctgcagctggtggccgtggggggccagccacgaatgaagctgaccgaggaccccgagaagcagacgttgcctgggagcaaggctgctttccggctcctgggctctgacggtgaggccctcccatcccccctgctgtccaccttcaaagcaccagggcccccgcttattcttgccccgtccacacagggtctccactcatggacatgctgcagttagcagaagagccagtgccacaggctgggcaggagctgagggtgtggcctccaggggcccaggagccctgcaccgtgaggccagcccaggtggagccactactgcggctctgcctccagcagggacaggtggctgccccaccgccctcatcctgacccccagccccggtagagccctgactgggagctagccccaagcttctctttccttacctcctccctgcagctgtgtgagccgctcccatccctggcagagtctagagccttggcccagctgtccctgagccgactcagccctgagcacaggcggctgcggagccctgcacagtaccaggttggggggaggcccaccctgtcattctgccctgtgcgcccccgccctcaccctgcccaccgctcctgtcctctgctccctgcaggtggtgctgtccgagaggctgcaggccctggtgaacagtctgtgtgcggggcagtccccctgagactcggagcggggctgactggaaacaacacgaatcactcacttttccccacagcttgtcctgtgttgtttgtgtcgtttgttcacccagcccacgggctgcgcctcccgggctgcggctgggctggagtcgggaatctgagctcgaggtagcaggaagatttgcatcccagtgaaagcacaggccctgccggcgtgggagacagccctgtgctgaagcccgaagggcagtgaggagttccctggctttgggtgggctgtggggagtcagatcccacactagaactacaaagccacaggcagggagggctttggtgtctgccttggagttgagggagttgctgcagacctttccttgctagaggcaggctggggacaggacagggttgggggtagtgccaggtaagagggtccagccgtggccctgggctcccacgcctgcctaggcactgccccccaggctcagggtcagtgaagacgtctcaaactccccaagtcaaaagggagtgctcaggtgtctcctgccactgctgctgccaacccagcaccaccctggcatctggcgtcagggacacagctcctgacccagcagcccacggaaggagaggaagaatggggaagaagttgaagctccaggagatgactcagccccagacacctggccggagtggcactgcacgtggctgtgctgggctggccctgcctctgcaccagcaagttcctgatctcagggttccgccagtttgggcaacgtgagcttcaagaggaactgcttgggggagaggttctaggcttggcaggaagtggaggctgggggcctgagcctctcttgtcgaagcagcctgaggtggcacagacaggcaagggtgtggggggaatgctgaccgcctggggcacttccgtctgcccaggcattccaccagaccagctcacctggctccccgggcttcagggtgggcagcaccactgtgtggttggctgagggtggagggtggggacttggagcagaggcccagtccagccagccccggggagtacgagctaggagagagatacagactcacacacattggacagaacacaccacaccccagggcacccgcgcactccgaggggcccagcca

SEQ ID NO: 97012 - DNA, 13831 bp, Homo sapiens
atgatatagtaaaaaaaatcagaggccaggtgaagtggctcacgtctgtaatcccagcactttgggaggcagaggtgggtggatcacttgaaaccaggagttcaaggacagcccggccagcatggtgaaaccctgtctctactaaaaatacaaaaattagccacacgtgatggcacatgcctgtaatcccagctactcgggaggctgagacagacttgggaagctgaacctgggagggggaggttgcagtgagccgagactgcgccactgaactccagcttgggagtcagagctagagtctgtctcaaaaaaaaaaaaaaaaaaaaatcaggatacaaaaactgtaactacaatttggttgaacaaatattctgaaggaaagactccaaacagtaggtgtttatgggtgataagacaccagagtgacaatttcttccttacattttacatattttctgaatatttcacaagaagtttgcttttctttataacagacaaaagattatttacaaagttggtctcctttcattttctaccttattagtgaatgctttagcaagagagggtaggactagaagtggaaggatgggagatggggaaaggggagagctcagtttcaccagcatttattgagcatctggtacgtccaggcactgtgtagggtgtgacagctgagtgaaagctcaataaccaggcattactgtgcagagaagccaagggaatgtcacgttcaaaggtcctggggtgtgaaatagaaggcttataggagcacagaaagtaaggcccagggggagaggtgagatgtggttggcagttgggcaggctggaaatgccccagaggccctgtcagcttaatcaagggattcagattacatttttctttttctgagacggagtctcgctctgtccccgaggctggagtgcagtggcgggatctcggctcactgcaagctccgcctcccgggttcaccccattctcctgcctcagcttcccgagtagctgggactacaggcgcccgccaccacgcccggctaattttttgtatttttagtagagacggggtttcaccatgttagccaggatggtctcgatctcctgaccttgtgatccgcctgcctcggcctcccaaagtgctgggattacaggcatgagccaccgcacccagccaggattcagattacattttgaggaccttggagccacggaggatttttttaaatttttaattgaaattttattgggtgtattacgttctatacaattttatcacctgtgtggttttctgtatctcaagacactgaatagttccaccaccacaaagatccctcctcctgcctttgataactacacccccttcctctgacccttgccctctactgcccaccagagtcagggactgatcagtggggagggtaaggaggaggcaacggagaagaccccatatctgcctgggagagctcacaggagtcaaggtggaccgtgagttgcagtgccaagtttggggcttgccaggttagctacggccatgggaatgtccaggtgaaagtctttcggggccaatggatttaaatatccatggcttaggagagaagcctgggctggaggtgagatttgggaggggtttgtctcctcagggagtggagtaagagaggactgaggaaggagccgcctttcaggtgacagtctacttctgcacaggggtcccttgttttgcagctcgctgcctccttgggactggcaaagccctgctcttgcttaaggagccctctctgtgcagagggctctcccagcatgcccatcccccacccggagcctcagagccaggcacaggaggtccttctgcacaatggccacgcattagctgtgtcctgttcagtccccaagcacagggcttgttaatcccagccctaccattccaggaaggaccccagaggtcacggaatccaaagcgttgaatttacaaagaagaaaactagtcctcggagaagaggcttggccaaggccatagacgtgatctgctggccgaaagggggctgtttatttactggttcaggatcggttttccccctacaggaaaagggaggtgaaacccaggcgagatgggtgcaagtttctgaacactttcattcggcagctttaattgagcgtgtattatgtgccaaggagggccagggttttcgggataggaggtggacaaggcacgggccctaaggctggtggataaggacatcgaagggttaaattctgggacggctgcagggaggaaagggtagaggaatctcccgaggaaaggcccccttcccggcatctcaggctccggaaacccgggcgcgaggagcctgggaagggctgccccgcaggccttggcctcccccgcggagctccctctggccctgggagtggccgctctcgaattacaacaaaagaggccggaggccgggcctgctgcggcggccgccttcggggaagggggtgggtccggggaggggtttgccatcctcctctagttaaaagtaagggggaaaagagtaaacgcgcgactccagcgcgcggctacctacgcttggtgcttgctttctccagccatcggagaccagagccgccccctctgctcgagaaaggggctcagcggcggcggaagcggagggggaccaccgtggagagcgcggtcccagcccggccactgcggatccctgaaaccaagtaagagcgcttcccgcgccaccccctccccgaagcggttcgcgagaaagcgggagcgtccctatggggtctccaggcttcgtcctgcgcggggctgcctctcgacagtgcctgggggttcccaaagacttcttgcggggagcgatgcgaggacgtgcaggctaacgggtcctcctgccgccccgggcggccccgcccaaccccacctcgtacgggccgggcgcggcgcggctgctggcgcgcccggggagcgaggcgctgggtccctggatcgtcccgagcgcccgtaatcaggcgggacagagcccgtcaagtctcggtgtgtgctgggcgtcttggagagtgcagcgtggctccagggacagcgtctccggaattctggctttgaggagtggggcacgcgggggacgggtcgggagacagtgactgccctcggggctgtggttttggggatgtagagcgtgctgggctgggacggagtgggggcggggaccccgggggctgcgcccgggagctgtagcgtccactgcttgaacccggttcaacccccagcctgctcgaaaggctgttgggagcgcgggagcgccgtgagtcctgcgggagcagaggcgctctcggcacgccaggtatgcactcccaagtcgccctgcctctccggggaccagggaccctctcccgccttcatcacctagaagccctggagttggaaagaacgggcacgagcgaacccacggctacagctgatcccaatcttgagccgttggtccggtggtctgaagtgcctacaacttttacgcaggcgctttgcccaccgcgccccttctcaccagcccaaatttggaagccctctgggtgtggctgcctgctcgaggtgtcccaggaatcagcgctggaatagagatgattgggagaacaagcgaggttccctcctctccgtgcccgagctaagaccatcaaaaaacagccggagtgcggggcggagcggggcgagggtgtgaggaagagaacaccgcagaacacggcgagggagggggctgaactactcaatatggttaggaaaccccaagtcctgatgaggggagagatgtgcatgacagaaacatgctccaaattagtttcgtccctaagatcttgaaactgcagagatctcaaaaacaatactttttttttttttctcccagaggaagaaaaacgctgaggctcacggtcactgagttagtcaatgtggggactgaaacccatacctcttactccaggcccctcccctacaccactgctagcctgtccgtcctggaaccccaaaacaacatttgtcatctttggtggaatgaattagttattgatggtgtatcatgtacttaatggtcagggttggggtttagggtggaagaggaagagttcatttccctggtcagttcccagataagtgactgactcactggatcctaacttgactaaatttttaatctttctcctcacctttgtcccgttcctcttcctggtccctagtatctgccctggaatggccaccagagccatgacaagatgcgtgctccccatgggccccagtggctaccaaggctctccccaaggaaattgagtctcactaatctgtgtgtgcacgcgcgcacgtttgtgtatgcatgtgtgcacgtgtatgtgtgggcacatgtatgtgtgcatgtgtgtgtctccacacgagtgtgtttgtgtatgtgtgtgcaccggtgtgtgtttatatgcgcacacaggtgtgtgtgcgcgggcacgtgtgtgtgcacgcaatgtgtgtgcatatgtattcctgtgtgcatgtgtgcacacctgtatgtgtatatgtgtatttgtgtttgtgtgcatgtttgcatgtgtatgtgtgtgtgcgcgtttgtgcacttgtgtgtatgtgtgtgcacgcatgtgtgcacgtgtgtatatgtatatgtgtgtttgtgcatgcatgtgcatttgcttccctgtaactttgtgttagaaagtgacttagtctaaggtcacttaggcattgagtggcaaagttgagtatgaaactcaggtctgaaaacaaaacgtacttaacaccacacattggctgacattttaagtatcacagataggagattctgcaaagatgcttccttttattttctttccaactggcctctcctggcctcttcccaagtccttgtcctttgacctctagatggccagtgtggaagggctttgtgaaggaaacagattttctgtgctctagatagacatgaccatcagcgaaggtgttgagtcccagaaaacactacattgtttattttttattctcaaaaaatttcaagtatgcaaaaaaagtagagagaagggtataatgatgcctcataagcttctcactgaatttcaacagttattttgccacatgtacgtcatctgtccctttgtttctgtcattgaagtagtttaaagcaaatcctatacatcatgtcatttcattgctacatatttcagtgtgatttctaaagattttacataactatgatgccatatttagacctaagaaaactaaaaaaaaaatatttggtatcatctaatgccaaatagcagtctatatttaagcatttcccaattttcctcaaaatgtctttttttatagttgatctgagttctgttgatttgtgtaacttgttacattcctattgttatgttcttcctttcaaactacttttctgtccactatgtcatttgattcttacaaggtcccactaaagagttaggtgagtattttcaaattcatttctcagctgaggaaatggataaacagataagctgtccagagggcacagctggtgacccagggagccagggtctaacccagcctcctcatggctgggcttcggtggttctggttctccatgttactcgtggactctcagctgctctctgaagagttcttcttggctcaggcttcatcctgggcttatcacttcctatacacctgctgtcagaaatccctgtgtaaatattagtaattggacatttggtgcttgagataaatgaactgcaaaatcaggaagccagggtttgtttcctagctcattgcaaaactgtaagggctcagagctgccctctctgaactagagagcagtgtacttcctcattatttgactccaaggtgtaaaaataggatgagtgaaatgactgttgctgggattcctggaagaaacaaaggccccagaaagaaatctagtagaggacaatctcccctctctgagcatcacctgagtactctgacagctggtaccttcatgctgaagccctcaaatcctatgacagagaagtaggggtatataggcttcccattgaagcccttagtttatgcatgactttattctgcatttgaccaatgaagatatgcaacacctgatatggcttggctgtgtccccacccaaatctcattgtgaattgtagctgtcataattcccatgtgttgtaggaaagacccgatgaaaggtaattgaatcatgggggtagatctttcccctgagaagtaaatctcgtgagatatggttttataaatgggagtcccctgtacatgctctcttgcctgccaccatgtaagatgttcctttgctcttcctttgtcttctgccatgattgtgaggcctccccagccatgtggcattgtgagtccattaaacctcctccctttacaaagtacccagtctcgggtatgtctttattagcagcatgagaacagactaatacaacaccagagccttctgcttttagcattttcattacttaagtttatttgcttttgaaatggagcgaagaagaaatttctccaccttgttaatgagactcataagttggaattctcctttcttggcagatcatgtgggaaaaaggaatctcttggcacaggactcctagatgttctgctgttacgcttgttgctttgaaacagggaatgaacagaccttccataaaatagccagttagaggcagagaaactggtcaacccgattccatccaacgggaggaactccgaagtggcaagacattaaccttaaatcaccctgccttctgacggccatagattctttttccttagctaataggctgtctccatggaggaagaatttctaggtgattccacaccagcagctgcagttgcacaagcatgactgcttccttcattttaaagtttggggagccttaggaggtgttttagtccattttctgttgcttataacagaatacctgaaactcggtagtttattaaacaaaaggaatttagttcttacagttatggagactgagaagtccaaagtccaggagctgtacctggtgagggccttcttgctggtggggacttggcagtatcycaaggtgatgcaggaccatcgtgagggggctgagcatgataacatgctagctcaaktctcttttcctcttgtaaagccaccaattcccttcccatgataaccgattcatctattaattggtgaatggattcatcagtttatgagggcagagcactcatgattcaaccacttcttaaaggccccayctctcaaaactgccacattggggattaaatttcaacatgaattttttggagggacacctattcaaaccacagcaggagatatgatttcccattcccaggggctgcctggctttaaaagagcagcttgttactgtcatcgtccatttccccctggagaaaggcttttgtggtcggtctgcatggcagtcacaccctgggtggtccatgaggcctcagatgaagtggcccgaggccactctgctctaggcccacagacaaggcgggaatagcagttgcaggctagaaaaggaagggccaaccagacattcacagagatgcaaccagagcaacacacagctgagtctcttaagtcttcagtcctgtgtaagttgaagcaagacatcagaaatctctcacctgagtaattccacacatgcacccactgctgtccaatgcagtgcttgctcagcagggagcacctcttggccaagcgtattggcagcccttctaccgtgaccagcgtcagggacgtctctaggcgccttttcagaatagctggcaacatagggagacccagtctctaccaaaaaaaaaaaattagccaggcatggtatagtcccagctactcaggaggctgaggcaggaagattgcttgagcccaggaggtcaaggctatagtgcattccagcctgggtgacagagtgagaccctgtctcaaaaacaaagaaagaatagccacttggttgatgatgataaaggatgctggggactgtgtagttcagacttctgtccagagttttaacaaatcttttgcactttctgtggcagaaataatattaccaggcaagtagtgtgtgtggcagatgagaacaagaactaactcagcagatgctgaggttgtggttaggaacacagttagtaggttcttcttgtccagggcttttgatcccttcacttgggataccttaagtattatatttaattatagtcttctaagcaaagagtgatgttttctttttagttttttcattcctacgatccacgtcagacaagcagacacagctggccctctggatgtcctgtggcaacagacatatcctccttgatgtgttgccaacaaagtgctgagggtatcttctgcaaaaatgatgccacttgcctataaaacatacacttacgacaagataacttatggtgatgacttgtgaacaacttaatttgcagtttctttataatatctttctggaacttggatccatgaacttcttttgcccccaggcttgtcctgatataccactggggtaccaaggtaaacacagtatagctcttcagagtgcctgcatgactcgaagatgtagtgagaaagatacttttctaaatatctttctaaaacaattacaaatataaaattgagtaaagcacatttcttttttttctttttttttttttttgagacagagtcttactctgtcacccaggctggagtgcagtggtgcaatctcagctcacggcaacctccaccttccaggttcaagagattctcctgcctcagcctcccgagtagctgggattacaggcatgcaccactatgcccacggaaaagcatatttctttcttttttttttttttttttgagacagagtcttgctctgttgcccaggctgggagtgcagtggcgcgatctcggctcactgcaagctccgcctcccaagttcacgccattctcctgcctcagcctcctgagtagctgggaccacaggcgcccgccaccatacccagctaatgttttctatttttagtagatacagggtttcaccgtgttagccaggatggtctcgatctcctgacctcgtgatccacccgcctgggcctcccaaagtgctgggattacaggcgtgagccactgtgcctggccggaaaagcatatttctaaagatgatttcacccaccccaagaatagcatatctaggtaaaatcacatgatcctaagtatatacccacataggctttttgggttgcttttgtgtttattgtggtaaaatatacgtaacataaaactcaccatcttaactattttcaagtgtacagtgcagtggcgttaagtgtgttgacactgctgtgctaccatcaccatcagccatctctggtacttttgcatcttccaaaacagaaactctgtacccattgaacactaactccgctctccccctccgaccaatccctggcagcccccattctactttctgtctctgtgactatgactgaactaggtacttcatataagtggaatatattatatttgtcttttcgtgtctggctcattttacttagcatggcttccaggttttttcacgttgtaacctgtgtcagaatttccttccttgttgagcctgaataatatcccactgtatggatagaccacatttgtttatctcctcctccactggtggacatgtgagttgtttccaccttttggtgactgggaataatgctgctgtgaacattggtgtacaaatgcctgttatggatgaacttttacaaagtgaacatgcccttgctactacatcaagaatagaacattagcaagaatgcatgaatttaaaggcaaagcaggagatttcaaatacgtttcatgcccaaacatggctgcttcaattacacctcaagatcttgggactggatattgattttctctaccatgagggggtttggaagagatatttgaaagaacacagttaataatctgtgatttgaaagagtcagtttataatcacagattagttatgagatttaagtagctcctttccttaaaacgtctagggatgggagtacaacctgttgagatttgcaattgtagctgtgttagggtatcaccactaggatcattccaggctgccccttggccattgtagggttcaaatccacctggagaactcctgcctttctggcagcttctgctggagcacaagtctaagcccattctttggccgtatcctgcctgccctcctcatttccttcctccctccttcccttcccacctgatctctctctcgtttttttgtttgtttgtttgtttgtttgtttgtttttgagactgagttttgctcttgttgtccaggctgtaatgcaatggcacgatttggctgaccgcaacctccacctcctgggttcaagcgattctcttgcctcagcctcccgagtagctgggattacaggcatgtgccaccacaccctgctaattttgtatttttagtagagacagggtttctccatgttggtcaggctgctcccgaactcccgacctcaggatcctgccgcagcctcccaaagtgctggaattacaggtgtaagccaccgtgcccagacttctctctcttcttaagtagaacgatttatcagtgactctaagagtttatgtgtgtatttagaaataaggccaggcacagtggctcacacctgtaattctagtactctgggaggccaaggttgggggattgcctgagctcgggagttcgagaccagcctgggcaacagggtaaaaccccatctctactaaaaatacaaaaattagccagtcatggtggtgcacgcctgtaatcccagctactcaggaggctgaggcggaggttacggtgagccaggattgtgccactgtgctccagcctgggcgacagagtaagactctgcctccaaaaataataaaataataataataaagtcttcagtcaagagtaatattttgatgcctggcaaccacccccaggctgcctgcatgacactttcaagtgtcatcgaagtagattcttttttaaaagactttattgagatataatttgcatatcatccaattcacccattaaaatgtacaagtcaatggatttcagtatattcacagatatgtgcaaatatcaccccagtcaactttaaaatgttttcatcaacacaaagagaagtccatatccgttagccaccaccgcctatcctcccagccttaaacagccactaatctagtttctgtctctatattgccaattttgtataatttgtgtaaatagaatcatataatatgtggttttttttttttttttttggtctggcttttttcacttcccttaatggtttttttgttgttgtttctttgttttgttttgttttgagacggaatcttgctctgtcaccaggctggagtgcagtggcgccatctcggctcactgcaacctccgtctcccaggttcaagcgattctcctgcctcatcctcccaagtagctggaactacaggcgtgcgccacaatacccagctaatttttgtatttttagtagagacggggtttcaccatgttggccaggatggtctcgatctcttgacctcgtgatccgcccaccttggcctcccaaagtgctgggattacaggcgggagccacggtgctcccctaatgtttttaagcctcaccatgtgtcagtatctcgttactttttatggccgaataatattctattgtatgggcataccgtattttgttaatccatttatagttgacagacatttgggttgtttccaccctttgagtattatgaataatactgctatgaacattcatgtaaaagttttgtttgaacacctgtttcaatgtgtttcaattttgggggggtatatacttaggaggggggttgctgggtcatatagtaattctatgtttagctttttgaggaatcaccaaattgtttttcacagtggctgtagtattttacatttccactagcaacgtatgaggattctaatttctccacatctttggggacactttttattttccccttaagaaaattccagccacctttatgggtatgaagtggtatctcatggtactttgtgtttgcttgatgacgagtgatgtatcacacctttttatgtgcttgtaagccatttgtatgtcttctttggggaagtgtctatttaagtttttgcccatttttaattgggttggttgtctttttttttttttttttttctctgagacagagtctcactctgtcacctaggctatagtgcagtggcacgatctcggctcattgcaacctccacctcccgagttcaagcgattctcctgcctcagcctcccgagtagctgggactacaggcacgcgctaccgtatctggctaatttttgtatctttagtagagacaaggtttcaccatgttggccaggctggtcttgaactcctgacctcaggtgatccgcccacctcggcctcccaaagtgctaggattacaggcatgagccaccgtgcctagcctgggtttcttgtctttttattgttaaattataaacaatttttacatattctgaattctagaccattgcagatatatgatttacaaatattttctcccattctgtgggttatcttttccctttcttgacagtgtctgttttctttccagttcaaatcacatttattcaacgtctattctgtgttgagcacaggggatccagaagtgtataagctacagatgcttaccctctagagggatcaccagcttaaaagagaaacagacatgcaaatagacaatgacaaaacagtagaataagtgcgataaatatttggtcatcacccttttttctcaccctcaccactgctgccctggttcataaagcatcttcaaaacatttttttttgatgtgcagaagtttttttattttgataaagtttaatttacgtatattttccttttgtttcttgtgcttttggtgtaatgtctaagaaatcactgccaaatccatgaagacgtactctatgttttattctaagggttttacagttttagcttttacattaaggtctttgatccattttcatttatttttgtaaatgctatgaggtcgggccccaacttcattcttttgcatgtggctattcagttgttccagcactgttttttgaagacaattctttccccattgaatggtcttgggaccttgtccaaaccaattgaccatagatatatgagtttatttctggactctcagttttatctcattgatctatatgtctctccgtatcccagtaccatactgccttgacttttgtagtaagttttgaaaacaggaagtataagtcctcttacttcgttctccttttcagaattgttttggctaatctgggtctcttgcacttccacaggaattttagaatcaatcagcttgtcaatttctgcaaagaagtcagctgggattgtgatagaaattgtgttgaattcgtagatcaatttgaggagtattctcatcttaaccatttaagtcttccagtccatgaacatgggatgttttcccatttatttagatcgtctttaatttcttttaacaatgttttgtagttttcagggtataaagtttatatttcttttgttaaatttactcccaagtattttattatttttgatgctattgtaaatgggattgctttatttcattttgaatttttcattgtgactgtatagaaatacagttaatttttgtatgttgatattgtatcctgtaaccttgctgaactcatttactggttttgatagttttttagcagat

SEQ ID NO: 97013 - DNA, 17993 bp, Homo sapiens
accagtagcatctcacactgaatagaagctcaataaatatcggccaaattgaatttaacaaaatatatttatggataatttaaaaacatgtcacataaccaattatagtctgtctcaaaaagaaaaattatccctaaaataaaaatgcactatgcctttacagtttaagctcttaagtccttatccttctcaaaagttccaagtatagactagactttgtacaacttcttcattaaaaacatcaccagctgtgcaagaataatgtataaaggtaatcaatgaactcaggacacactgaacactgtttgactgaaactagacaaggaatattacattgtgggactcagctaactatgcctaatgaatgaatgattaggcagcttgtataaacatttaacaaagtgaatttatgaacttaagttcataaaatagtttgcccctatactgggaggtgtgtgccagtttttatagaagcatcaaaataacacataatgtgaataatgctttacagattaaaaaggagttttcacatatattatttgaattaatcaaatgagtattttaaccaaattggttaaagaagaatgctgataaactaattttttatttcttctttctgcatatatttaacgagctcctattttgtgttaggctctgtgtactatgtgcattgtttacccgaagtcttctaaagctatcacacacagccattttaacaggctcctgcccagttttcctgccagcagtcacttcaaatggaatcattcatctgcagctgctctttttttttgagatggagtcttgctctgttgcccaggctggagtgcagtggctcgagctcagctcactgcaagctccgcctcccgggttcacaccattctcctgcctcggcctcctgagtagctgggactacaggcgcccgacaccgcgcccggctaatttttttatttttagtagagacggggtttcatcgtgttagccaggatggtctcgatctcctgacctcatgatccgcccgtctcagcctcccaaagtgctgggattacaggcgtgagccaccgcgcccggcctgcagctgctctttagtatggcacccagtgccctttataaatggacctaacctgcttctttcctcatcattctcattgtcctctcctcctcctgctgtacacaattctctagctattcctttcttagtatgtctaacaaattcttcatacctcacattctagttctcatgttcttttctaaaacctctcctgactcctttagactgaagtttagagagccatgttggctctattccctctaactacacttcattcccacttcgaccatagtacttacaccatagtaaggcatgcatacatctgtttcttccattagctccacataagcaggggaatatgttttattcaccattgaatctccaggtcctagctcagtaccaggcacatagtagatgctcaatgaaaatttactgaatgaacaaaacaactggagaacaaaggaagtgccaaaatgtgcactgcataatagagatgagaaataagagtgaactaattcaactgggacttcttggcaaagttgggagtcaggcagaacttgaagaataaacaaaatcagataggtggagaagtatggggagaagacgttttaaataaagcatgtcatgtccaagattactttaaacaaaacaaaacagaaccatacttaccttcagttactcccccaatagcaagagaaataatagctaaaacgttttcacatgatgaatgatttatctaccaacagaggagaaacaatttaatttaggggcaagagttcagactaaactcgattaacagtaaaaacatgtactctgatattaaattgactatcagaaatatggaatacaatatttcttatagaaaacaatattttctaatatgaagttaccaaaatttaacagtaacatatagaatcaatagtcgtagaagtatgtcaagtaacaggcaactcactcaaaatccaatggtctcaagaaaatggttatattagcaagatgaaggctataagctaatcaaggacagaagtgctgaagccataactcagccagtggcacagggcaaaggcagggctaggagaattaactactaatacacccatgtgtctgaggggtggttttaatagaaggaagacagtgcttaggttctataaaatcataataaccagcatttactgagtgttcattaagtgctgttttacacacaacaacactgaaagaacggtatttcccctctcacaaaagaaactgaagcacagaaaaggaaaagaacttgcccaatgcctcacaatggaaaagtgactaagtctgaagaaaaggaaagaatcattttttaatcagacttgtctgagagaaagggacattgtactatggccaatagaagggaatctagcttttggggacccaacctttgcttgaccaagaataaactgttgaaacttttcctttcattcaggtgccccattattggtaaacaaattcagatttttcatggttagacttctctaccgaagttggagagccctcagttatttatgtaagtttactgatgaggaggatgccagaggaaaatgagggaatggaatcccagctcctaagctaaatattcttggactagaccttttgcgccactacaggatgtatcactgcttatacaggaaagtgagagagcccaccttcacctctagttcttcctaagacctcatgtcaacttttcttatctcacttggagagggctcttgtcatttattaaaccaaacccttaaaatgtacctgtgctatcaaaatccttagagaaatcgtatagtcatcaagtcaacttttacaaagcagaaaggttactctaaaaaaagatgtttaaatatccattctaagaaaaaaagcaatttttaaataacatggtttattaatttgtcagtaaaattttaacaatggaaaaacatacttacaatttcttcttctagaatacctctgaaagcttggtcaagggtacattttttttcattttcactattaaaaacaaaagacatcctcatttttcaaacagctcagggtatgtataaagattgaggcaagtatttttcatagatatcaatgccttacctgccaggtacctggctgaaggtacttaacaatggcttgatgtttttgttgttcaaggcctctctggtagacttctaaaaaaaaattaaaatggcaaataattgtaaagattttgcttattatttgctgaaaaatatatcgttcattgatagtgtatcttactaactaaaaaatgcttatacctgggaaaaattacctatcagtcattctctcagtaatccttattccaatgctacttcatgatacggatcctcatcactttaaatctggcaagagcttccttgctggactttttcattctaggtgatatttctgtctctttaaatatcacattcatgagtattgtgcttacaaaaaaaaaaaatctccatatggctccttatttgcccgttttagttttgaagcttcatagatccctcaaggtccttgataatgttatcccaatttacccaaacttaattcccaatactccctaacacatactttgcactaaagtctagccatttttcatcactttatatcaaactcattctactgtattcacacattcatgttgctcttcctacctgctcatccaaattctatccattctcccacacccatgtcaggtctcgcctcctggaggtatcttgttcagtccctgacacgtagcactcaataaaaccatgctgacaatctgtagattgttttaaagtaatcataacttaaagacaaaaatattgcaaaaggcattcattctatgaacactcacatacacttagaaagtcatcttattacctcacaggaattagatctatcctaaatgtgtccattccttgctctgccactaacaggctgagtaatttggggcctgttcctttatctctttgtgcttcattttcgtcaccagttaaataagagggtttttgtagatttttactaccagcagcagctacagtggcatcacctaggaagctggtagaaatgcaaaatctcaggctcccttccacacttactgaacaagaatctgcatttcacaagaagcttgagaaacactgaactagatgatctccaatttcatggtccttttcagggctagtatgattttttttttttttttttgagatggagtctccctctgttgcccaggtgttgtgcactggcatgatcttggctcactgcaacctccgctgtccgggttcaagcgattctcctgcctcagcctcccaagtagatgggattacagcgcccaccaccacgcctggctaattttcgtatttttagtagagacggggctttgccatgttggccaggctggccttgaactcttgacctcaggtgatccgcccgcctcggcctcccgaagtactgcatttacaggcgtgagccactgcgcccggccgccaatatgatcttggatagtcctaacagttactcttagcaggctttcaaagcaccagagattgcagcaaaacgcacacaaagaaaatgattatgatgacatacacaaaatataatccatttaaaaaaaacctcacactgtgtgtgtgtgtatatatatattatacgtatacgtatatatatgtatatatatatatataaccctgcaaacaagaaaactacttactacaaaggatgaatttttctttcacacaattttcatcctggcatccctataactaccaaaacacagccgaatatctgagaaatgttggtgcaaatgctagagacgaatagagtcaggcaacttaaaagtgttcttcatacttacgttgctgtgacgagcaacataaaaagaacagagtgtctaaagtcagaaaaaccactgaagtcacaactttttggggggtgtcagcttctacctcatgtaccaggaataaccaacttagcctacttcacagtgttactctaatagttaaatgagaaagtgatctgtcaagtgtttcccaaatgctcaaaaccacccttccacattgagcaagaataaaatagcatctggttacccttcccaaggtgatctatctgccttttcccgcttaggatctcatcgatcgcttaggagttagacacggtgggttaaggggtggtgaagagacggcgggaacaagcacttggtagctcagaaggctagggcgggagccaggtctttggactgaaaccactcccaccctcccccttcagcagctccccttccccttctcgagacacctgccccactaaacgagctgagaggatggacccaaccagcagtagtctgcaggtgggcactccaagcggggagccgaggcgcccagcacgcagtccggggacccgctggagggtgggcggaggcggacggcccagcccacaaagaagaggcgggtagtgcgtctttccctacccctcaacctccgacggggcccggagcggacgctgaggcggacacacctctgtctcactttaccccagggcaaaattcgagtaatttcagggagaagaggacaaagcatagcgccgggtcaggcctgcaccctcccctctacagctcaccgtaaaccgcgtccgcgcttcgggcaaactgaagagcggcggcgtcggagacatcttctcggctgcgcgtgcccgccactgcgctgcggcgcctgccgatgacgtcaagccaggagcaacgagactgcggtctctctgagcccggctagagtggcctgtgaacaccggtcgggcgagctggcagttgggagtttccctagcgactcagttcgggtgggcgttgggcgcctgagtcagccaaacagcctactcggggttcttgggtagcctttggggtgaggggacttgggcggccttggtctgtaagctctgcgttcccgggcgtggaagagactggccgcgcacatgcgtttctgtggttttcctggtttggggaaagcgggtaaatggtggctggttgcggctaactgggccgcgctaaaaggtaacccaaggcaggtggattacctggggaaacagctggagcagtggtcctgggccgccagtccgcsgtcatcccgggagcttaagatgcggagtggtgataggctccggatgtatgagccctgtggctyaagggcgctgttctctctgctccgaaatagaaataatacctgtctcacagagctgttgaaaagctccactgaaataatgaccgcaagtgtgaactgtaaagcaatgtaagtagtatttattattaaaaggtctctactgaaagaaagagacctaggaggaatgcagtgcccggcgctgattggaaaacgggtggcgctgcgtcctgggccgaggcttccctagcgaaaaccttgtctccctccatttcgtcccttgcctgccttcccaggagagacgtggccgatagaagccgagtggcagtaactctaagttggagttacacggtggagaaggaagcactgactcagactcgggtaacttcctcttattccctcacacgtgtatcttgttcccttcttcgaagtctgtaaatttaaaatcctaagccccccaacaactgaacagacccccgtgaggccaaggggacaccagcaaaatcttaacaactgagttcccagtcataacgggatgggaggtcagacggacctggttataccctctcccttttgtgatttagaggagatagctgactggccataaagttaaaatagaggccaggcgcggtggcttacgcctgtaatcccagcactttgggacgccgaagcaggtgggtcacctgaggtcaggagtggatcacctgaggtatggcaaacatggtgaaacgctgtctctactaaaaatacaaaaattagccgggcgtggtggcacgcacctgtaatcccagctactcaggaggccgaggcaggagaatggtttgaacccggcaggcggaggttgcagtgagcggagatcgtgccattgcactccagcctgggygacaagagtgaaactctgtttcaaaaaaaaaaacggagatgataggactgacggaattgactccatggcaataagataccaaagtataaacaggacctaagcccatgccaagcaagggttaaaagtcatgcatccctacgcttgaaaaataaactatgttctcactatgcttcaaggtttttctttagcagctaaacaagcgctggcctcacagtattaaaacaatttgcagttcatcgaccaccagacactaacaaccctctcccaccagccgtaactacagcttttattgatttcagttactttctcctgataagaaggtcactgaccatggacttgttctggccaatttrtagtgatkgcatgcttacgtaacttcctgaaaagatattttgatgtataggaccaaactgtaaatacatttaaatgttaagtctccaccccaaagtgaacatggattgtctgttaaacatgcatatttgtttaatatgcatgtgtcaagaccactttcatgaatattcatagccgctcctctaacttgttgaatatgtatgtttagccaaccagttaagcataaagttcctactccaactcctcctctgaagtgtctgtatgtggtcttggctggaggcatgcttcccagcctgcagaatggccaccttgcaggctgtaactccttataagaaacaaagtctctccttttctaaatctatagatcttatgattttttagttaacatgcacaataagaatacaggaagctaaggaaaagataactgcagaatcttactcctaagtgggaattgtgaacaataatgactacctgaaatgttacaggctttttaagaatcagcaagatcattcaggtttggttgtatacattaaatttacaaattggcaaaataaaaatgatttaattcagaattatactttgtttatctgatactaattgttgtaataggattatcatattacagatgactattaaccatctggaacacaactaagacctcagaggcaagtacatttttttcttttcttaagagacagggtctcattctgtcatccagactggagtgtagtggtttgatcatagctgactgtatcctcaaactcctgggctcaaatgatcctcctgcctccatttcccaagtagctgggactagaggcatgtgccaccaagctcagctaatttttttatttttgtaagacagggttttgctatgttgcctaggctggtcttgaattcctgggctcaagtggtcctgcctcggcctcccaaagtgctgggattacaggcatgagccactgtgcctgacctggcacttttcttatattgcttctagtccttacaacaattttttacttagttatatattaatgagtatacagcctcattggctgtaagtcacatggctagagaaagctaagtttggaatttgagcctagctgtcatcccaaagcctgtatttttcttaagtcttaactcttgaatctttaccatgggcctattcaatgtttcagaaattatttccttacaattggataagggcgaggaccatagtgtcattaataacaaaacataggcccggtgcggtggctcacgcctgtaatcccactactttgggaggccgagccagctggatcacctgaggtcgggagtttgagaccagcctggccaatatggtgaaaccccrtctctactaaaaatacaaaaatcagccaggcatggtggcaggcacctgtaatcccagctactcgggaggctgagtcaggagaatcgcttgaacccgggaggcggaggtttcagcgagccaagatcctgccattgcactccagcctgggcaacaagagcaaaactccatctcaaaaaaaaaaaaaaaaaaaaagagttttttgttttttgttttttgtttgtttgtttgtttgtttttaagtgggtaataacatccagagggcagacatccaggaacatgtaaccttttcacttatatttactgagcacctgtttttcctcatgctagctggtgaagtaagatggacgaaggactgcctctctgttaggaaataacttgcatgggagaatctaggatggatggtttagatcagttctaggcattcacatcttcattcctcttttttttccttagtgtggccttacttgagttcagtttaccattggaatggtaagatctgggaggaaaggactaaggatgcagtttaatctgcttttcttctagttcttatcctgactattgtctaggcagaaggaagctttttgctccatgcttactggtcggccacattaggatgttggattgcaggtttgcctttttcagcatttgggccccagccatctctccctttctctcatttgtagtttaagtggattgaaataattatatttatttaaagggaactgatgtttgagtggcaaagttgaataaaaagaatgagactcctgcattgtgagaggaatggaactgagaagaataaaaatgaaaaaaatggccgggcacagtgagtcacacctgtaatcccagcactttgggaggccaaggtgggtggatcacttgaggccaggagtttgagaccagcctgaccaagatggtgtaaccctatctctactaaaaatacaaaaaattagctgggtgtgttggccgcgcctgtaatcctagctacccagaaggctgaggcaggagaagcgctggaacgtgggaggtggaggtttcagtgagcagagatcgtgctactgcactctagcctgggtgacagagtgtgactctatctcaaaaaaaaaaggaaaaggacggccctttatactctagagcttaaattttcttggaaaaagagtaattttcatgaaagctatgtagggaggctgtatttttatagcatagtggcaattttcaagcattttatattgttgatattgtactgtttgttcaatatattgagtgcttactatctgccaggcaaaggtataatattattgaaatatatatgtagcactattttattatattgcaggtactgtatatatcattatctagcatatattgtaaaatcctgtttggtgggctcagttggaccacataatgagcataattcaaggtgagagatggaatagtgggtcagtttttgcccgggcatgccaagcttccctgcagggttagtcaagggatttgcctgaaattctaccattgtttggcttgttcccctttcctgtcctgtttttctctctccctgagagtattatcttaacaaatcatttgcttatgaattatcacctcaggatttgcttctgaagatccggattgtgttcgtttgggtctacatagaagcagacacagatacattacaccatacattggatgtgcaagagatttactaaggagagagcaagagcagggagggagaacttgcagacagcagtgcaggtctgacactcacaggaggagaaaaggaaggaatgtggattgggtaagaagtttctgggtacagtgcaattccaagaaagggttggctttgcaaagagtcctgcagtttgtcagaatgggcctgtactagtacctttgccatcctcattcattgactgggaccctcagaaagcatggccttggtgcaaatgtggtggttgatccagagggtagcagcttgagctgtcagtcaactgtggtccccgcagctgaagatctgagtagagcattatcatggccaccacactgccctaagatactaatcatgtagtaattttttatttgtattcagaaaatattttctttgtttattctcaacaaatatatgtgaacctagcactgtgaacaaagaagagttactaccctaatgaggcctttattctgtgtgggagcagggttatttatttatttatttttgagacggagtctcgctctgtcgcccaggctggagtgcagtggtatgatcttggctcactgcaaccttggcctcccgggttcaagtgattctcgtgcctcagcctcctgaatagctgggactaccggcacacagcaccatgcccagctaatttttgtatttttagtagagatggggtttcgccatgttggccaggctggtctcaaactcctggccccaagtgatccgcccacctcagcctttcaaagtgctgggattacaggtgtgagccaccgtggctggccaaggttttttaaataaataaaaatataaaagaattttactatgtggtaaatggtagcatctactgagtactgttgtgtgcttgaattctaagtgctattcatttaatcttcttttcagccttatgaggtaggtatcctttattcccattttacagatgataaaaccgaggcgaagtgcttaagtaacctagcctcagcaacactcaaagtcaaagaaatgagagactaaggtagagaatacttgggtagtatttaactttaaatagggttgttaggaaaggcctctgtgaggaagtgatatttaagcaaaaacataaagatgtaaaggaattagttgtataatcattttatgggaagggggtttggcaagggaaggcaaggatgagcgctccaggttgaaggagcagcatgtgcgatggctcatgttaggaaggaggtccacctacttgggaactgacaggaggcctgtgtgactggaggacagttagcaaaatggagggctgtgcggattgaagctggcggcagggccacgtgggtcaggacttcgcaagtctggaagttcactcggcacacagtagccatctggaatctagttgaacacagaaaagattttgagaagttcttaattgttttgcatgaacagtggaggatcatttgctttcactggtctccttgcttccactctgtggagcgtgatttccctcacaggactggtgctttttcattaaatgttgatgatcataaggaaggctaagattgttgagtcctcatagcagggactgggggactgctcagcacatttctcactcctcccttgcccttcacccctaccccctgcccccacaaccccgctccattcttgtgacagaacaggtgtgggcgtgttcattgacttccaacccccttcatgcatggctgacgcatgggatgttgctgtcatgcacgtgtaactgaatggagggttccctcaggtgttctaggcaatggcacgatattagagacgccctgaggcagaaaaaaattgatgcagctgaagtgaagtgctgtcagtttcacctgtgtggagctcgttgccatagcagtggttacagtaaaactgggtccagaggatgtgaacgagggccaggagatgtacaatataaggcagaaaaatggctgaattgttatcatactcttaaataaggaaagccaaaataaactgctttattgggtcttggctaattaaaaaaatagaggtttaaggatatatttcttaagaacataaaaggtaatcattagtagaatccaaaataatatgtacaccccaagctcactggagaaaatgaaaaaaaagtagctcatataacaagagttagaacaaaaagcagactacaaaataaatctctctttctctctgtgtgtgtgtgtgtttgtgtgtgtgtgggagagagagagaaggagaatgtgaaaatatgtgtaagtactgtacatgtatgcatgtatatattttataaattagaatggtagaaacaaaatcagacataaagcaaaggtcgatctaggctgatgttcacacaatttgggaagggggggtctttaagaagaataattaaaaattacgaatacaaaatgaaagtgaatattgatttggaatgacaatagaaatggtgatacattatggatgtcacaaatgttataaaatccagaataacattaactgcctgatatctctctgtagtactttctcccaacattttgttttttttaagagatggggcctcaccacgtagcccaggctagtctcaaactcctgggccaagtgatcctcccaacttggactctcaaaatgctgagattgcaggcatgagccactgcacttggcctcccccaacatttttggctgcatattctttgatcacctcattatatgacaatgattatataatattttaatttaaaagaaccagaaagataatttagtatagtggattttttattattattattgatagtgtagaaactgaaaaaagtttcacaactcactattgggtgttccctatctgtgactccctctgctagttcttgctccagtgacatttcttgctctgagaactctagttctttgatattgcttggtctgtcacatgacagttgttacagccagagctggcctggccagccatgtcctcctgtcttcggttccccttccttccactgccgccagcaagccagtcttcggtggggagaggcagccttgaaacttgagtgttgagccctgtggggggagcagagcaacatttaaaaaatatctttgtctttggtgtctggatgctcagtgggggccaccagggagaatttgtcaatgagggccaggaagatatagtagcacaggcaagtctctagataaaacagaatactaaaaaatacttgattaaccaaaagatgtcaggaaaggaggaacaagataagatgggacaagtagaaaacaaatagcatgctgacagacttaaacctatccgtatcagtaattgcattaaaagtaaatggtagaataataataaaattggtggaataaaaaataaatgcaatatggaatcctgaataggattctggaacagaaaaaggacattaatggaaaaactggtgacacccaaataaagtctggaatttatttgattgtaatgtgctagttttggttttttagtgttgatgaatgtactatggttatataagatattaacatttgtagagaatgggtgaggggtattcaggacctctctgtagtatttttgcatcttttctgtacatacaatgttattccacaataaaatgtttattaaaatgtacatagactaaatatcaaataaaaatcatatactatcagtctggattaagaaaacaagcctctggccaggtatgcctgtaatcctagaactttgggaggctgaggcaagaggattgcttgagatcagcctggcttaaacaataaaaatcagccaggcatggtggtgtgccactgcagttctagccaattgggaagctgacgtgagaggactgcttgggcccaggagttcgaggctgcagtgagctaccgtggtgccattgcacaccagcctgggtgacagaggaagaccctgtctcaaaaaataaagaaagaaaaagaaaaaagagaaaacaagtttcaactaccaactgttcaaaagaatacactttaaaaataagaataggcttaaagtaaaagaatggaaaaataagcaaacactaatcatgagaaatacagtattactatattgaggaaaaagcagccttctagatgaagagtattatcagaagtaaagaagctaatttcttaataattaaacaataatctaatcaggaaaacataacagtcctaaacatggatctatttaaaaacaaaacctcatatgaagcaaaaattggcagaactgaaaggatagagaaatctataattatagttggagatcttaatacatttctctcagtatttgatagaacatatataaaaacatacaatatttgaacgctattttcaaacttgacataattgatatttctaaaacagtacacccaacaaatgcagaatgaatttttcaagtacacatggatcattcaccaaaatagaccatatgcttggtcataatgtgagtctcaaaacaaccaaaggattaaaatgatacagaattcgttctcttacaataatggaatttagaaatgaaaaacaaaggatatctagaaaaatcaactatttgggaattaagcaacaaaatcctgaaagagcataggtcaaagaagaaatcaccagggaatttagaaaatattgtatactgatggtaatgataatgataacttaccaatatgactgggtgcagtggctcacgcctgtaatcctagcactttgggaaactgaggcaggcagatcacttgggcccaggagttcaagaccagcctgggccacacggtgaaatcccgtctctaccaaaaatacaaaaattagctgggcgtgatggcatgagactgtaatctcagctacttggaaggctgaggtgggacgatgattttattctgggagttgaaggttgcagtgagccaagatcatgccgttgcactccagcctgggtaacagagccagaccctgtctcaaaacatcaaaaaccaaacaaacaaacccagaaacttagtagtatttgtggatgcagctagagcaatgactgagcaaaatctatagctttaccatattttattttgtagtataatttgtataccttggatgcatatattagaagaaaggttaaaatcaatttagtaaatgtccatctcaagaagtgagcaaaagaagagcaaatgaaaccctaagaaagtagacaagtaaataataaatataaggacaacagaatagaaaacaaataatagacaaaatgaacaaaaccaaaagttggttttttgaaaagattaataaattaacctttagcaatataatcaagaataaaatagaggagcaaaattatcaatatcagaaatgaaaaagggacattgttacagatcctacaggcattaaaaagataatatgatatgccaggaatggtggctcacacctgtaatcccagtactttgagaggctgaggcaagaggatcacttgagctcaggagtttgagaccatcctgggcaacacagggaggccctatctctacaaaaaaattaattaaaaaaattagccaggcatggtggcacacacctgttgtcccagctacttgggaagttgagtcgggaggattgcttgagcccaggagttggaggctgcagggagctacaatagtgccactgcactccagcctgggtgacagagcaagaccctttctcaataataataataataataggttattatgaaaaactttaggcccataaattggaaaatttagaagacagaaaatttttgtaaaacacaagttactaaaactgacaaagaaaaaatagaaaatatgaatagtcctatatctgttaaagaaatgcaattggtaatcaaaagctttctccagagcaaactttaggtctagatggctgcgttggtaaattctaccatacatttaaggaagaaatgataccaatcttacacaaggtctttagagaataaacagtgagaaaccatctaccaacttgttttgtgaacctagcataactctgatatcgcaaccttaaaagtacattacaagaaaataaaattacagataaatatcccttatgaacttaggtataaaagtcccaaaagaaaaaaggaagtcctggctgggcacggtggcttatgcctgtaatcccagcatattgggaagccaaggcgggtggatcacttgaggtcaggagtttgagaccagcctggccaacgtggtgaaactccatctctactaaaaatacaaaaattagctgggcgtggtggcttgcacctgtaatcccagctactcgggaggcagaaacacaagaattgcttgaacctaggaggcaaaggttgcagtgagccaagatgatgcccttgcactccagcctgggtgacagatcaagactctgtcttaaaaacctaaaaaaacagaaatccaataaaatttgaaaaggatagtatatcatgaccaagtaaggtttattccaggaatataggcttgatttaacatctggagtcagtctatatcattcactgttatcagaataaaggagaaaaatataaatataagcatcttaataaatgcaggaaaggtgatgaaattcaatgtctattcacgatttttaaaaactcagccaactagaaatagatgggaaattttcagtctgataaaagatgtctttaaaaatctttatctaacatcatgatagtgaaatattaaaatcgttgcccctaaaaagcctagaacaagatgatgtccacgttcacccagttttattcaacattataatgaaggtcttagccattgaattaagattttaaaaggcaacaaaaggcacaggattgaaaaggcacaagtacagcatctttatttgcagatgacatgattatttacatagaaaattaaaagataataaaggtatataggccgggtgcagtgactctcacctgtaatcccagcactttgagggaccgaggtgggaggatcttgaggtcaggagatcaagaccatcctggccaacatggtgaaaccctgtctctactaaaaacataaaaattagctgggcatggggggcgcatgtctgtaatcccagctactcgggaggctgaggcaggagaatcgcttgaacccgggaggtggaggttgcagtgagccaagatcgtgccactgcactccagtctggtgacagagactctgtctcaaaaaaaataataataaagatatataactcagtatgaataagttaatatagcaagattataaaataagatcaatctatatttttatttctacatagtaattctaaaaatttggaaaataatattaaaaatcacactgtttaccattgtataaaccccaagtacctaataatgaatttcctaaaagatgtacaagaattttaaattattgctgagataaagaagataaaatatttcttctttataggagaaatttcaagcctggtgagacacactgtcttaatggtttgtctttgaacagacaaatcatcttaatggttttgaagattaaatattataaacatatcaattctccccaaattggtcatagattcaacacactcttagtaaaactcccagc

SEQ ID NO: 97014 - DNA, 23241 bp, Homo sapiens
tgtgtttttagtagagacggggtttcccatgttggccaggcaggtctcgaactcctgacctcgtgacctgtgcacctcggcctcccaatgtggtgggattacaggcgtgagccaccacactggctttatttccctcttgaataaaaaagacttttttttttgagatggagtctcactctgtcacccagactggagtgcagtggcgtgatctccactcattgcaagctctgcctcccgggttcacaccattctcctgcctcagcctcctgagtagctgggactacaggcaccagccaccacgcccggctaatttttttgtatttttagtagagacggggttcactatgttggcgaggatggtctcgaactcctgacctcgtgatccgcccgcctcggcctcccaaagtgctgggattacaggcttgagccaccgagcccggctgacatttttattttaaaagaaaacagtcgttttcatttaggttttaattgcacagtggtttttgttttgttttgttttttaaatgaaagtcctcaatgcaaaattgtatgtttaaaaattattggatagatagagcttcatactgttataagaatttgggctgggtgcagtggctcacgcctgcaatcctaacactttgggaggccgaggcgggtggatcacctgaggtcacaagttcaagaccagcctggccaacgtggtgaaatcccatctctactaaaaatacaaaaattagccaggcgtgatggtgggcgcctgtaatcccagctactcgggaggctgaggcaggagaatcgcttgaacccgggaggcggaggttgcagtgagccgagatcgtgccattgcactccagcctgggcgacagagcgatacttcgtctgggaaaaaaaaaaaaaaaagaatttgtacaatagtcccctgtgcagtctgcccagctctaaaggatgtgttctcagaagtgccattcaccatcacctccaagtctgatagcatgctccatatggaaaaccagaatgtgatctgtatcatccagtgctcaacattctggttgcactgttcgtggattctcatgacaatagccacatttactctgccaaaagctgattcaatgctttcaaagcaggcagcaacattgctatggtgcacaagctgtatctatccttagatgtctcagcacatgttacatttattgtggcacaaacatggtgtcacaaagtgttagtaggaatttgaaatactgacttaacagggccagctgtgccagtgatggtccaagtgcatatgactgcaaaagaggctcaaatgagcaggcttaatacaagtgctatatttcttcaagctttgattccacgttgattcttatacctgaagtcatcaatgagatccccaagttccatgaagtgtatgaccaactcaaagtgaagacaggggctgggcacggtggctcatgcctgtaatcccagcactttgggagcctgaggcaggcggatcagttgaggtcaggaatttgagaccagtctggtcaacatggcgaaaccctgtctctaccaaaaaatacaaaaattagccgggcatggtgacacatgcctgtaatccaagctattcaagaggctgaagcaggcaaattgcttgaacccaggaagcagaagttgcagtgagccaagatcgcgccactgcactccagcctgggcaacagaatgagactctgtctcaaaaaaaaaaaaaaaaaaaagtaaagacagggacctggtttccgtatgttaactgtagcactccttgttgcatcaacaacatttccaaagctggcctctgcagccctgtgtcactcatcagaaacaattcctacaatgaagaactatcggccaggcacggtggctcacgcctgtaatcccagcactttgggaggcagaggtgggcggatcacctgaggtcgggagttcaagaccagcctgacccacatggagaaaccccatctctactaaaaatacaaaattagccaggcttggtggcacatgcctataatcccagctatttgggaaggctgaggcaggagaatcgcttgaacctgggaggtggaggttgcggtgagccgagatcatgccatgccattgcactccagcctgggcaacaagagcaaaactccgtctcaaaaataaaaaaaaaaaaagaactatcatgctagcaaacccataactagaggactgtctgacagcaagctctgtaaagcgtttaggaaaaggctcctgaggtccaaaggaaccatcttcactcaagaacagcatcatatccttgagtcatctagaattacaagggagattctggaacaggtgtatagaaagtcaaccaaaaggacaagacttgagtctgacctgtccatggaagatgttcattaaaaaaaaattgttggatacagttttctgccgtctgcataataagaaaatataaactgatcctgagtgcatgctttatgaagagctagacattgtgcttagtgttttatttatactttctcacataatcctccaacaatcctaattcatcagtgttgttatccttgaattatacataaagaaaccaaagctcagagaggtgaaatgactcctggatggtagatttaagatttcaaaccatggtgcaatacctttattttttattttatttttttgagacagagttttaccgttgtcacccaggctgtagtgcaatggtgcgatctcggctcactgcaccctccgcctcccaggttcaagcaattctcctgcctcagcctccctagtagctgggattacaggcgcctgccactaccctcagctaattttttttttttttttgtatttttagtagagacagggtttcaccaagttggccaggctggtctcaaactcctgacctcagatgatccacctgcctcggcctcccaaagtgctgggattacagggattacagccaccatgcccggctgatgcaatacctttaaaggaaaagcaggtctatctgactttgtgatatctaagcaaaatgccacttcaacagcatcacttaggatacagggccttgagcagcagatagcctactgcatgcttaggcttccctaattctctatatctattatttattttagaaatcatttatatgtaggctgggcgtggtggctcatgcctgtaatcccagcactttgggaggccgacgaaggtggatcacctgaggtcgggagttcaagactagcctgaccaacatggagaaaccccatctctaataaaaatacaaaaaaaaaattagccaggcgtgctggcacatgcctgtaatcccagctactcgtgaggctgaggcaggagaatcgcctgaacccgggaggcggaggttgcggtgagccaagatggcgccattgcactccagcctgggcaacaagagcgaaactccgtctggaaaaaaaaaatcatttacatgtattcataggagagctcagacagactttaacctgttttcagagcggtatagtgaagagataatgaagtctggaatcagctggttagggtctaccttttaatcggctttgttaccttgaacatcagatttctgattttttattttcaaatgagaaacttcttcctggcttccttccacagggtttgtgagggtccagtaaggtaatagctataaaagcatctttataggttataaaattctctactggggtaaataactgttagtaatggtttcttcccagttaatgctaatactggtagtaatctgactcttcagccactttttttttttttttttttgagacagggtctcactctgtcacccaggcttgagtgcaagagtgcaatcactgctcactacagccttgacctccctcggctcaggtgatcctcccacttcagcctcccaagtagctgggattacaggcacatgccaccatgcctaatttttctattttttgcagagacagggtttcactgtgttggccaggctggtctcgaactcctggccccaagcaatacgcccgccttaggctcccaaagtgctgggattaacagatgtgagccaccacacccagccactgagccacattttttctttttaataaaaagcatttactggccgggcacagtggctcacacctgtaatcccaacactttgggaggctgaggcaggtagatcatctgaggtcaggagtttgagaccagcctgaccaacatggtgaaaccccatctctggtaaaaaaaaaaaaaaattagctgtgtgtggtggtgtgcgcctgtagtcccagctacctgagaagctgaggcagaattgcttgaacccgggaggcagaggttgcagtgagccgagatcgagccactgcactccagccagagcaacagaacaagactgtctcaaaaaaaagagcatttactgcatgccagattgtaagtattccctgaaatgagaataaagttgttcatattccactaccttagcaaagcagatagtgactttttttgtagatccttcttgtcctcaaacatacatttttccatagttgcaattaaagaaaaatgtgggccaggcagggtggctcatgtctgtaatcccagcactttgggaggccgaggtgggcagatcacttgaggtcaggagttggagaccagcctgaccaacatgctgaaaccccgtctctactaaaaaatacaaaaaatagccaggtgtggtagcgggcacctgtaatcccagctacttgggaggctgaggcaggagaatcacttgaacccgggaggcagaggtcacagtgagccaagatcgtgccattgcactccagtctgggcattaacagagaaactctgtcttaaaaaaaaaaagtaagaaaaggaaggaaggaagggagggagggagggtattttgtttttcccctcaatttattgtatgtgttttcatgttgcttgtgttcataattagcatttaaatgactgcataataggccgggcatggtggctcatgcgtataatcccagcactttgggaggccgaggtgggtagatcacctgtcagttcgagaccagcctggccaacatggtgaaaccccgtgtctacaaaaaatacacaaattagccaggcgtggtgacgtgagcctgtagtcccaactacaccagaggctgaggctggaggatagcttgagcccaggagttcaagcccaggagttcgaggctgcagtgagccatgatcatgccattgcattccagcctgggcgacagtaagaccttgtctcaggctgggcgaggtggctcacacctgtaatcccagcactttgggaggccgaggcgggcggattgcctgaagtcaggagttcgagaccagtctggccaacatggtgaaacaccatctcaactaaaaatacaaaaaaattagccgggcgtggtggtgtgcgcctgtaattccagctactcgggaggttgaggcaggagaatagcttgaacctgggaggcggaggttgcagtgagccgagatcacaccactgcactccagcctgggcgacagagcaagactccgtctcaaaaaaacaaaaaacaagaaaaaaccttgtctcaaaaaacaacacaaaaacacaaatttccttctgaaagggactgttccagtttgcagtgtgcccagctatttatgaccatattattttttagactccgtctaaaaaaaaaaaagacttgtatttaatgtgatttaatcgactgtgcccatctcactgcggacactgagtgcgcaacctgagcctggagcagttgagggagacggcaagaccccacgcgccgtgtaacgaccataacgcgcgtgcactacaacctcgccgccggcgtccaggcttctgtgttctatagcgtgggagtagagagcaaacgccggcgaggacgtgacgttgcacaggcctatcatagtgcccgagaattcgtgggtgctcaagaggatgggtgtggcctggcagcgcaggcgcactagaggcctgtagggtcggggcgcctgcgcagtcgctcttcctcaggcggcggccatggcgggacaggaggatccggtgcagcgggagattcaccaggactgggctaaccgggagtacattgagataatcaccagcagcatcaagaaaatcgcagactttctcaactcgttcggtcagcgggccagcaaggggaggcggggaggagggaggccgctgaggtggttgggctggggcgccggggagatgctttgagaggactcccgcagccttcggctgttgcgggttttcacttcctccttcaggtcccaccttctccctcccgccctgaccctcaggctcccgtagacagtctctgtagggttatcctgccctacgctgagctcatggcttcctgccatccctctggatccattctacaagtccttctcctagacgcgtcaggcagccccatcctcgctccgtggttcttctcctaagtggtctccctgcctcctttgtactctgcatccattccggtccccactttgcactcaaagtgagcatccgggaccgtgtcactcctctgtttcaagactgttgaccgttccccatcttcaggatctggtcgataccctctagcgtcgtgccttttagttggacccgttgtcaaccactcccgtcttgtccattccttcctgtttcctgtgtctgctgcggtgagagtggtgggagatgaggtcagagggatgccaggatcttgtaggaccttggaagtcctctctgtattgctagtatatatagcttatggtaggtgttctgtctgcttctagcccattcctcagagctaacacaggtcgggtgccttcagcagaaagatatctttaccagaatctttcctaggcatggcctgcttgtgacagccttaaattcttccttatgaacagcaagcaaagcaatcgagattcctaccccttcttctccaagtgtttaacagaacttggcactggttagactttcttgtgtaattacaggatatagggactagtgtactttggaaagatttttaaatgaatgattctctaactaaaggactgatggccttaggagtacaaaggtgacagagcaagagattgtcagaaagcatcagcgagagatgctagagctccatatgaggccctctcttaaggcatagtgggagacacagaataagaaccacttcctacattcaaagaagttctaatcttgaagatgaaataatgacaacttcaggacaaagaagagcatcatttttgtattaaagtattttcatacagggtgtttaggactataatcgtggctgagttcaatggcttatgtctgtaatcccagcactttgggaggccaaggtgggaggattgcttgagcccaggagttcaagaccagcctgagcaacatgaccagatcctatctctacaaaacaacgacaacaaaaaaattagttgggcatggtcatgcacacctgttgtcccagctactcgggaggctgagacaggaggatcacttgagccctgaaggcagtgagccatgttcatgccactgcactccagcctaggcgactgactgaaaattgaaaagcctaagcttaggatttgcaaaggagaaatgtcccttttcttgctttataggcaaggagatatcagcttggatatttttatgtctaatttgtaagagtcacattttatgatcagatagagagtaaagactttatttgggcttttcaacaaattcttttttttttttttttttttgagacagggtctcactctagcccaggctggagtgcagtggcgtgatctcagctcactgcaacctcttcctcctggattcaaatgattctcatgcccccgcctcctgagtagctaggattacaggtgtgcaccaccacacctggctgatttttgtgcttttaaaaatagaggcaggttttggccatcttgcccaggctggtctcaaactcctgagctcaagtgatccacycgcttcggcctcccaaagtgctgggattacaggcctgagccactgtgccctgcccccaaaaattctaaactaaggaattagacatacagaagtccagtcttttggagccaaaagaaatgacttcccttagcttagatcattatcctcccttaaagtgatgataatggccaaatgtttggagtaattactaggtggtttttaaagattttagaaagtgaatttagagaaaataacaattaaatacaactaagtaagaagagaattataatgcaggattaacagtcaaaggaatttgacttagcagttaggtgtacctgaggcaagttcttaaagattggcatggtggctcatgcctgtaatcccagcacttggggaggctgaggcgagcagatcacctgaggtcgagtttgagatcagcctggctaacatggtgaaaccctgtctctactaaaaatacaaaattagctgggcatggtgttgcacacctgtaatcccagctactcaggaggctgaggcaggagaattgcttgaaccggggaggcagaggttgcagtgagcagggatcgtgccactgcactgcagcttgggcaaaagacgagactctgtctccaaaaaaaaaaaaaaaaaagattgacactatcacaatgcaagagtttagaaaaagaccccaccggctgcgaaactggataaattaaattataaggatagacttgagtatgttgtcttggtattgaatgagtcaggatgactatgtatgggatgtttttttcccatcctaagccattagtaggcttgtacaattgtcccttgaacaatacatgtttgaagtgcatggatccatttacaggtagatttttttttttgagacagattttcattctgtcacctaggctgaagtgcagtggcatgatctcggctcactgcaacctccatctcccaggttcaagtgattttcttggcttagcttcctgagtagctgggactacaggtgtgtgccaccatgcccggctaatatttgtatttttagtagagacaggattcgccatgttggccatgctgctcttgaactcctggcctcaagtgatccacctctgttcaacctcccaaagtgctgggattacaggcatgagccactgtgcctggccataagtggatttattgcgataaaagttatacagtatgcctacctctcctgcctccccttccacctctgccacccatgaggtagcaaaaccaacctctcttcttccccttcttcctcagcctactcagcaggaagacaatgaggatgaagacctttatgatgatccactgccatttaatgaatagtaaatatatttccttttcctaatggttttttttgtttgtttgttttgtttgtttttttgagacggagtcttgttctgttgcctggagtgcagtggtgcgatctcggctcactgcaagctctgcactcgcgccactgcactcctgcctgggcgaaagagcaagactccatctcaaaaaaaaaaaaaaaaaagaatttactttgaggccaggcacagtggctcatgcctataatcccagcactttgggaggccgaggcaggtgaatcacttgagctcaggagtttgagaccagcctggccaatatggcgaaaccccatctctataaaaaatacaaaaattagccaggcatggtgtctcatgcctgtaattccaagctacctgggaggctgaggcatgagaatcacttgaaccctggaggcaaaggttgcagtgagccaagatygtgccactgtactccagcctgggtgacagagtgagactctctctcaaagaaaaagaatttactttgagggagcatctgaagttcttcaaatatgttagcaattctgtagtccttaccctgaccacagagaatctgcatgggccatgtattttggagagagaactgttgttctaagatagtgaatgactttctgaaaagcatttaccttgtgattcctgctggtgagagtagagtcacagtctcccacgtgaacttgaggacatacaaatcgtaatgtagcaaaaatatcataacactaggcctattttgcactttggaattggtgaagtttctaaaaatagatggttagagattatcgctttttattcttatgctatttttttctggttctaaaggtaatatatgcagagaagtataaagacaaaatagagaatgtggctgtttttttaaaatcttggtttttgtactgagccaacaaatgtagcatgcctggtgtgtgtcagatgctgtgagaaaggaataaatatgaataaatgggtatgatacccactcctaagacattcagaattttgctggaaaagtaagacttaactacaaaaacattccaaaagaaagacagtttttkttttttttttgagacagagtctcattctgtcgcccaggctggagtgcagtggtgcaatctcggctcactgcaacctccgcctcccgggttcaagcgattcttctgcctcagcctcctgagtagctgggactacaggcatgcgccaccacgcctggctaattctttttttttttttaagatggagtcttgctgtgttgcccaggcttgagtacagtggtgcaatcttgactcactgcaacctctgcctcttgggttcaactgattctcctgcctcagcctcccaaatagctgggattacaggcacacacaaccatgcccagctactttttgtattagtagtagagatggggttttgccatgttagccaggctggtctcaaactcctgacctcaagtgatctgcccacctcagcctcccaaagtgctgggattacaggtgtgaaccaccgtgcccggcctgacagtattgatttttgtaatgctgaagttatatgcattaagttcagagaaggagctgtctgataacagcattkgtttcctaacgagaactggtattttcagttaaaggctggtgataatgtacacatacttgtgctctggtttcagatttatccagctgctgaatgctttctcagtgttttttatttgaaccagcgtatacttattaggatttgaaatatgaccaaggtttctgcagttgaacattttctatttctcaacagtgtttatccatgtaggccaggagcatagtattgttcttgaattctaattcattaccagattgacagctagaacagaatagccacccaggaaggaaacttccctctctcctacctcccccaataattttcgtatgtcttcatgggaaatggcaggttgtcagagataatattcatgctcttactcagtagcatacataacgtgctttcagacttccaaaaaccagactgaaaagaggcttggtcctgttgggcagttccgacagaaagtggcagtacatccaggaaaagggggatgctgaagtgatcatacttaagctagacctgggaattcaagcagcacaagcgtaaaaagaatgaagaatgtccagaaatggcaaatccatagagacaaagattagtggttcccagggactgaggggtgacagaatggggagtgacaggactaagaggtataaggtatcttttggggatgatgaaaatattctaaaagtagattataattattgcacaactctgtaagtatactaaaaaccactgaattgtatactttaagcaggtgaaagaatggaaagtggcagagttgggctggagacctggggtataaattatagccccggaggcacagaaagatgatagtagtgtgcattgggatgcacacagtatgggaaagaataccagtgacccaacatgggccctcagcttacctagacctcagttttcccacttgtaaggtgaatagagttacactagagtcaatcttttgttccactaatataccagaatccatcttttttttttcagtcaacatctatgtaccaggcaagatgctaaggttacaagaggcaatatgtacttcttttgattaacttgttctaacggtgaaacagacatgtaaataaattgtaaattacaagtacataaatatcatttggtttcgtaacatgaatattttcctatttcattaaatattcctcaaactttttttttttttaagacagagtttcactcttgttgtccaggctggagtgcaatggtgcaatctcggctcactgcctcaggtgatccacccacctcggcttcccaaagtgctgggattacaggcgtgagcctctgcacccggccactttttttttttttttttttttttttgagatggagtctcgctctgttgcccaggctggagtgcagtggtgcagtcttgactctctgcaacctccgcctcctgggtttaaaccattctcctgcctcagcctccagagtagctgggattacaggtgtgcgccaccatgcttagctaattttgtatttttagtagagacaggatttcttttttttttgtatttttagtaggtatggggtttctccatgttggtcaggtttgtcttgaactccgacctcaggtgatccgcccgcctcggcctcccaaagtgctggaattacaggcatgagccaccgcgcctggccacttgtaactttcaatggctattttaatagtctcattaatacgctatatcaaaccattccaatcatgggcatttggttttgttgctttttcaccatcttaaatagtagtgatgcacattcttatttgtaaaatctttatccaaagagggaagtcataaccaaagaccaagtacatgaataacttacaaattagaaattcagaggctggcacggtgcctcacgcctgtaatcctaggactttgagaggccaaggcaggtggattgcttgagttcaggagtttgagatcagcctgggcaacaaagtgagacccccatatctaccaaaacaaaaaacaaaaaaattagccaggcmcagtggcatccacctactgagtagtaattgcagctactcgggaggctgaggtggaaggatcacttgaacctaggagttggagggtgcagtaagctatgattgcaacactgaactctagcctgggtgacagagcaagaccatgtctcttttaaaaaaaaaaattcatccgtaaatgtttagataaatacagaagaggaagaattattatgtccatctggcaagacctctcagagatagaatttgaacttagccttgaaggagataggcaggcaagatgagtaagatttggacataataagatgaaagttgaggcaagatcagggtgtaggaagatttgtcaaaatggatgctgaagcgcttttgcaaaacagccagggaatagatgaaaaggaaacttgttagctaagtgttaaatcattgcgtgggagagtctcagcgaatatttcagacttgaaaactgaagkttattgagagatgactgaacaacaatgttggaggagagagtagaagataatgaccatgctaagataccttttctctcatatgttgagaatagttggaaaaagaatagttcctgttacagaagtttgcagagaaaaagttgttttaaattaaatctggtttcattttgaatgagatggtaaaagaagattggaaaagctagaggaagaagaataattttggctgttttcacagatggaatgtgggctttatcgggtatttgatgctctccaacttttctctagttctgaaaggcctttgcctctaggagcaacagtagtgacatggctttaatgagctcagaactctcacaccttccctccccataatttctgctgctttcttggcctctactttctttcctttttttttttttttgagacggagtctcactctgtttcccaggctggagtgcagtggtgcaatctcggctcactgctacctccatctcctgggttcaagcagttctctgcctcagcctcccgaatagctggrattacaggcgcccgccaccacacccggctaatttttgtatttttagtagagacrgggtttcaccgtcttggccaggctggtccygaactcytgacctcgtgatccactgccttggcctcacaaagtgctrggattacaggcmtgagccaccgtgcctggcctttttttttttttttttttttgagatggagtctcactctgtcacccaggctgcagtgcagtggtgcaatcccagctcactgcaacctccgcctcccaggttcaagtgattctcctgcctcagcctcccgagtagctgggactagaggcacccgccaccacacccagctaattttgtatttttagtagagatggggtttcaccatgttagccaggctggtctcaaacttctgacctcagttgatctgcccaccttggcttcccaaagtgctgggattacaggcgtgagccatcacgcccagcctcgtttctttcctgttgagattattttcttattcttgccatgtcccctctcttgaaagtcttagttaggccattagtaaatggctgtacagccttggtgtattcatttgctattcctggcataacatattaccacacaggctgggcacagtggctcacacttgtaatctcagcactttgggaggccaaggcgggcggatcacgaggacaagagattgagacaatcctggccaacatggtgaaaccccgtctctactaaaaatacaaaaaaaaaaaattagctgggcatggtggcgcacacctgtagtcccagctacctaggaggctgaggcaggagaatcgcttgaacccgggaggcagaggtggcagtgagccaagattgcgtcactgcactccagcctggaaacagagtgagactccatctcaaaaaaaaaaaccaaaaaaacaaattaccacacattttgtggcttaaaccacatacatttattatttaccatgtgtaggtcataaatcaaacactggtcactgggctagcaatcttcacaccttggccagcagtcttcacaccttggccttctgaagtattaggattacaggcatgagtcmctgctcctggcctgggctccaatcagggtttcagcaggactgccttcctttctggaggctctaggagagggtctagttcctcgaatattgggttgttggcagaattcagtttctcgtggttgtaggactgagatctctgttttgttgctggctgtgagctgagagttgttcccagcttctaaaggtcacttacatcccttggttcatggctcccttcttccactttcaaagccaacaatggcagattgcatccccttcacacttggaatctctttttcttcttccatttcatctctgacccccttcctatgcctttctcacctacatttgtggactatgattagattgggcccaaatggacaatccaagacaaactctaggatctcaaggttcttaaccttaatcatacctgcaaagccctgtttcctcatgtataatccatattcacaggatccagggattagagaaaggacttttttttgagacagagttttgctgtttgacccaggctggagtgaagtggcgagatcttggctcactgcaacctttgccccccccggttcaagtgattttcctgcctcagcctcttaagtagctgggattacaggcatgtgccatcatgcctggctaatttttgtatttttagtaagagacagggtttcatgatgttggccaggctggtcccgaactcttgacctcaggtgatccacccgcctagtcctcccaaagtgctaggattacaggcatgagccaccgtgccctgcaggaaaggacgtttttgtggggccgttattctctacttgcaacacttgataggaagttcagcagatccactctaagcarctgtgctatgagtggatcttagcactgtatccatttccatttgtattctgtgtattattcctctttttcattgtaggtgttgtgtgtgtctgtgtctgtgtttggagtgacattaatcctgaacaccagtctctttttctcagatatgtcttgtcgttcaagacttgcaacactaaacgagaaattgacagcccttgaacggagaatagagtacattgaagctcgggtgagtttgatgggcaagggcattccagagagaatgcacatttccacttattgctgaaaaaaacctgaaagcagaaacagtcttaggaaacttaagcactggccggacatggtggctcacgcctgtaatcccagcactttgggaggccaagacaggtggatcacttgaggtcaggagttcgagtccagcctggccaacatggtgaaaccccatctctactaaaaatacaaaaattagccaggcatggtggctcacacctgttgtcccagctactcgggaggctgaggcaggagaattacttgaacctgggaggtggaggttgcagtgagccgagatcacaccactgcactccagcctgggtggcagagtgagactccatctcaaaaaaacaaaagaagagaaaagttaagcatgttgcctggatttgaaccatgtttctgtgacttcacagctatcttcttttctgctatttctcactgcctaggatctaaagatttttttttagacccctctaatcttttttaatttatctaaatgtcagttttcctttcctttcacaggtgacaaaaggtgagacactcacctagaacagtgccgtgctgctgctgggaagttgctttacacaacacaggccacatgggaaaggccccagcagccttcagctccttcctttctccttaaagagcaacagggcttattcttgtttttcttttttcaaaagtgtggcctttgggctctgccatctggggtgtggtgtggtatgtgggaagaagttcagaggaaccgttggaaacgacgttaggcattttaccttttcagtaacattttatacatctacttgtcaatgtatttgagacattcacagccaaaagcctgggactctttgtgaaggtcctccycacctctatctttctttctctctctctcaaactttccttaaagttctcattgcctttgcactgcttctgtgaacagtctttgtctcctccccacctttggtgggaagtgcggggcagtcctggtcaagacactcatgccctggcaatgtggctgccagagaatgttgttgctaacccaccagtttcttgttgatttggagaggtcaaggccaggcccccacttggcttgaagggacattttcagacttttctttctgtcacttggagtgtctatgcctctcatatttccctaataaactcctcaactttttatctgactgctgtgattatggtggggagaggagctagagatgggttcacttattgcacagaaatgtaatacatggcgttattattctaacataaaactttcagatgtagctgtttgattcaaagcctaggtggcttaccagcccaagtccccatgtttggactttcagctgactagctcatcttgggaatcatttggtcattcagcacatttaccaagtatttactatgtaggcatgttaaactccaataaaacatacagcattgaatcagacatgatgcttacagtcttttgaaataccagcattcacacaatttagccacaatccaaggaagattattagttttataaggcacaagctaagtgtctactctttgaaaagcagatagccgggttcagtggctcaggcctgtaatcccagcactttgggaggctgaggcgggtggatcacaaggtcaggagatcgagaccatcctggctaacacggtgaaaccccagctctactaaaaaaagatacaaaaaaaattagctgggagtggtggtgggcacctgtagtcccagctactcgggaggctgaggcaggagaatggcctgaacccgggaggcggagcttgcagtgagctgagatcgcgccactgcactccagcctgggcgacagagtgagactccatctcaaaaaaaaaaaaaagtctacctcaagccaaatttccccctgaaagttctcctggacttgactttttcatttagtattgcccttttcctcttctcagttcctcccaatcctaccatgctgacactgtgcttcagctctggatttgatcttgatatggatttatctctgatttagcatgtgcatcctagaatagaaacgaacatctttggccaggtgcagtggctcatgcctgtaatcccatcactttggctgggtggatcacttgaggtcaggagttcaagaccagcctggccaacatggcgaaacccggtctctactaaaaatacaaaaattagctgggtatggtcgcaggcacctgtaatcccagccactcaggaggctgaggtaagagaattgcttgaacctgcagagattgcagtgagccgagatcacgccaccgcactccagcctgctgggcgacaaagcgagactgtctcaaaaaaaaagaagtagttctaaagttcaagttttaggttatctggtgccgtcagtttaaaagacacatggatttaatagcagacaggtgcttaaaaaaaaagcattgagttcctgctatatgcaaggaccagcatgatatagtaatagtggcaaaagtgatggtatactaggcagaaaaagctcttctttttatgacattacatgtgaaaatgctcagtacgttttttattggcttctagatattaattggctgggcacagtggctcatgcctgtaatcccagcattttgggaggctgaggcaggtggatcacttgaggtcaggagtttgataccagcctgaccaacatggtgaaaacccatctctactaaaaatacaagaaaaattagccaggcatggtggtgcctgcctgtaatcccagctgcttaaggggctgaggtaggagaatcacttgaacacaggaggcagagtttgcagtgagccaagatcgcaccactgcactccagactgggcaacaagagcaaaactccatctcaaaaaaaaaaaaatcttaatttattgttattaaaataatatgctctaaacgagttagtgcccttaatagtaccatactgctaggtgtggtggtgtgcgcctgtaatcccagttactcaggaggctgaggtgggaggacagcttgagcctaggaggtcagcacaagcctcagcaacataatgagacccgtctttattttttttttttaatttttctatttttttagttagcttttttttttttttttttgagacagagccttgctctgctgccaggctggagtgctgtggcacaattgcggctcactgcaacctccgcctcccgggttcaagtgattctcctgcctcagccttccaagtagctgggactacaggcacacgccgccacgcccggccaattttttgtatttttagtagagacggggtttcactgtattagccaggatggtcttgatctcctgacctcgtgatctgcctgcctcagcctcccaaagtgctgggattacaggtgtaagccaccgcgcccggcagctctttttttctttttatgtccagccaactcatcataatttttttaattataatttttttaatctacctttttttttgagacagagttcgagaccaacctgggcaatgtggcaagacccctatctccactaaaaatacaaaaattaactgggcatggtggcatgcacctgtagtcccagctactcaggatgctgaagtaggattgctcaagcaattcgcctaggaggtggaagctgcagtgagctgggattgcaccactgcactccatcccgggcaacagagtgcgaccttgtcttaaaaaaaaaaaatcttgagtggaaaatgagctaaattttaaattttcctctaagccattcataggcaccttcaagggaacctcttcatgcctgtatactttgaaatgttttttaccctataatttggtttaattcacttatttactgaaaagctgaaaagtaagaggtttgaacccatgagctattaggcatagattgcaagtcccttgataataaagcagttttcagtctgtctttaaaaattaagcttgggccgggcgctgtggctcacgcctgtaatcccagcactttgggaggccaaggcgggcggatcacgaggtcaagagatcgagaccatcctggccaacatggttaaagtggatttcagaagcaggaaaaaatagggagcttattgtctggctgatcgttacagaagtacccagttctgtcattccactcttgctactcagacctttaactacccatgtttatttcaccaagctaaagaagtatactacaggttgatgatccccactccgaaaatctgaaatgcttcaaaatctaaaactttttgagcactgacatggcactcaaaggaaatgctcattggagcattttgtatttcggattagggatgctcaatgagtacgtatataaggttgttccaaaagtatttcagatttccaaatgctgaaaaaatcccaaatccaaaacacctctggtcccaagcatttcagataatactcagcccgtactataagccacactaagtagagtacaggccaggcgtggtgactcacacctatagtcctagcactttgggaggctgaggcaggaggattgcttgagcccaggaatttgagaccagcctgggcaacatagtgcgacccccctctataaaagcagtttttaaattaggagggtgtggtggcacaagcctatagtcccagctactgggaaggctgaagtaggaggatcgcttgagcccagaaggtcgaggctgcagtgagctatgatcatgccactgcattccagccttggtgacagagtgagacaccatctcaaaaacatggtgtgggggctgggtgctgaggcttatgcctcccagcactttgggaggccgtggcggatggatcacttgaggccagaagttcaacaccagcctggccaacagcaaaaccctgtctctacaataaaaagaaaaatagaaaaaataaacaaataaacatggtggtggggacaggaagcctgttgttcatctctaggctctttcccagtatttatactcagattcatgctgttgcctgcaaaaaaggttggcccccagttgcctctggataatatgatttagaaaatttgctctggcagtttgcagacaattgctgccgtaaataattgttcaaaacttcatggctgggtgcagtggctcacacctgtaatcccagcattttgggaggccaaggtgggcagatcgcttgaggtcaggagttcgagaccagcctggtcaatatggtgaaaccccatctctactaaaaatgaaaaaaaaaaaaaaattagccaggcttgatgatgtgtgcctgtaatcccagctactcgggaggctgaggcataagaatcgctcgaaccttggaggtggaatttgcagcaagttgaggtcatgccactgcactccagcctgggcaagagagctggattctgtctcaaaacaataataacagcaacaacaacaactaacatctaaaggccatatgactgtcaactagattatacaataagaaaggctgatttagagttctcaggttttgttgttgttgttgtttgttttttgtgtttttttttttgagacagggtctttctttgttacccaggctggagtgcagtggcgcaatcttggttcactgcaacctctgtctcccaggttcaagcgattctcatgcctcagcctcctgaagagctgagattacaggtatgcaccaccaggcccagctaatttttgtatttttagtagagacagggtttcaccaggttggccaggctggggtttctttatttaatttttctttatttatttgttttttttgtttttagagacagggtctcactatgctgcttaggctggtctcaaactcctgggctcaagcaatcttcccgccttggcctcccaaagtgttgggcttacaggcatgagccactgtgcccggctggtttattttctaatgaaaagttaccctggaggatcactggaggccaggagtttaagaccagcctgggcaccatagtgagacaccgtatctgctaaaaaaaaaaaaaaaaaaaaaaaaaaaaaagtaaagtcaccctgtgcactaaattggcaaaagattaggactagcaagaattaaaactcacagaacattagggtgagaaagaatcttagagataatctagtctgcccctgccattctaggaatatagaagcaaacccagacaggttgagtgacagacatgtccatcctggtggcaaagccaaaactaaaaccttattcccaggtcagtgcagagccactcagagtctcataaataagttttgtgttttctgtaccataccggccctctattagcctctccctggatctcactgataccttgagagtgcaaaaaagcaattgttcgttacatttatctaagtggtggtatccattggcatcaacatttgcatttaggacaaagttatctttggctcctttgagcttgctacgactatcaagcgtgaagtttgtattgtgcctcagctgcattttccaaccataacagtttttaaaaaaataattttattggataggtgtggtggcttatgcgtgtaatcccattactctgggaggctgagatgggaagattgcttgagcccaggagttttgaggacaaactgggcaacccagagagaccgccaccacaaaaaataaacacaattaggcgggtgtggtggtgcatgcctgtagtcccagttactcatggggctgaggtgggaggatcacctaggcccaggaggtcatggctgtagtgagccaagatcacaccactgaacttcagcctgggtgacagagcaagaccctgtctcaataaatgaataaatgaaatgaaatgtttcaattcaataaatgataaatgcttcagtgtggctttcacaaacattttgcctaagaagttgtttattagcattaaatacattgtatgtctattatgtgtgaggcactggagataaaatgagaaacagacagtttctactcttaaggagcttatagtatagtcatttattcactgtatgttctcaaagcaaaagacactagaatgacatttgcagaaaaacctcaggaaaacacaacatacacaaaggagcaatgtggtatcaacttcactgcatgataaagataccataggccaaaattgtattgtacatggaaatgatgtttgggtttttgttgctgttgttatttttgtttgtttaccattgtaaaagtaatatatcaccacata

SEQ ID NO: 97015 - DNA, 29543 bp, Homo sapiens
gggaagagttgtgggaggccaggaaggagcagcataggcgtccaaaggggaggacacattgatcctggggagtacttagagtaagttgtgaggcccactgggggtttggactgacagaagggaagggtgtatattttcctgaatgattacttctcctcctacagtgtgccctgatcttgtagacaagtatctggaggagacatcaattcgctatgtgacccccagagccctcagtgatccagaaccaaggcctccccagccctctaaaacaggtgagaagacattaactccccctgctttccatcatcaagtaaaaggacactgatcccatcacattctgggctttgccagcttaaatgaaaggatgctgtgcgcccacatcttgccccataaaaaaaaaaaatcaggcgaggtgacatttctcctaggtcctgtatttgctctcacatgtcttgtcttttttttttttttttttgagacagagtctccctctgtcgcccaggctggagtgcagtggcgcaatctcggttcactgcaagccccacttcccaggtgcacgccattctcctgcctcagcctcctgagtagctgggactacaggcgcccgccagcacgcccagctaattttttgtatttttagagacggggtttcaccgtgttagccaggatggtctcgatctcctgacctcatgatccacccgccttggcctcccaaagtgctgggattacaggcgtgagccactgcacctggtctcacatgtcttttcaagtcacatttttccactgcttttagtgctaagtctaaatgattccttcctcattccaacagaagtgtttgaatttctgcctttaccctactgtgttttcttcccttttactttctggtcagtgcctccccactatcctgtggtgtgttgccccacttcgggtcctcagatgtgtagcaagcggccagcccgagggagagccacacttgggagccagcgaaaacgccggaagtcagtgacaccagatcccaaggagaagcagacatgtggtgaggaagttcaagggttccagagatggagcagacttgaaggagaatataaagaactgctgggacactgggcagtttatgctattcagtgtgagattcactttgattgccattgcaaagtgaggctgaatggtttggtgtctggtggaagaactgctctttatgattgtggcagggtacatttcaactcttgttagttaatactacatcacagggatgttgttatgacatccttattgtaggatgagccaagtcgagtattaaaatgaacttctatgcctggtaattaggaaaatatctcctataaacaagttgctacctgtgagtaatgggaacagtgctgacctcggcatgtcccgtttaagggaacctcctgcattcaggcaaggatttcagagatacatagaaatagtcctggggaagaggtagagaagctgtcaggtgatattccctacttttttattctgttgtgcttttcagttttcaagcttggcttgtaaactcatcccttactgtaacctcttctgctctgtatcttctgtttccaacagacatcagactgcgggttcgggctgaatactgccagcatgagactgctctgcagggcaatgtcttctctaacaagcaggacccacttgagcgccagtttgagcgctttaaccaggccaacaccatcctcaagtcccgggacctgggctccatcatctgtgacatcaagttctctgagctcacctacctcgatgcattctggcgtgactacatcaatggctctttattagaggcacttaaaggtgtcttcatcacagactccctcaagcaagctgtgggccatgaagccatcaagctgctggtaaatgtagacgaggaggactatgagctgggccgacagaaactcctgaggaacttgatgctgcaagcattgccctgacctattccctcttctcactttggggactgttcccatcacccacctctggagcttacactgttctggggtttgttctctacccttccaaccaatcacacccctgcctttttttttttttttttaaagaaaaagacaaaagaaagtggaagtggtattccccacccctccctgcacccatgtgcctgggcttcccctttatttcccttttccatttaccccgtaatgtgtctctacagctaccttaccactgagccgtaagacaaatgtataggaagaagcaaagtctacagcacatagtctttgtaagggattgatgtgaacacttttttttggatgcactaaggagttatcaatacttctggctttatgagagctcttaaattttgtctaaaaaaccaaagggctgtgagtaagggagctatgtggaaagtgggactctgaagtgtattttgaaaattaatcgccaccctcttccaaattatagaattttttaaaaacaagctgtggccctttccactctctcctggcctctggtgctgctcctctctgccgcctttcctccattccatggcttgaaacctctgcctgatgtggctccttcctttttcccatttgtcaaaccctcttcaaaggaggaacagataagactgggtcagcctagtcatgcctcccaactgtggtggtatatgtgtacacacatacacagggtggatggagaagaggttgctgattaaaatacactccccctataaaggggaagggggagtgtgacactttctttccatgttcaagtgaaaataaataatgtaccctgcagcccttttcccctttgctttcttctggcttgggcaaagggcatcataggtgtaagtgaagtaattcctttttccttccccctcctccactcctacgcccactcccatgcttgggagaatggggctgggacatgcactgagtgttgcacttttatttaggtagggaggcatgttgaatgagccaggaggtctagaactggagcttagtccagctggtacaataccaactccccttctagttcccaaaggcgatgtccagacacagactttatgattattatatttttcaatgccagtgctgctcagccctcagcagaacttcagtttccatgaaataaacaatgactatataaaattccacctttctgaaactgcagtctgacctcaggtgaagctcaggtgaaagtttctttcccaagcagcccatctgtgttccatcaagagagtcaaggttctccaagtgaggggagctgtgcctggatcctgcctccaagtcacatgagcactagctcatagtggcagggtgggggtgggaggggcaggtctaaactcacagaagtcaagtcttaagacagtgggtgacccagattgccatagaggtcaggcctgcggtgctggaacacaggcaggtgtcggcgcaactgtcgcagatagttgaggtctattcgggcaaggcagaggcctggcccctcagagcagcgggccaccactgttccccaggggtctaccaccatgctgtggccataacttgctctcttctcatggtggcgtcca[450 bp omitted]tctggaatgaaaaacagcctacttagtagtcttcctgctctgtttgtcacagcatctagtcatatttccattaccccctctcttagggctttctatcctctactgccagttcaaagtattcctgttcccctccctcatcctttcacaactcctaccttgcctgctggtgtgctgacaggtgactcaagactgggcccaggcatggtagagttgctttcacacataggcccctgccctggaatctctacgtcacacagatgtgtcttcctgtaagtggccactactgcccctacagtaagaaagaaggaatatcagtgctggtgttctagaagccttgcttactcctcccaaggaggagatagtttataggctaggaactgaagtaggaccacccctaaatccttgggtcaaggaaataagagttgagaaacaattctggagaatctaggtagaagagcatgggaagaggcaggctaaagggttataaagtctcacctttgctgttcagcagcacgtgacaattgtagattttctgagtctgctcccagtcttggccacgctcatggaaaccacccaaggacagccagagtccacattccctggggggaagggacactgacaactcttcactgacttctcaaggctctaccctcatatctggcaacccagggacactgtccaacaaagattctacctctccctcgctatttccctgatacctggcaagctgggtgtattcttccaaaagtttcccacccagtggttcagacaggtgtagcgtctctgcagggtcccgtgcaatgaagtcaaatgcctcaggcaggaaagccaggcaggcacccagtctggcagcctctcgaaccagctcagcacatgttttaaagttctgttgcttgtctggcgtcgatgttacctggcacacagccaccaggggcagttcgcaggaggaagaggagatagccatggctctgggcctgtgaacagcataggcaggattctcagatttcatagcacagggaagcaaatttaatgctaaggggtgcaagtggagaggcaggaaagctggacttccttttgatcatgctcttacagggcacgttgacccagggctagtagggctcaccaatcaaatgtgtggatagttgacactcctgtgtctcccactatccatttaacaaactgagcatctaagtgccaggcactgaggacacaacaaaacgtgttacctgggctgagcacaaagtactgagagttgaggtatccggagtccaggacacagaagggacaggaatctgtgaggaggcctggtgatgaagcccagcctgaggaaggtgagatatgaggacaccaaccccttcttcaagcaataaatttctaggattctctgacttctctctttatactgtgagcctgaatcagggccctgccagtaaaaacctagtcttcaaaacgctctttataagaaattataggctaagggacaagaccatacagtgggaagatggagaaaggggctctgctcgccgcctgaatagttcaacttccaatgatctcacattaaactgaagcctctttcctctgacaaacgtttccgcagtccaaaagtcatctccgggaactatccttggttttcccaagactctctccttgactgtgcacttgcgcagctttactgactcgaagcatatttcccctttcaccagaatctcgcaggggaaagttcaccctctctcgtctcccacccctccctggtgggcaaggggcaaaggaacccaggccccaagccgcgccccgccctccaccctcccgccgcccgctccagttggcccgtccctccccgcctctcccagaggcagcatctctgttacacaagttaaagcaccgcaggtgggattcaccgcggccgacgggatagggagtaggtcctacatgaagatatagccaaaaccattcgcagggtccgatccggagggcggtctggagccagaagcgccgcagcgagtgggcggtaactcgcaggccggacgtgacgcaaggcgggggctgagctgcgccggccggaaacccagcaggcggcgaagatggcggagaacagcggtcgcgccggcaagagcagcgggagcggcgcggggaagggggcggtgtccgcagagcaggtgaggagtggctaacgcgaagcagggtacccacctgggtctggaatactagcgagaagggggagcctgtggcttgtgcaggcctttactccagcaccacatgtgcgtggcacctagagagggaagggtccccggaaaagctagccgaaccccttcggagaggtagacgggtgggtaggtgagagccacgcctccgtgaggtggtgggtgagcctgagcaaggggaaagccctgacatgtagggtctgggaagatgcacaggtctgaggggagatggtttgctgctttctctatctctcctcagcctctccaaacaggttatggctgggcaagacagctcgaaactaaccctagagaattagttaacgggctggctgtgtagtctgttacgtgatcctgaacccacgttgacaatcgccgtcacgctgcagagccacgtgactctcatactcgaacagcctagtgttctatatactattttaattcgggagttcattactagatcgaatttctttagagaccagaaacccctttctaatccgagtttgcattttccccagtgcctagcatcgggaagcgtttgataagttaattagaaaaccctttgtggcttgggaaccgtgttttgctaagtggaaaaataggagtgggaggaaagctacacaatagaaatgaaaacagttaacagctactttattattatcgtttttttttgagacggagtctcgctctgtcgcccaggctggagtgcatgcagtggcgcgatctcgccttactgcaatccgcctcgtggttcattcaagctattcttctgcctcagcctcccgagtagctgggactacaggcgcgcgccgccacacctggctaatttttgtatttttagtagagacggggtttcaccatattggccaggctggtctccaactcctgacctaatgatccgcacgcctcggcctcccaaagtactgggattacaggcgtgagccaccgctcccggcctacagctgtcttaattataggttcagtttttgttgaacaattaatacaagcagatgtatcagcataaagatttttatttttattgttttttgagacagagtttcgctctgtcatccaggctggagtacagttgcgggatgtcggctcaccacagcctccacctcccgggttcaagcatttctgccttagcctcccgagtagctgggattacatgcccgcaccaccacgcccagttaatttttgtagaggcaggatttcaccatgttgcccatgctggtctcgaagagcatagtctagtggggtaaataagagaagcaaaatgctcatatgaggcagaagataagtgtcctaagagaagtataaagtgctatggaatatggtttctgacttggggtgggggaagggaaaaggaacctaatgctttttaatacttttttgttgttgagacggagtctctgttgccgaggctggagtgcagtggcgtgatctcggctgactgcaacctctgcctcccaggttcaagagattctggtgcctcagcctcccgagtagctgggattacaggtgcaccaccatacctggctaattgttgtctttttggtagagacggggtttcaccatgttggccaagctggtctcgaactcctgacctcaagtgatccgcctgccttggcctcccagagtggtgggattacaggcatgagccacagtacttttttttttagagacagagtttcacttcgttgctcaggctgagtgcaatggcgtgatgatagcccgctgcagccttgaaatccctgggtgatcaagccatcctcctgactcagcctcctgagtagctgggactataggcataagccatttgaatggctaattaaaaattgtttttttggtagagatgggagtctcactttcttgctctggctggtcttgaactcctggcctcaggtgatccacctgccttggtctcccaaagtgttgggattgcaggtgtgagccaccttgcctggctccccctaataatttttaaggctaccatgggccaagcactctgctgggtacagcgatacagatactgtagctcccccttatctgagggggacatattccaagaccccagtagatgcctgaaacctgggatagtattgaactctatgttttttctcatacctatgataaagtctaatttatataataggtgcagtaactaatagaacagttatgacaatgtaataaaggttacatgaatgtggtctctctttttcaaaatatctgattgtactgtactcacccttcttgtgatgatgtgagatgataaactgccttcctgatgaggtaaggtgaatgacagcattgtgatatagccttaggccactattgatgataagtcagaaggagaatcatctgctttaggtgatctcagatcattgagccacgacaatgttgagcagatgttgatgactaaagggcaggtagcatatacagcatggataggctgggcaaaaggatgattcacatcctgagcgggatggctagagatttcatcacgctattcacaacagtgtgaaacttaaaacttatgaattgttggccaggtgccgtggctcacgcctgtaatcccagcactttgggataccgaggtgggtggatcatctgaggtcaggagttcgagaccagcttggccaacatggcgaaaccccatcgctactaaaaataaaaaaattagccaggtgtggtggcgggcacctgtaatcctagctacccaagaggctgaggcagggagaatcgcttgaatccgggaggcagaggttgcagtgagccaagattacgccattgcactccagcctgggcaaagagcgagactcttgtctcaaaaaacaaacacacaaaaagtatgaattgtttatttctggaattttccatttattttcagacattggataactctggataatgagagactattgtamatgaaacagactttgtcttcaaattgctttactcagactcatttgagaaaagacaaaccaaacaataaagatttatagtgtgctgcacaatcccttcattatggcagcagaggagagacccctaactaatcacgaggttgtaggattgtgggggtaggggctggataagggaagctgtggtatagtagggtggctaagagcattcttatgcactagggtcagacctaagtttgaatttcatttctactatttactatttatatatgacctcccatgagttacatcttggcctcccccatctgtagaaacataacaatacctacctcatcactgaatttagagtattaggcaagacaatgcatgcgaagtgttttgcacagtgattagaatatagtgtgtgtttagtaaatgctagttagcttttgttttctagaggagaaaaatccttcagctcaattctaaaggatgagagaagttagtcaagcaaagaaggaagtggaagattttctaggtagagggaataaatgtgttccaaaacactaaggcgtgaaactgcctggcatgtttgggatgcaggtgggacttaatgtttgaggtggattacagaacttgaatatggagaaaagggggtaaaagaggaatataagatgtctctcaggtttctgtctttggtggataatggtgccataaggaatgtaggaagacagacaattttgggggaaatgtaagtttattttaggattttgagtttaggtttcttgtgggrcacccaggttaaacattcagtagacactttgatttttaaatcttgagatacagtaagaaatctgagttggagatacagatttgagaattgagtttatggatgataaagccgtggttatggataaaaatgatcactttccatagtttgtacagaaagtgaaaaaagaagtagaacaagagtggaaccactgttttaggggagctaaagagaacccctcaaacttccctcaggaaactgaggaagtgtgataagtgagttttgaggctgttccttgattaacattctcttgcctttgtttattctggagagaacactgggtaaaacattacaagatttatcactgctgcaaatttgagccacatatgtcccttacaaacaagatggaagcaaataacacattgtgttagacacttgttttaccttctgttactgactgagacagggtctcattctgttgcccaggctggagtgcagtggtgcgatcacggctcactgcagcctcaacctcccaaggctcaggtgatccttctacctcagcctcccaagttactgggactacatgcgtgtgccaccctgcccagctaatttttgtatttcttgtagagatggagttttgccatgttgcccaggctggtcttgaactcttgggctcaagcagtccacctgccttggcttcccaaagtgctaggattacaggcatgagctgagccaccgctcaggcctaccttctgttattcaattactgccatttgaagtaggttgtgttgtcctccatttataggtgaggacattttaatttcagaggctttagttaacttgcccaaggtcagtaactggaagagcaggatttttaaatgagggacttaagaatcaggtatttttttcacttatgccatgattatgttagaggtatttgagcagaaccctgaaggagtggatggatttgaacaggtagcagtgggaatagaaagtagggaatatgataagaggagagtagttgaataaggccatagaggtctttgagtgcatgccaaagaatttatgactttttaacataagcagtgaggaagtcacagaaggatatatgttatattattaattgtttaactcttatataaaataatacatttattgtcggaactgcagaaaacaaaggaaaaagttcaaaccaggaaataaattgcccataatccaactatccagagataacttttcttgccatttaggagtatatcctttgagagattttttcccccctcctttgtctttttgtgtatatatgtgtggatggaagggggagcttttttttttttttacatattttataaaattaggattatactacagtatgtactggtttgtaatctgttttttaagcctaatagtatatgttgaacatttttctatgtcatctaagtgttaggaagattaaattagcagtgtgtagggtaggtttggggagtctaaaaataggatcatttagaagactattgcagtaattcagataagaatgtaatgaacatctgaactagggttatgtcagtgagcctaagagaaattgctaaactaagtgcaatacatttggcagttcatgggattatggtatgttcaaagatgaacctgggtatggtggcaagtgcctgtagtcccagctactcaggaagctgagacaggaggatcacttgagtctgggagtttgaagctatagtgtgctataattgtgcctgtgaataaccacttttcaccagtctgagcagcatagggagaccccatctttaaaaacaaaacaaaagatgaaactaaggtttcctaccaggaggcctagagtgatgtcagtagcagaaatagaagagataagatcacttcagctttgaacaacatgagtttaagatatccatgggacatttaggtggagatgatctgtaataatagcagctactatttattgaaaacttgttatatgatagatattgtcctaagttcttgatgtaattacttaatccttacaacattctgtgaggcaggtattatctgtattttattggtgaagaaacatcagaaaagaagtaattaatacttatgcattctgtgagacaggtattaatctgtattttattggtgaagaaacattcagaaaagaagtaacttgtcatggtctgacgttaagccatttctgtcaggcacaaaaaagctccttcctctaacttgtaaatgtgggactagaatttctgaaaaggcctggttttgcaggcaagtagaataaaggcaattgctggaactatagaagtagctaagaatgccacttgaaatagtataggttaccctgatttgattatatgaatatatcaaattatcacaataccatgaaaatatgattatgaatcaataaaaaataatttcaaaaataatgtaggtaatgaagaagtgctatgaatagaatcttagatcctgtggccattgtgggagtgaaagaggaagaactttcagaaaggagaaagaaggaggcttgagataggaaggagaactgaagggacctggaaaccaaaggggagtcgaagatctacattgtatcgggcacttgacctattatctcagttagttctcattgttaccctgtagcagtgattctcaactggcattatcttttcctaggagacatctggcagtgtctggagacatttttggttgtcacaaatcaaaggggttgctactgacttttagtgggtatagtccagggatttgttaaacatcctataatgcctgagacagccctcctagcaaagaatgatttggcctaacatgtcagtagtgacaatgttgagaaaccctgccctgtggtatattatattaagtccattttataaatgaggaaacaaggaaagttaagtgactcagtcatatagcaagtaaatggcaaaactgggatttcaacccaggtcagaataagaagtttgggttctttccactttactatgttgctacttggatcccagtacttggggaggctgaggcaggaggatctcttgaagccacgagtttgaaaccagcctgggcaacatagtaagacccccatctcgggctgggcgcagtggctaacacctgtaatcccagcactttgggaggctgaggcgggcggatcacaaggtcaggagattgagaccatcctggctaacatggtgaaaccacatctctactaaaaaatacaaaaagttagccgggcgcattggcgggcgcctgtagtcccacctactcgggaggctgaggcaggagaattgcttgaacctgggaggtgcaggttgcagtgagccgatatcatgccactgcactccagcctgggcgacagagcgagactccatctcaaaaaaaaaaaaaagtctctacaaaaaaaaaaaaaaaatttcatgaagagaagggatgagtactattatttgatggagtaataaggtcaaagaagttttctttgacagagagttgagtatgttcttcagaaaagggggcactgaactgaaaagaaggtaattagtggagcagtatcccagatcatgcttttccaggttcatccaatcataactctctacctcttctattcttctattgaaaccagtaagagtaaatgtcatgtaagaagaccctaggacattttggagagaaaggtaatgattatagattttttcctaaaattattaaaactatatggtaaacaaaaaagaaaacaggaatataaatttgctttgataagaaattaatatttgataagccaggaataatatattaacagagatttttagagttaagacaaacctgggtacaggtatgatttctgcacttcactaggttattttattttttatttttggagacggagccttgctctgtcacccaggctggagtgcagtggtgtggtgttggctcattgcaacccccgcctcccaggtgcaagcaattcttttgcctcagcctcccgagtagctgggactacaggcataagccaccatacccgactaattttttgtatttttagtagagatggggtttcaccatgttggccaggctggtctcgaactcctgagctcaagtggtctgcctgcctcagcctgccaaggtaataggattacaggagtgagctactgcgcccatcccacactattttgttttgtgtttgtgagacacagtcttgctctgtcacccaggctggagtgtaatggcacaatctgggttcactgcaacttccgcctcccaggttcaagcgattctcctgcctcagcctcccgagtaactgggattacaggcaccctccccccaccacgcccagctaatttttgtatttttattagggatggggtttcaccgtgttggccaggctgatctggaactcctggcctcaagtgatctgcagggtttcaccatgttagccagactggtctcgaactcctggcctgaagtgatcagcccacctctgcctcccaaagtgttgggattacaggcgtgagccaccgtgcctggatccacactatgttattttgaccaccacacaacactccaccagccttggtctccttatttacaaattgaaggtacaggtcttaccgtcttttttgttttttagaattaaatgagatagtctagcacagtgcctggcatatagtaggtgttcctttactcttgagactgtggaaggcagattatagtaggactatgaaagaaatagatattttaaaataggttgcatttgcatatttacaattttaaaagaagataaagaatagaaggcagtctgcatggtggaaaataacacaatataaatagaaaagattttgtcaaattatttaagtaactaatatgcatttttatrtgagcacatataaagggttaacatatgggaatggaagatggccagattcttctgcttcccagaagaatctaagttgaaacctgaagaaagaactagacttaagcagagaaaaactgaatgagagaggtttgggaaagtataccaaacgtagggtgaagattctatgcagatgcctgaagacagctgttaagggaaactaccagtgacttaggacactgagtgctgagttaagatgtggagggaacractgattgggagaggtaaactggaacccggtctttatatgactttttgaggagttcagattttatcctgtgagcattgagaaggttttaggcaaaggaataattggttagatttatatttttggtcacttatgctgcagtgtggggagtagattaaagggggcaaatcaggaggcagtatagaaatcaggagggtataataagtagtacacatgtaattaatttgatgtggatagtgaatcaaggatgattccaaggtttctggagttacattccaactctaaaaattattaaagtaacaaaaataataaaagttaccattagggctctggggaaagagaagagatataatcatgatattgctggtagcagtataaattaatctggtcatcttggagagctttctagcgacatgcagtggaagctataataatgctaatgcctttttgactcattgatcttactttggaatacgattcaagaaattcaagaaaagtggctgtaaatcgtgcattatttgtccagaggttttttttgttttttgtttttttttttgagatggagtctcactctattgcccaggctggagtgcagtggcgcagtctcagctcactgcaacctctatgtcctgggttcaagtgattctccttttttttttttttgagacggagtttsggtcttgtgcccaggctggagtgtaatggcgcgatcttggctcaccgcaacctctgtcgcccaggttcaagcgattctcctgcctcagccttytgagtagctgggattacagacatgtgccaccatacccagttaattttttggtattatttttagtagagacagggttgcaccatgtcagccaggctggtcttgaactcctgacctcaaatgatctgctggccttggcctcccaaagtggtgggattataggggtgagccaccacacccagccttgttttttttttttttttaatttttatttttgtttttgtttttgtttttttttttgagacagagtctcgctctgttgcctaggttggagtgcagtggtgtgatctcagctcactgcaacgtctgcctcctgggttcaagcgattcttttgcctcagcctcccaagtagctgggactacaggcacacgccaccacatccagctaattttttgtatttttagtagagatggggtttcaccatgttggccaggctggtctcgaactcctgacctcaggtgatccgcccgctttggcctcccaaagtgctgggattacaggtgtgagccagcacgcctggcctttgttttgtttttttgagacagaatctcactctgtatcccagattggagtgcagtggcatgatcttaggctcactgctaccttcacctcccgagttcaagcgattctcctgcctcagcctcccaagttgctgggactacaggtgtgcaccaccacgcccggctaatttttgtatttttagtagagatggggtttcaccatgttggccaggctggtcgtgaactcctgacctcaagtaatctgcccgccttggcctaccaaactgctggaattacaggcatgagccaccatgccaggcctgtccaaagagattttatattggtactatttattacagaaaaattggaaacaacctaaatgttctaacgcagaggattagttaagcttttttttttttttttttttttgagacagagtctcgctctgtcagccaggatggagtgcagtggcacgatctcggctcactgcaacctccgcctcctgggttcaagcaattctcctgcctcagcctcccaagtagctgggactacaggcatgtgccaccacacccggctaattttttgtattattagtaaagaccgggtttcaccatattagccaggatggtctggatctcctgacctcgtgatccatctacctcagcctcccaaagtgctgggattacaggcgtgagccatcatgcccggccctagttaagcagtttttaaaaatatatcaatagggtatgggcctggtggctcattcgtgtaatcccagcactttgggaggctaggatgggaggatcacttgagcccaggagttcaagaccagcctgggcaatatggcaaaaccctgtctctgcaaaaaaatacagaaattagccgggcatagtggcacatgccaatggtcccatcattcaagaggctgaggtaggaggatcgcttcattcagctcaggaattcaaggctgcactgagccatgattgtgtcactgcaccccagcctagggaacagagtgagaccccatcactacaaaaagtttaaaaaactagccaggagtggtgatgggtgcctatatagtcctaactactctagaagtggaggcaggaggatcacttgagcccaggagttcaaggctgcaatgagccatgattgcaccactgtactccatctgggcaacagatgaatcaggagttcaagtaagaccctgtctaaagaagaaaagaaaaaaattgtttgtacatagatgatgatttaatagggttgagagacgcaacactgatgtgtcaatctgtgcttacagcagacagagaataaggaataaggaaagggaaggataattaggtcctagccataggggagaagactattagaaaagttatgttttaaaaggaaaaatgtgggaatagaggatagcttctctgttttcattacctggcagaccccagaaatggcttaatattggcttatttacatatagtctacagttaagttgcagttagctgctgtattaggccgttcttgtgttgctataattacctgagactgggtaatttataagaaaagtggtttaattggctcatggttctgtaggctgtacaggaagcatggcatctgcttctggggtggcctcaggaagcttccaatcatgatgaaaggcaaagaggggacaggtgtcttatgcatagtgggagcaggaggaataaagaggggtaggtgtcatacttttaaagaaccagatcttgtgtgaactcagaccaataactcacttatcatcaaggggatggcaaccaagtcattcatgagagatctacccccatgatccaaacacctcccaccaggccccacctccaaagttggggattatatttcaatatgaaacttagaggggacacataaactatatcagctgctaagagatttcatttcctttaagtgcacttatggctgaaattttccataataactgtagataactcaacatgtttaagtagattttagtttggtatttgattaaaagttcataaaatggaacaagaggaaattagttattagcaagaatgttgaagaaaagttggaattaaaaaaaaatctcaggcgggtgcagtggctcacgcctgtaatcccagcactttgggagtctgaggtgggtggatcacctgaggtcaggagttcaagaccagcctgaccaatatggtggaacccccatctctactaaaattataaaaattaccttggtgtggtggtatgcacatgtagtcccagctacttgggaggctgaggcaggagaatcgcttgaacccgggaggcggaggttgcaatgagctgagatcgcgccactgcactccagcctgggcgacagagcaagactcctctcagaaaaaaaaagaaaagaaaagaaaagtagattcctrttaattactaaggaaaataaattctgctgggcatggtagctcctgcgtgtaatcccagctctttgggaggccagggtgggaggattgcttgaggccaggagttcaagatcagcctgagcaacatggtgagaccctgtctctacaaaaaataaaaataaataaaaataattgcgtggtggcacatgtctgtagtcccagctacttgggaggctgaggcagaaggatcacttgagcccaggagttaaaagttggggcatcagaaattttagacacttaagctgatttctttgatgtatttaacaacatacatccagaaaagtggatcatttgggtgctgagggaacatctagaatctgctttagtcataatttttttttagatggaattattttgatctagaatattaacagtggagaaaaagctaatataaatgggatggttttgagacaggcaatgaaggttaaggaaaaacaatctgtagataagttagatttccaaggcatttgttgaaatgaatggctaaagtagcttgagatgaaggggtgatagatgggagaaaggaggaggttgctggaatgacaagtttttggtgaagtattaytccttggtttattggcagtagaagggayataagggtrgtgcaggtcagccatttggataatatttgctgtatgtgatccttgcagaaggcgaactagagctaaggggccaggccaggcatgttggctcatgcctgtaatcccagcactttgggaggctgaggcaggcagagcacttgagcccaggagtttgagaccagcctgagcaacatagtaagatcctgtctctacaaaaatattaggtggtgtgcacctgtagtcccagctgtttgggaggttgaggcaggaagatcacyagagcccagggagattgaggctgcagtgagctatgattgtgccactgcactccagcctgggtgacagtgtgtgacctttcttaaaaaaaaaaaaaaagaaaaagaaaaagaaaaaaagagatagggccctagtaaagatgaagtggttaatcatctttattaggggaaagtttctggctgtgtgactggagatgatatttgcaaatacactcgtatttggtaatggtttgaatggattgagtycactgttgtcagatgaccaggagagtctaaaggggcaattctggacttggagagaagtccatgatagcattaatgtacttcactgttcacaaagatgtttcacactcattggttcacatgatacaacaaccttatgcagtaggaatcattatctgcattttgcaggtaagaaaactaaggcttaaaggggttaatccagtggttctcagttcacactacacattagaattatgtgggagatctttttaaaaatactgaggcctgagccttacccccagtagttgtgtagttgttctgagggtccagtattcatgtttttaaaatgattcaggtgattctaacatatagccatggttaagaaccacagggttaaatgtctgtgccaggccatagagccaataaagtagcagaggcagaacctgaaacctggtcttttgtctctgagcctcatatttttcattttttccccccacactctgatttttcaggtttcatttaagaccattacattatccctcaggaagcctgtatcaattctgtatcagttagggtttataggctacagaaaccaactttgaccaactttctttttttttttttttttgagacggagtcttgctctgttgccaggctgtagtgtggtagcgtgatctcagctcactgcaacctccgcctcctgggttcaagcaattcccctgcctctgctgagtagctgggactacaggcacatgccaccatgcccggctaatttttttgtattttagtagagatggggtttcaccatgttggccaggatgatcttgatctcctgacctggtgatctgcccacctcggcctcccaaagtgctgcgattacaggcgtgagccaccacgcctggcccttttttttttttaaagggctatttttgaataatagtgggtatttcacagaattgaacagaatgaaaaagaaggctaaataactagactgaacaaagttcaagaactggggcagctttagggaatctaggaataggaatggaaggtcatctctacagaaccaataggaatcttaactccagctgtcttctatacccatttgtctgcaaaattccaattcctgtagagagattccataggtcactgcccctgggtcaggggtcatgtggttagtagccccaaaagaaccacaccaagttaaggaggggcagttccccaatggatgggatactgagcagacccaaacaaaagttactcattacaaagcccttcctgacagccctcactgcaagtctaggctcccctgtaggtactccagtagctctccaaccccattcttttttttttttttttgagacggagtttcgctctgtcgccaggctggagtgcagtggtgcgatcttggctcactgcaacctctgcctcccgggttcaaatgattctcctgcctcagcctcccaagtagctgggactacaggcgcacaccaccatacccaactaatttttctatttttagtagcgacagagtttcaccatgttggccaggatggtctcaatttcttgaccttgtgatccgcctgccttggcctcccaaagtgctgggattacaggtgtgagccaccgcacctggcccccattcttatattaaatgcctatttcccaccaaactatgagccaggagaagccagaggccaaatctattctgtgatatccctcagtgggccctcaaatatctcaaaaatagtaagccctccgtgtttggtgaatggaattccagaaaaattttaggtagaaatcgcaaacttgtggttctactccttttccaaggtaggtgcccactactgcacctttgtaaagcctgccaccctatgtgctatctggaccctctgccatttccactatcccctctttcatctcttctctcaccttgttaggtgattgctggcttcaaccgccttcggcaggaacagcgaggcctggcatccaaagcagctgagttggagatggagttgaatgagcacaggtgagaaagtcagggagaggcaaacagtaggacagttgtgtgggctactccgtgagggggatttgtagtagagtggggctgaatcctcaggtcctgccttgttctcctatcccagcctagtgatcgatacactgaaggaggtagatgaaactcgtaagtgctaccgcatggttggaggagtgctggtggagcgaactgtcaaagaggtgctgcccgctttggagaacaacaaggagcaggtgagcaagaatcattgaataggatcgggtacagtggctgtaaacccagcactttgggaggccaaggcaggtggactctttgagtccgggagttcgagaccagcctgggcaacatggtgaaaccatatcactacaaaaaatacaaaagattagctgggtatggtggtatgtgcctgtagtcccagctactcacctgagcctaaaatgtcgaggcttcagtgagctgtgatcacctcactgcactccagcctgggtgacagagtgagaccctgtctcagataaaaggagggcagcataaaatagcctatgctcattatgctatgctaagtgcaactcttagacaagaggaattgctgactgctgtgggctctgtgacttggctgaattggggtgggaggattggggttagagtaatgtttctcatagtgtgtgtttcacgaatacatgaatcaaaatcacctgaaggactaatttataaatgcagcttcccagacccactggattagaacctttgggagtgccatgaagtgacattttaaaaataagctaggcaggttgcagtgactcacacctgtaatcccagcactttgggaggccgaggcgggcggatcacgaggtcaggaggtcaagaccatcctggctagcatggtgaaaccccatctctactaagaatacgaaaaattggctgggcgttgtggtgggcgcctgtggtcctagctactcgggagggcaaggcaggagaatggcgtgaacctgcgaggcggagcttgcagtgagctgagattgcaccactgcactccagcctgggcgacacagcgatgctgcaactcaaaaaaaaaatattaaaaataaaaaatgaaaaaataaaaataagctcatgcctgtattcctagcgctttgggagaccgaggcaggaggactgcttgaggcagaagtttgagaccagcctgggtaacatagtaggaacttgtctctgtaaaaaataaaaataagcagcccaggtgattctaagtacattaaagtgtataaaccactgtgttcaagaaaggaataattttaatgtctgggctcctctacttggttaaaggtaaggttaaatgtgttaacacttcctccaaccatagtccattccaggtgggggaaaggagtcctgaattccttatataatccctgtcacttgtcctctagatacagaagatcattgagacactgacacagcagcttcaggcaaagggaaaagaactaaatgaattccgggaaaagcmcaacattcgtctcatgggagaagatgagaagccagcagccaaggaaaactcagaaggggctggggctaaggccagctcagctggagtgttggtctcctagggaccaaggcctttgcatttttttctaccctgactcccacttctaatttctctttattgttattattattattttctctgctattgtaatatttttttgttaattaaatgttttggtcagaatcttagctgtagcctgaagttttctcccacttgggggtggaaattgttttgagacacggaacagcatatgatgtgtggtttttgtttccatcaggttaatgactcataatatgagagtaggacccatatttattttatcctttccttgcaaataaaggtatgtccacttatttactgcccttccccctccccccaaaaatttcagagacaaatcttgagtctcagattgaaatttaataagcatttgaagtgaagcagatagctctggtgataacgctttataggtttgcaacaaagcaaaacaaaacgaggcttagtgatgtgtcttggcactatttagataaagtccaggatgcaaacctgtggactggctgtcctgccatcctcaccaaaacccccaaccaggtaaagctgatcattccaaaggcaggtgcgatggcccatgcgtttcatcccacgatctgcacaggggaagtggaaccacaaaggaggagatgtgcctgttggatacgggcagagggtggttattgaggcagtagcactttgtcattcacagaattcaacatgaccaagggcttgcccattgtttttctgctcacttgatttgtaggcctcttcaaatgcttaatattctgtgtactcctttaactcctgtcaactaatttttcctcctccctaccccatcactccatcctctttctgtagtcttcaggttcccccatcttcccaccttcccccccttcagccattagtctggctctcacgagtatcatagatgtagagatcattgcagatggtgtctctagctctggtcagagtttctccaccaaacagcacagcaaagggcccgaccacagaacatgagtgatgccgtagtccatggggccccttctgggacccctgcccactgctcacaagccttgcaagctgttccatcaaatgaggagcaacaggtggttcctccttggggagaaagaaaggactgtccgaagagacctgggcatcacaattttagcctcttcccatcctaaacaagatgtgtgaggagctaataccttaattttcccatgactccaatgcccagctacttctggttcagctaagttgcaacctccaaagagcaatagctgatgacctggatggggtccaggagtttggagcagggccgcacagtgacctgagcgtgaggctgtgtggcagccttcttgcttgtagctgtggacatgcagaaattcagggctgagtgggttttctggaaaatgtaagtgccaccgcccttgccaaggatggatggagaagaggcatggggcagtgcggtaggtgggataagagggagggtaatactgtagagagctcagctagcttaaacatggtaggttcccctggaaggagggtgctagagtgaggaggtggataaattgcctgagaaatctgcttaggcttttgtttttcgagagtgtggatgagagtgaaaggttttgggcggagggtgccataccaataggtgcgggcgctggggtccagccttaatgtgtagatgcttccatagcgtcgctgagtgtggataccgccctcccggccagccacctgcagctctcggtcagagattcgggtgcaggtgtgactactgaggccggcgggggggcagtcaccaggggtccctgtccacgcctcccacacaccgcgctctgtgtccagtgcggtcactgtggccaagcggcgagacccgtcccagccgcccaccacgcagagccaacgcccgtccacgggtgccgcgtcgtggtgactgcgcggggggctgccccgggctcccaatcgtacggcctggcccctagctgggtcgaaaaccaccgtatcgctgctgggctctctcgctcctcctgctaggagaccacctacgagatagaaccgtccccgcagttcggtgcatgaatggaaagctctagccaaaagcgcgtcccgcgccactggcctccaggcccagcctgagcctgcggcccgacccgggggcacggccaccgccatgggccccggggagagggagggcggtggggtctgcggcttggaacgagcccctacatggcaggccaggcacctcgccttccgcgggtttccccgggaacctccccctaccggacgccagccggggttcccacctcaagtcccggctttctctccgtggtcgcccagcaaccactgcagcggctgcagcgcgaccgctgcaaaccgaaggtcgcaaagcagcagttaccgtggagacaggacacctgggtggctatcgggaaccgtatggtggtgccaccaaggctacgggagctgtatcaggtcaataaaaatcctgcaagattgttaacctcagaaagtcggaggacagtcgggtccttagaataaacccctgtgatctccgctgtgaactgatttgcgattttgacatttgaggtgcaggtgctgctccactagggccgggagggatcatttggcttcagggtttcttactcgggctaaccaccccagggatgagcaaggaaggagaagcaaaagtcagagggtggggaagtgaaagtggactgaccactggcccgagagacaggagacctgggttctagtcccaactatgcccctgaccctcaaaggcattgtttctctctaggccttctcagttttgtcattcatcaaataggctgttcgtttattcccaaaggcttgaaggtcccgattgattgggtgggagagtcctttcagctctggccactagagggtagcagaacccagtctctcaggtgacacacacacacacacacacacacacacacacacacacacagagagagagagagagagagagagagagagagagagagagagagagagatagagagagagagagaacccacgcagccttagaagggtgaagtgggggaagagtgagaaaatgagaaaaacagactcctacccttccctgatatcttttatttaagccagtttccagatattaactctgtcccccaggaccaagtgataactgaagaggcccagatgcaagctttctgctttcagctgaaggaggaaatacagacagaattttcctcccaacacagctggtgtggggcaaaaacaggatctgtgtcctctgggactgggctgtaagtgggaatgatgactgctacttgtggcctttggtttctacacatcaccttgctccccatcatacctgagatactgagaccatagaaagtggccaggcaggagaatcacttgaggccaggagttcaggagttcaagaccagcctgggtaacatagtgagaccctggcgaaagaaagaaagaaaaaaagaaaagaaataaagaaaggaagaaaggagacagtggccagggctgcagtgaggatgggcatgtaatgcagggtctgatagcacagcagggctttcccctcctcttcccaactcttggtcctcagagaacacagcatggggatggcatgggcaggaaaggcacagttacagagattggaagattaccaggacctgttccccacctgtaccttaaagccaagattcaacaatagctttgaaagtctctgccctcccaactatagctttccctgagtatgacaggcagtattctcagttttccaaaatcatggtaagaatctctaaaaaatcactaacttttactgtccttggctgaaatttaaaagtcagtcttttccctcaggcttctttctcactggctaacctcccaacagctggattcagatctgtcatactcctaggattaggcaagggcttgcctcaggggtggggcaattttgcttaaaccttattggcctatatgtccattttaggctcttgcttttgcctaagtcttggctgttctgttagacttactttctgcctttcctggatagaaatgggaactccccaccccacgggcctttccagctcctctctcccagcttcctctctgactctgagtccttagcagtaggcatcttagttagacatagagcttgaacctcacatactccttggctgtaccctctccagttctgtacctagatgcttccagttcctcctaatagctggaagcatctgtccattgctttgccatcccaagaccctgggagaggaactgcctaggactcctaccttcttaggttagtttgaaccaaatccatattttggaggagggagaaaagaagccagaaagagagaaacagagagaggaagaaagcaaaccagccaacctggacttgtatgacacatgcttcacaccgcaggacagcatctgcagtggtctataatgaccttgtcaatgatacacaaactgaaagggcattaagataagtgaaagggggaactgagagaaaattgtgagagacagggaaaagggcagccagggctgtgaacctgctttcacctgctaataatatccagggacaacctctgtccagaaatgagagcagggactggatatcctgaaagtctcgtaatcctgatgtgatcccctgatgttggctttgtctcagttggccaagagtctatatgatctctagcaagcaagcacccagcttcctacctagccttagatgtctatcctagccccaaatctacgcccccttgcctcaaactttcacaaagctcttactctatcttctcccttccttaaccccattttctgaccctggaaccatctctggttcttagcattattcggtacatacagaaaaccaacaattgggctgggtgtggtggctcacgcctataatcccaacactttgggaagccaaggtgggtggatcacttgaggccaggagttcaagaccagcctggccaacatggtgaaaccccatctctactaaaaataaaaaataaaaaattcaccagccgtggtggtgcatgcctgtagtcccagctactctggaggctgaggcaagagaatcgcttgaacctgggaggctgaggttgcagtgagccgcgattgtgccattgcactccagcctgggtgactgagagagaaagagaaagagagagagaaagtaaagaaagagagagagaaagaaaagagagagcgagaaagaaaagagagagagaaagaaaagagagcaagaaagaaaagagagagagagaaagaaaagagagagaaagacagaaagacagaaggaaggaaggaaagaaagaaagaagaaagaaagaaagaaggaaggaaggaaggaaagaaagaaggaaagaaagaaagaaagaccaacaattgcaccaaacggtcttaatcgcactcaagactcccacagttccctctgcccatgtctcccaggctgtccccatccttcaggccctttctttgactcttcttctgctgtaccctgacccttctctatttctcacacagctcattctagctgcttgacttcctggccctatgccatcctggccccatttctgactctttgctctcagctcagccagaataaagacagggacaaaaggacagagaaatgaccaggcaaagagactgcatgaggtcagatcttgagagctcctttgactgaatgtgagctagaaggagattgagagaaaggtgaaattgtaagcaggctttagggtggaggggagtggtaatcagccaaggtagagaatgatggagaggtggaataaggatggggagaagcttatgttgttgagggagtaggcaatgttgagtaggaaagtatcattgggtcattgctgagcggtgggaattgagggcagaagacagaaggactttgagtaatcatggcatccagaaatttctcttcgggtccttctgtctctgtttcagattttgtcttggccacttcagccactttgtctctttgaattctcccccttcaataactcgcgcgcgggcgcgcgcgcgcgtgtgtgtgtgtgtgtgtgtgtgtctccaatacaatccctgacttacaatggttcaacctacaatttttctttttctttttctttttttttttttgagacggagtcctgc

SEQ ID NO: 97016 - DNA, 42810 bp, Homo sapiens
gctcgccctgcccagcctgtgactgcacgcccagcctggcgcccacctttacccaaccaggcatgggaacacccctcagcccaccctgctgcaggaagcagagcccaggaccttctcaccaaggtgtggagagggcccaagaaggccgctttagggctgagctctagcccatgggcaggagcaagggctgctcaatacgtggggtggtggaggagggggaatgccacaggctctgcagagcgggaggccctaccggtccagctgcagccgcaggggcgaggggctctggcggatcttgctctgggcctcggcatgcagcatgccctccgcgctttccccgttgatggccacgattatgtctccaggccggaggtcagcgtccttggctttgccccgctcggccacctgtagggatgaggagctggcatgctcagaccgtggcccagctggagaagggacttcccactctgctacccaagaaacacagaggctggcttgacccaggccggcctgcaccctcctgcatgtccctctgcctgctcatgacacccagctgatcagccatcccctccaggagcgcaggtggcagcccccaccccacactggcattctaatgggcctcccaaagaatgtgcagtggcagaatttcaggaactgtgcttggaaatacttttggatagagagccttgcccgtgcaaatcgcaccttgcaggtggctgcctgcacagccctcctgtgaatgttcccagcctgggcccaggtcaagaggagactgccaagaactccggggctcttgttctagtaatcaccccaaatggctgcctgcaagtgtggggatagcaactggggaggcaagagccggccctgtcctggtcccagctccctttcactcccaaggtctgttcctgaagtggccaccacatccccgtggcaaagggccacggctcccttacagccagcacgccaggcagcagcagatccctagctccagaacagaaaaagcaagccatctgtgcagagtggggtgaacagggccgacctcgcttctggcaggaccttctcatctctttgagccaccatccttaccttagtcaccatgatgggcgtgtggaaatccctgccccctgtgatacggaagccccagggcgctggcccggccacatccaccgtcaacgccatacctgaggaagagaggaccaggaggtgaagtccatgcccctagccggctctgggggcactgtaaggcagcaggagaggagccaaagggagaaggagagggcaccacagctcccggagcagctactcaggggctttggggtgggtagaggaagtggctaactccctccctcagcccggtttcacttccccccaccctgggaagccatgcttctgggttctcccttccttagtcttcagcccagggagcgactcccaggagggggctgcccaggctgccaggcagggggcttgctggagcatggggggcaggggctggcaagtggaggggatgccagcaccccctcagtctcccctcctccaccatcagggctcagtcccactagcgcttgcttcctgtccccaaaacccacagcacacggtacttcctctccactctgggggagggctggtgagtggcctagggagagcagggctcaggaagcaggagtgacgggtcaaggaacaggctggcaccagtacagactgtgtaagtcactggccaggtgaaggactggtggggtgaggccgagtcttcacatgggcctcctagctgcccacctcgttcttggcaaagtggatcacacgggcaagaccgggctccccacctcccccaggggccggctgccagggcaaggaggccagggttcatctgtcaagctggacacacccacccccagattcctgatgctgcccgacagacagccggggtgacaggcctcccatccacagcccctccgctgggcaaggaagtgcccttgcagacagacccctgtgggatttcctgagcctctagctctggagccaggagccaatccaggcaggaagccgcggtgccaggctgggcaccaccctgcccagcacccatcctggggctgccctggggacgcaagtgctgcgagaatctatcaagagcaccagcggtctgtccgctccatccccggctgccttccccttgggcccaggcctagcctctgttcccagcaccgcccccaccccagtccccgaggccggctcgcggccgccccgagattcccagacctttgagccggtcagtggactccgcgctgcgggcgccgcggggaggtgcccagcccgatggcccggctctaccagttctggagcctccttcgctccgagggcaaagtaccctgcgggctgggggctggaggaggagcgctccggccggggagagcgcagctcgcgggggcgcccccgctgatgcgaggctccagggagctgggccgcggacgaggccagggttccgcgccgacaggggcgcggagaggagcccggcgccggggagggcgggccgcgcggagaggcgcaggtgggcgcgctcacctggctgccgctcacctgtccggctgggcgcccaggcccgggagggagggaaggcggggagacgccaccgctcccgctgccgtctacccgactctggggagagcccgcccggggctcccggacctgcctccgcccatgtgatcccggggccgcccctgccgccgcccctagcccgagaagccgccgcctccgcgcggcgagcccaggcgctgccacctggcccgagcccgccggggggatgaggcaggctgtccccagggccccctgcaggctgcgaccgtccagccggtggtgcccgcatcctccccggagcgcccgcaagcccccgactgcccggagcacagcagagccggtccagggactgccccgcgccccacttcgcagacgatcgagggggcagccccataaagctctcccacgccggccgcgctctcccgccccgcatccccaggtcctgggcagggtgggctgcctgggtgtgtctgcggtccgcctggctcctccacccactccaggctgggaggctggcgcagatgcggccttgacacccacaaatcccaaaccaaggccaccctcctgcccgccaactcccttcctgaacgctggcttctcggcagcgcagaacttctctgcctggaatgcccgcaaagggggacccgcaggggccctaggagatggagagagcctcctggctaggggttcactgggcacccccacccctgggctggtaccttcccgttcccgtgggccctcacctcatcctctctgcaggtcttcaccccgcttcctgccccctcccttgtcctctttcaagcacctgaagcccaggctataaggatgaggagagggcagccaaggaggggaccccggtgccagctcggggaggagaagccgtacctggcaaccctctctccggggacctcaaggccatagagccgcctctcgttgggtctccacttggcctctggctgccaggctgctgtgttttcaggggatcacacctgtgggcgcagctgtgcctcgcctgcctcaggtgtgactcattccctccacgctcactctgtgaagagtgccctccccacgcccctcacctgtctgtgcccgcgtctcagcctccttgcgttcacactctggcccccctcctcccacagaccgtcctgggtgtgtgtaaactcctctcccacgggctggtctccggcctcccggcatgaccgcctggcctgacgtacctgctctgcctccctgactagactggaagccccttgaggggagaggcaactacaggcagggtgagcacagccccgggggcacacagacctagccccaagtgcacagctgcgtctcaccggctgtgtgaccttcagcaacctcctcggctcctccgggcctcagtttccccatgtggaaaatggggataatgtgctgcttaccgtcttgttgtaaaaattgcttggccacaagcaaaagccaaggatggcacagaggtgtcaaacagagtccctgcctcaaatggggtggggacttctgggaagggacccaaaggaagggaagttcatccattcaattcttccacacaatcattccaataacattcattcagtgaatactgagtgccaggcaccgtgcttgcctctgggaatggagagtgaatcaaacacaagcccatcatttcctcagagagcccctcctgcatgccttggacagactctacaaatagccccaggttcatctggcagggctttctgatgggtgggttgtgaattcacaaaacccaccacaaagacaagtcagcgaacccaggcagggcacgcctctgtggcacagaaggggacatgtcctgctcatagcctctctgtggccctaggtaagccacatcactgccctcccctctctcatgggtgagccatctccagcagcctctgatcctcccttcacctccccaatcaggccaagtcgaggcacagaagcatctttcaggcaggaccgtggtgcaggcagcccagggttggagggtttgttagctgcgggaagtgccagcgctccatcaaagagagggcatggagttggtctctgtcccagggagaggaggcctcagccctgatatgttttatgagggaatcagggagttcatgaaaaaagagctgggatgggggaatggcaaccaggccagtgggttctgaggaatggttgtttccaggccaggatgggctggacctgcccatttagaaccaaaccagggtgaggatggaggtggatggaggactcgttcttccagctgctgttgaacccctgctgggtcaggccgcacccaggttcaagaaaccagccagggctaggccactgccctgtcaaccacgagcccctcccctctgtcctgacagaactgggcaccaccacctttcactccagccaccacctcttcacacctgtctcaggtgacaggcctagaagacaggattgccaggaagaacataaaagcggcccaacctgggccgccctagagaagtccctgacctcacacatgaccttccttctccaagggcctggacgagggccctggacgagggctgcctgggcatttggtagatttcaggaagtgaggtggacctgacttcagcatttaataatgatgtgagctagacaacttaatttctcagaggctgggtctctccccctgtaaaatggaatcatgacctgccatcgtgaggctcatgttaggtaacacacggagaggccctggtgccctgctcacctctcagcagcagccgagaaacggagcttcctttcttggcagagtggccatgcctggactgtgccaccactgccaccccacagggacctgcaagctccaggactataaaaccttgttcaaggttgggcgcggtggctcacgcttgttatcccagcactttgggaggccgaggtgggtggatcacctgaggtcaggagttcgagaccagcctggccaacatgtgaaaccccatctctactaaaaatacaaaaattagctgggcatggtgccgcaaccctgtaatcccagctactcaggaggctgaggtgggaaaattgcttgaagccgggaggcagagactgcagtgagccgagatcgggccactgcgctccagcctgggcgaaagaatgagaccccatctcacacagaaaaaaaacaacaaaaaacaaacaaacaaacaaaacacccttgttcaagaggagttttggctggctgtgcctgaccactcccagcttcccgcaaaggattgctcaaaagcctgagcccaaagaggagaataaacacacacacacacacacacacacacacacacacaagggcttcggtgtggaaacagagcacacagaaggaaaacagcagaatagttagaaatgtcatctagcccagcaaccccacggtggcagctccagaatcaaaacagtctgcaaacaaggccacattcagtcccccatctctggtgtctccctgctaccagggcctggcactgttcattctcccagcacttcttgccacacagctgcccaattgtgggggctgccgcaacctgcctgacacccaagggcagagatctttggaggtaataatggtgtttttccatcctcctcctcttacacacacacctgtcccacctgtctcccagcacagccctccacagaaggaattcccatctcctagacaggaggaggcatcccctaccccaaggaaaaggccgcagagacaaggtcccttgtgtccaggtttattttacattctcttccagaggggatgkggggctgggggagagccagcaggcaggcgggcagcacacagcagtctccctggggaatatttgagccaggctagtggtgcctggccccacagtgcggggtgatatgccagggccagggccaggacttggcagcccctgggaagaggaggccttggggccagagctcttgccaggcctaratcgctaagaaggtgctgcgtctgtcccccgccttgctccgcccccccacacccagctggaggccagaaggcaaagagggcagccagcaagctggggtgctgggaggaaccccagcaggcgggggcggcctttggtctctacgaggctaggaagctggttctggttagaggaaccccgtgggggcaaagcggagagctggtccctgttagaggaaacgctggagcaggatgggggtgggggacttggggtctggtctcaataaggcctggaaatggtctccgcttcaaagcagacctctgtatttggggagtggggtggggaggaaatgaaagggctgtgggaggaatgcctgtgagtcgtgggtgggaatcagtccagggggcttcgaggggsgtccgagggaaakgctgcgggggtcgtctgcagatgctgggagctcaggtcctggggaaggaggatgtgggcgggggtcctctccctcccacgagtgccaccgctccccaccccatccwggctggctccaagttgccatggagaccactcacaccggggcaacgtaatttccagggaacgttccgaatttctgggtcctccgggagacacctgaaagaggaaaggcaggaagagctttccccactcccttctttaacagggatgcaggggtgagggcctgccccctgccggcagtgcccagaactgtaggggagttctgtaggggagcccagagagggaattggatttgctctcctccttcctgccccctagcggcagaagcttagatgggcmaagctacacttcccacactcaaccaccaaagaatctgagcaatcaacaaatgtrcatcacactgtacacagmagagtcactccccscctcctccgcaaagtggggacacaggaggaggaatcacagaactgaaatcgggagaaacgtccctggtctaatagggcaccctcacttagagatgggtgggaaggcctatgggaaggctgaatgcattgcccgagagcaccccgacgcttaggagtaagcttgggactccgatccaggcctctcagccccacagaaactcgtgtcttgaagaggaggaggggggggraccccagcgggcaaagcatctggggggcctggcacccgatgcttccccaaagccagcacttctgttggctgctttccttcgtgccatgaagagaasgacgccctggaggaaactggcaccaccccagggtcactgatggagtcactggggacccaggccggggttgccgaccttcagagccctgccccttttccctgcacacccctgcctctggagcagcccttggggagagcgcctggtggaaaggaccagggctcacacctgtgtatccccacaccccccagctggttcctccagcctgggaggaagagggaatggagaaatatagaaatacagaaatgtaataaatattattatattcctatatatagaaaaataggaatataaactgaaatgaacgtcactcctgaccttgggtgaatggatgatcctgggcctccccttccaggctggcaccctgacttccttgggggcagcccgtgctcgtcccacccccaccctcgtcctctgccccgagtacctccctttcctcttggcctccccaaatccttcccctgcccttccaggcccagctccctcatttcctccaggaagccttccctgacctgcactaactaaaatgggcaccactcgccacctgtggctgttgggcacttgagatgtgcctgtgcaactgaggaactggatttttaatttatttcatttgagctacatttcaacagctgaatgccgccggtggctgccataccggaaagggcacaggtctcgcccattcctctcaaagcgcttgtggctcctaatacaaaagtggtactttttcttcttgtctgcataggtttgcaaaactttattagtagttgtaaaaaaattccaaagcaaaagtgtatccagtaaatttgaatgcatctccaagcacckcctccctccctcccccactagaaggtaggggccattcacaggctagtgcttaatggtcctgggtgggtcagtacagctggctggcagctgtactgggatcagatcaggaagggtgggctgccaggtcaaggggctgcccaagcagccccccaactcctcaggcttcaaagcctgcttggggcagggcagggggcttctggccactctcttctctctggggacggcccatcctttgaagatgagacctgcacagggcccgcccactctggggaaagaggccatgtgaagcctggtgggttggtcaccttgattcaggctgaggccaacctgaggcttcctgcatttgtccttggtcagagctgcccttgggccagccctgaggggctgggacctttctccattccctcttcctcccaggctggaggagccagctaggtcaagtgtgagccctggtcctttccaccaggagctctcccccagggctgctcgaggcaggggtgtgcaggaggaagaggcagagctctggasgttgggaaccctggcctgggtccccactgactccatcagtgaccctggactggtgccagtttcctcctgggccttggcctcttcatgaaggaaggcagccaacagaagggctggctttggggaagcatcgggtgccaggcccccccagtagcccggccggaagctgagtcggggggtggtcggccatgaatctttgctgaagcagcactggcaggcaacagcaccccacccacatcccctggggccctgagatgccccctcccggcctgcccacatacccacaaaccagccatcgtcacactgctgcatgacatccaccctgtccccctcgcgcagctccagctcgtcttcgttctggggcctgtactggtacatcgcccggtacctgcgagaagcgtatcatggcaaccagagaatgggcccagaggctctaacccaagtgttgccgcttcctgtgaatgccccagggtcccttcatgctctcactagcccctgatccagctcctcagagcaactcagcctgtgctcaccrtagtctttcccaggcctgcctcctgccctctgggccctaagcactgaaccctcgcctcctctgagcacctggtgccttcctgtccattccaccakttccacacttcaattatacatgcaccgacctcagggctagaaacccaatgaggagaccaaggccacaaggccacatagctgccaggagggattgggaacatcacagaccagcgcctcctccctgccccaaatcaccataagctcttcgaggacaagggctacctggtagaagtttcccaaatccacaggtggggacttgggggagggtggaatatggggcattgcctgccagtgaccscccccacgtctgatcaagagccctcagatggtactcacggggtccagtgtatctgagaggtgttaggagaggaggtccccaggtccaggggatggctgggacctcgagagtgggacagagctggaccaggggtgccaagattctgggagttgacaggaagaaagggatgtcagagggaggaagacgatgggtacmtgtaagcctgagggaggaggyccaaaatgggcgttcccagtccacctgccagcacgccttacaaacggcttcatcttagcctccaaacccccagggcacagggacacctgctgtgactatttcatttcacaggggccagaaaactgaggcccaagtaaggtcagtgcctgggtttctggacgccagcatggatgaaccaagaacacccagggtcaggagcctgggccggctttgggattccatctagagctccctcggctagagctcggtaggttgaggycccccaggccagggtggggctgccatactagcttctgccctgtcaccccactcctatgtcccagggctgtctgggaaggagtcccaagtgtggacaagtcacgggggtgggggatgaggggtgaggaggaggtcgactctctggtgsaggcaggctacctcacctgggtctggggtctaggctcctgggyggggaaggagaagccagtgcgacggggggaggtctgtccccccaartcgrtggggtcagctgggctgygcagggctgagggggagctggggtgacgggctgagcgggcggcagcggtcaggcggggagacgtggggagctgggggccgtcgtcacagagccggagccggggttcacgagacacctgcacgtagctggcagggaatatgccttggcgcccygtgcccgtgatgcgtccctcgtaccagttctcgttcaccttgcggatcaggcagatgtgctctccctgaggggggaaaagtcagtgtctgtggggccttcctggtgccatggacccacgggtgccttatctgggctgtctcattcaaccctaacaccttggacacacgaggggtcggaatcgcagggggccagcagtttacccgagtcacacggtaagagcaggagccaggagccaagcccaggctgcccaggcaaggctgaggctgagactgggtcctgcctcttggaagctcaacgggtgtgcatcccccttcggcgttcatagcaaggtccctccccagagctccgatcacaggtgagcccgtggctaataatacagatccaaacccagctccaccaggccaagctgtgtggcctcaggcagcctgctctgtctctctgagccttgttttctcctatgttaagtgaaaataaccatactgtcactatgaggtgtgaacgagatcaacagtccactccttagacacactggacaggtgctaccactactgccctgcctgggtcctgttcctgcctcacgctgggggaccttgtcatgagcgtgtcaaaaacacactccccaggacaggcagggagtcctgaaggccacaggctggctgacattaggtagaaccaccccctgggagggtggcctccagccyttgccttcccctgtcctctcctgcccccatctgtctccatccagccaccttcttccccctctgtccctggggccagctcttctgggargcattcactatgggccgtctttcgcttattttgggagcatgatcactgctcccaaaatcaaccaaaggcagaccacttccctgctttctagaacagcatttttcaaacttgtttcaccacaatctacagttaaaaatgttttaataacagcccagaatacatatatatgtgcatacacagaactgcctacggtatgataaagtgctttctgctcgcaacgcatgctaacatttctgtctatacctttaaaaatgctgagtatgatcccctgcaacctgcagttgaaaaaatatatatgtaactctagaagtttatgatgatcttttaaaaatggaccaaaattacttgggaggctggggcagggacaggggatcgcttgagcccaggagttcaaggtcagcccgggcaacatagtgagatgctgtctcaaaaaaaagcaaaaaaaagccactacactaaaggaagcataatgaaagagactggggaaaactttgaaatcctgggtgaagctaggtacatcggactcttttttaaagaagtgtttttaggccaggcgcggtggctcacgcctgtaatcccaacactttaggaggctgaggcgggtggattatgaggtcaagagactgagaccatcctggccaacatcgtgaaaccctgtctctactaaaaatacaaaaattagctgggtgttgtggcgcgtgcctgtagtcccagctactcgggaagctgaggcaggagaattgcttgaacccgggaggcggaggttgcagtgagccgagatggcaccactgcgctacagcctggcgatagagtgagactctgtctcaaaaaaaaaaaastgtttttagtgcacatatttacctacatcttcacctgcccccacccacccctccgtctccggcctggcccaccttgcggaaggacagctccacctccaggtcccccttgaaggtgtactgggccacagcctctccatactccagcacctggtaggtcgggggcttgatgggcttagggatctcatctgcgggcagcacctgcatgaagaaaggtcatgagaaagatttggcctgggcatcaacatagcacaggctgggggttcctgtgagacagcaaagagaakgtgggcccgcccctaggcagagaaaagatataaacaccagacacaagccctgggggcagccacgggtgggcacagccaaagggtgctggaggatggggaggagtctgggaacgctccctggaagaagaattttccatagggatatatggagtgggcattactgaagtgaagaactccaagagaaaagatggaagccagtccaattagagagtttaagttggaccacagaagaaaatgaggckttccaagcagcaaggggaacttggggaactgttccaaaactgagcattcacccttttctcactgctgagaaccgggtgtccctgggttccagcgtctcggttcttcctccccatctaccccagccggagcccagaatcctcacgttctctttgcttcactctgcccataaaaatcaagcagccaataaaccatttcacacaaagatagaaacgactggcggagtgaaatactgtatatactttktgaaatttcaggaccaagtggatcatcgtgtaagcaagggaggcctaatgatacctatcaaaacaagagcctgaattaaacaacaacccaacccatgggtcaaagaggaagtcacagacgagatgagaaaacagtcaagagttgatgaaaaatcaaaatgtgtgagatgcagttaaagcagcattctagggaaaaatgtttcaaatcaatagtctaaactttcatcctaagaaacttagaaaaataacaaattaaaccaaaagcaagcaacaataagcaaataagaagcagaactcaatgaaatcgaaaacaaaaacgagagaaaaacatgaataaaatccaaagatcaagtaaattaataaagctctagacagaataagagaagacgcaaattgccaacatcaggaatgaaagagaacatatcagccgggcacagtggctcacgcttgtaacccaagcactttgggaggctgaggcgggtggatcacctgaggtcaggagttcgagaccagccaggccaatgtatagtgaaacctcatctctactaaaaaattacaaaaattatctgggcgtggtggcgcattcctgtagtcccagctacttaggaagctggggcaggagaatcccttgaaccagggaggtggaggttgcagtgcaycaagatcccgccactgcactccagcctggacagcagagcaagactctgtctctccaaaaaaaaaaaaaagaaagagaagacatcactacatattttactgacatgaaaaggatagtaagagactataatgaacacctttatgccagtaatttggataacttgacatattttaaaagtcacaaatagcaaagataacctatcgccctttatctgtcaagcccagaacctgtctctggaatcaaaagacctggattcagattctggatcttttacttaataacttttcactgaaccttggcatccccatctgtaaaacagagataatctatcactctctgggcagtgagaggaaccagggcggtaatacacctgaaagaggttatgcgtgtatacgtgatttataaactgtcgcacacttcccactcttgctagttgccattaggatgatttccaaagacagctttagaaagacggatctgaatggtgaaagtctgggacacgaatggttgaggagctggctgctgggtcctcccctgggctaggctccaccctcatttagcaaacatttcctggggtcatgcacagcattgggccaagccctgtgggggccaaggacagttccgagacacgccccagcccctcacagttttttgctttaggaaacccaaggtttgcactaagyctctcccaacccctgcgccctcccagcccagccccacttgctcttgtctctcctgctcacctccacataattagcagggaagatgcccaggcggccgtggtgctctccctccagccagttcttgtccacctccttgtggatgtagacaatgtcwcccttctgcagagtcagctccctgcaggtggggacgaggaccgcagggtaagctgaagccttcccaagcctccttcccttcagaccctgcccaacacaccccagtyctctcaccccttggggatgcccactgcagcccagtccccctccccatccccctctgggatggcagagattgccttgggtggaaggggagggggaggagggcgcttacttgggggactgcgcctggaagtcaaacttgagcctggcggcctttctctaggcaggggagaggacagagtgggctctctcagttgggcgggtggcagatccaggatggcagccttgggaccactccaggtcccccacrcctggtcycctccttaccttcttctcttccctcctggctgggctgccccctccgttagaggcactagggtctgtggagaagcacaacctcagcttggggaggccatacctgggggatggggttgcacccccacctagggcaggcactggcagaagcaaggggctctgtgacctgccacccctggggcaccaacatgcctggtgggtgggcatctccgtgagaaagagagcagggctgggtccttacctcgggttgaggaagggtagacaaagtccctccgacctaggaaggggcttcctccatcagccattttgtggggactcagggaccgggcggaacccaggtaaggtgcatgtgggtagctggagctccaggctgaggccgggctgcacggggcacagagactgagcctccagcctggggctccgcaccccaycctggtcacccctagaccgctctgaccccccatcgcccccatccctgccacctcctcccagggcgtctcccgggtcctgggctctccacaggatgtcctacttcccgagtcgctgcgcggggaagggtgaggcccggcagggcccagcgggagtgcctgggccgtggcggggccgccctaaccgcgctgcgcccccggcggccgcgaccccggtcctctgctaggagttagctgccctcggtggcgcgggaacggcgccccgcagagagtggcgctgcggtccctcccggacacggctctgcggttccttcctcccccggctgggccccgcgatcgcccccgtccgccccgcccggccgcgccacgttccctcccgcccggcctgggacagcccccttcctcctcccgcgtctcccactcacccggccggrggccgctgctccggggcccgtcggggcgccggcgagctctgcgcggggaaacggcgcaatcagggcccgcgaccccgggacccagcggcagccgaggccgccgcctccggaaaagttcgcggctcgggaggggaggagagcgggcgggacgcggggtcctagaggcgcccgcgcggccgatcccgggagcggggcgggaactaggggaaggggcgggggtccccgaggctggggcccgggggccggacggggcgggcgcccggtcgtcgggctgacgtggagtccgcttagaaaggctcctcggggtcacttgcgaaagtcgacgccctgtattttatttatggaggagcgagcccgccagcgcccaggagggcccgaggccggtgcgcgccgctggaggccggacctcggctgcccgtcctccgcccagcccagccgccgaggctcccggctygccccgaccctgcggtcgccggcgtgccccgcgggtgaaccctgggggctggtaccttgggggacggcagtcgggtctcaattgcccgcaggtccttgtccagctcggcgctcagctcggccagctctctctccagcagcacctgggggcggggagaggctgggcagtgaggggcagcgcaccgtgggggtgggaggcagcggtcaaagatcgactgtgaaaagcaaggccagcgcaccgggccggcgtaagggcaggcctcagcgcacgggccgggctcctgccaggaggtgtggcccagggtgccaagagggcatccccgccacggcctctcacctgcccagcacgccccgggagtgcctacgcgcttcctgatcccgcgattccgcagtcctgccagtttctgccaagttgtgtctctgttacagcaccaatggggttccccatttcctctcccatcttctcccgccctccaaggcctggcttcactgtgcccatccaggttcccccgccaccccagggaccggagcccccacccccacgctgcttcctgccagcctctgctatgggtcttcgccgaatcaggccctcggagcttctcaagggtccagctccacctccaagaatatttcctgataatcccagtgcgcactgaccactcccttttctgctcctgctttggccaacacatatttatttaacacatgtttactgagcgcctcckgtatgccagccactgtcctgagtgctggcattacagaaataaaccatgygggactggagagagagctcttagttcgtggcctatgcccatggttactggggccaccaaaaccctaatctccctggtttatcaggctgctgtccccagcaccctgcagcactcacctcaatgggctgggagggcttctcaccagggtsgtccaccagcggtttcttgrgctgaagggtagaaagggtgtgtcagagcaggtgaactcactttccaaaatgtatcagctgagggtgcgtgcacaccccgagagccagccagcactcaccctctgcccagtctctagttcctgcagaaactggttccaggactcttccgtccagacattgtctactttttcccggcgtctgagcacctgcgtggaggtgggtgggtgtcagcttgtgaagagggctactgggacactggccaggctcaaaatgcaggcttgcaggcccctgcccttcccctgggcccacggtgtcctccaagggattcaagctgaaaggacatcrtggcatagggtcttggccatacggcatacagctggggctgaccagggactatgctgggtgggctacctgatttgagggctgcagcacagtggagaatgctccaggtctgtagttgaaggtgcttctaggtaactcttcagagtggtcccagcttcttctaaagaaagggaaggacatctcttcagcttccttttagggagactgaggcagaagccagcacacagccctctcaccctgcccttgtccctgctgtggggtctaytctgcctctgactgccctgccgttactctggaagcaagaytaaactgtggaagtgtgtgagctccaagcttaaattccagctctactgtttagtggatgtgtaacctttgaacaagttactgatccctcagagcctcaggctcagaacctgtaatatagaaatgatttggtgagagaacatatatgaggtgcccgggagaaggcctcacacayatatttgctccaggtgtggcccgaccctctcctgtgggcctttttgctaaagtgtcctgtatgtgtgtttggtctggccccatgactgtggctatrtgcgtctgtgcagctttgaagaagctggtctttctgggtgctgtggctgagtgatcgtacacccaygggcaaggaaagccagaggcagcyctgccctgcagctctggccaagttatttctgctccctgggcctagttccatgagggtgctggattcagtgactctgtctgtgagaccaccccagccactgcagtacagcatggacacatctgccttagctcccctccagggccccttgctggctggcttacatggaatgttccagcctctgtttgaaagtttccactgagaggaaccactgcatcaggcttatcaaataatacaacgtctgaccaagggttgggatttgttggctgtaataatgactccattctgattttggtaataataaaagtgactgtgagaatgtcattcctaacctaaggaagcagtaatcataattttttttttttttgatacggagtctcgctctgtcgcccaggctggagtgcagtggcgcaatcccggctcactgcaagctccgcctcctgggttcawgccattctcctacctcagcctcccgagtagatgggactacaggcacccgccaccgcgcccggctaattttttgtattgtttttagtagagacggggtttcaccatgttagccaggatggtctcgatctcctgacctcgtgatccgcccgcctcagcctccaaaagtgctgggattacaggcgtgagccaccacacccagccttgtaatcataattaagcctgtatattactaatgtttgtgcaggcttgctatgtgcaaaacatgatgcatgatacacacatgatcacactgaaccctctgggcattaccacttaaaagatggggacacagaggctcagactgagtgaggtacccacagtcacatggctagtggcagtgcacaggcttaaacccagaactcagcgtccaaatcttgagccctttgcctctgaaccttatcggtgatgcccagagctacgggccagtttcagccatgctaatgagacgagtccttccctgcaagggaataagaaactcaaggatttaactctgagagcaaagatcctgattcccacggtggtgctgaccccgccagggccccagcagccgggcggagcctgtggtttgcacagaggaaaggaatgtcatccttatccctccaaggggctcctctctctgtgctatcaggctggaacttgggttcttccatatcccttgttttctctcaggtttcaaagtggacagcgccaggtccaagttcccctcaacagttctgtccacggctgtcctggccgccccactcccggtctcataagaccggtgggatctttggggcaaagakttcctgctgctgaccacaaacgcatcacaggcgttcctggccaggagcgggtgccaggtccactcttgcctacccttccccccttgaccctgtagggaagagagtctatgggggtggtggagacccagagatgggacagrgcccagacggacacggaagtgagaccccactcstggctgggctccgaggctgtgccggctgtggtcacgagggggcgcccgtcccatggtgtctcgcgggccgcgcccctccgcagccctcggccccgccccactgtgctcacccactggaagatgttgccgggccgggcctgtgggcaggtctttgctgggctcctagatgcctggggtctgcagaggaggtacacgaggaaagcattgaaggtgggaggagacaggccgtgactggggctgagggtgcctgggtgattatttagagtttcagcaccacccccttgctcctgggtggatggtgggggcagggtggttggtgctcagggacactgaacgcgggcattgccctcagagctttacgacrtttactacatcttcaaaacaactccgagtaggtgatgatctcatcttatagatgaggaaagggaggcccagagaaatcccggccagggagtggcagagcgcgcgttccccgtgcaagctgaggctgttaattacyacctaccgggggatttgaagtgctctggaaatgagctataaaaacctctcaggttgaactgagccaactggagagccccaaagccaggcggggctgcgagtcccagccccagggaggggcggaygcaggcgcagggctatggcaggcaggtgggcccgcatcccctcacctctgggtggctcctcgaaggtccagtccagctgcaagtctgcaggagcagaagggaccaggtcatgggacggggcagaaagcaagggcagggtgccctgggaggcaacctcagccgctcccaacatccctagagtagggggctgagggctgagtcagggcctgaagaatgtcccaagggagggaaggaattaggagggcagctctctggagggcttgaaatgcctctggcaggcttggggcctaagcgagccaagcgggcagccgccttgcccaagccctcctgctcctccctccctgttcccacacacaccctctcctgacctttgtggacttgccctcaccactcaggctggggaaactcgacttgcaccctcttccaaacgctttccttccccatttgccaagacccactcctagctcctcaaggtgcctgggaatttctgrggcttcctggaaagagctactgacccactgctccccacggcgcgtgcgcgcgrgcacacacacacacacacacacacacacacacacacacacgcatgcgctgcaacggcacctgcctaaacgccagccacatcacccctcactggaccccacaccctcctctgactcctggatttgtctgctttcccccatagtaaactgtaaccagtgaccataaagaccacaccatctccaatccccctactccccgtctccctaaacaggcttttgctcaccactgcccaaccactcactcttatcaaggatgctggtgacctccacgttgccaaatctgacagtcaattctaagtattcatcttactcaacccatcagctgcatttgtcaccactggtcacatttttcttttggaattccctttccacttggccccagggagatctctccgttttcctcctacctccctggctctaccttctcagttgcctttttggttccgcctcatctctcaaacttctaagcatccaggtgcgtgggggctcagtcctggggtctgtttgtctctctatctccctaggtgatcttgtctagtcttatggattgttgtttttcagagacgggatcatgctatgttgcccaagctggacttgaattcctgggctcccaggaattgaattgaactcctcagcctgccaaatagctgagactgcaggtgtgtgccaccacacccagctagtcttaaggcttttaaaacgccrtctattcccatgtttcacaatcttggctgctagttaaaagtttaaagtttccccactagaattactggggaaactttaaatcaaaatctctctcttctttttttttttttttttgagactgagtcacccaggctggagtgcagtggggtgatctcagctcactgcaacctctgcctctcaggttcaagcaattctcctgcctcagcctctggagtagctaggattacaggtgcacaccaccatgcccaactaattttggtatatttgatagagacagggtttcgccatgttggccaggctggtcccaaaatctcttttgaatgagtcccaggtatttccatctgcagttttagaccttgtcccgtgaactgcagacttggatattcatctgcttactcaacctcttcactcagagggaacatgtgtctaaaactgaacacctcttttctttttttctttttttttttagagacagagtcttgctctattgcccaggctggagtgcagtggaatggtctcagctcactgcaacctccgcctcccaggttcaagcaattctcctgcctcagcttctcgagtagctgggattacaggtgcatgccgccacatccagctacttttttgtattttttagtagagatggggtttcaccatgttgcccaggctggtctcgaactcctaagctcaggcaatccacccaccttggcctcccaaagtgctaggattacaggcgtgagccaccgcgcccggcctgtgaatgctactcctacagtcttttctgttttgacaaatggcaactccaatcttcaacttgctgaggtttaaaaccatccttgactctctcttccaagccacgtccaatccatcagcaaattccagtgactgcagtgtattcagagtctcatcctgtcccaccagggccactgctaccgccctggtctaacacacgattatctctcccctggattgaagcaaagttgtaaaggtggccttttctccctagcccttaccaggcaagggaactggttccaccattcctttcccaccccacagccaggcacaatcttttcagccattacttgtcagagcatggcactcttccgctcagtggctcctccttatttgcaccgtaaaagctgaagtccttataatggcccacaaggccccacgtaccctgacaccaccacctctctgactccatctcccaccacatgctcctcgctccaggccaggctctccttgcccgtccagaacatgcttctacctctgggtcttcggagctccctttgctggaatgcttcccccagctctgccaggccgactccttcactccctccatggtctgatcaaacacsgcttacaaatgaccttcctggccgctcctgggtgaaggagcagcctccctgcatggggcactctcccagtctggctttatttttccctagccctttccaccatctgtcatgtcaaaggtgtgtctgtttattgtgtgacttcctttgatctttggcacctagaatagtgctcagcatgtggtacatgctcaatagatggtcaaggactcactgaatggatgggtgacctcggagccagctcataggcacccccagggttggctgcattttgagttgtggaagaaagcaatgcctccagtaagggaatgaccgctaacagtggcattccagcttggcrgggaaatcagagagggacttaaggaaaggaatggcttctcagtcccctcagaggacactgtgggacagtggctggtcaatgttcttcttggggatgctctggagaccgctgctggccccgagtacagggaggggactgcctattttcaggactactcattagagcctgggagaaggtggagaagaaccccttgagcagctaagtccccttttctttccctgtctctccaagccccaggggccagaatccactttggcagggagagggccctggaagggtatcttacctggcattttccggtgaatctgctggaacattctccggtaccagtctctgggtctgtcaacgctctgggatcagaaaatgcaaagtcagtcctccctgcttrttcaccctcccaatttcaagccacaaaaatytttccctagtgagtcccttctctggccatccctgaaccccccataggtgggctgggaaatgcttctcttgcgatctctttaataacaatagcttcatgtaacacgtcctatataagtaagatatatgacaagatctccatcgaagtgtatgcaataatgatgttatgagatttggggcaatttacattttttctctttgcttttctttatgtctagtgtttctacaaagaacatttttcttttgtggggagacagggtctcctgtgtcacacaggctggagtgcagtggcatgatcatagctcactgcagcctccaattcctgggctcaagcaatcatcctgcctcagcctcctgagtagctggaactacagtcgtgcaccaccttgcctagctaattttattttattttttttttatagagacagggtctcactatgttgcccaggctggtctggaactcttggtttcaagcaatcctcccgccttgacctcccaaagtgctgggattacaggcgtgagtcactgcacctgggccaaaaatgacagcaataatgtaggagtgagatgcgtgtttcacatcacctgcttcatccaagcctcaaaacagcctcaaaacaggaagggaatgttaccagctccaatttccagatgagaaaatggagctggctcaagacacraaggtggatggaaaagggcagggtatccccagtcctaactggacccccggatccttccacgcttgccacagtgagagaccttctcacacaagactcactcactcattcggccggtcagtcattcattcagcaaccatttcatgagcgtcgtgrcaggccctggggatatgaaactaagagagggtcccctgcagcctcaggccttacagcaggggttctctacctttgaggccctgatgagagttctagatctgtaccccgcacaaaccacttgagcaactcaggcacacgagggtgtctgcagctttatgaggtttacagccgctgaaccccaccacggttgaacccctgcttaatctgggatggtttgggtgcggcctttattgccccacccccattttaatgcacagaagtgcagctccctgtagatccctgggccccatctctccgtggcccccagccctggactcacggatcggggggcaatgggcatgccgctctcgtccacgggcccgattccctcgtacttgacccagcgcttgtcccgacgcttgctgtccttggtccacgtggctgaccagttctgggtgtgctgggaggcagggatctttgtgcttgcagagggcttgctcccagggcctggccaggtctgataccacgcagggtctgttgggtgcgtgcaggagagcattagtgaaaggcaggggtctccacctgaacctgtgtgtcccttagctcctcagagcatggatctctgtgggttcaaagtttcaacatcgccttgtttgtttgagtggatgactcagagcaccacgggcctctgtttgtttaagtgaatttaaatggatttgatcttgagaatgccgtgcctggccctacccccatccttctttcctgggactatcctaagtgctttcagaataaggtctggaaatcattacttgtagagaatgcaggggacatcccagctggggtgtggcagtaaagatgctgggcttagaggggacagacttgaattcagaccccagctctaccacctattggctgccatggcctggggtacatcagtcaccttctcagtgtctcagtttccacttctgtaaaacaagggtcattgtgacaaggattcagtgacatctagcgtgtgtgactgtacccagcacagtgcctggcacacagtcgagaggctctcagtgaaggtcagaaacccattccccagacatggttgtgactgagtcctcaacttacccataagtgttagcctctaagtagctagggcagcagaataagggctttgaggccagatgtacaagtgtgtgaattgcagctcagcctctatggctgaacatctctgcgaatggggttccttactgggaagctgtcagtcatcatcacccctactttgtcaggatatcgaggggttaaacgaggtgagcctcgtaaagtgtttttacagtgtccagcacgctctgggtgttccataaytgtgtgggtgttttttttggttttgttttgtttttgtttttgttttgagacagttttgctcttgttgcccaggctggagtgcagtggcacgatctcagctcactgcaacctccacctcccaggttcaagtgattctcctgcctcaacctcccaagtagctgggatttcaggcacccgccaccacacccagcaaatttttgtatttttattagagatggggtttcaccatgttggccaggctggtctcgaactcctgacctcaggtcatccacacacctcagcctctcagtgtgtgtgtgttttaagtgacagggtcttgctgtgtcatccaggctgatagagacagggtcttgctatgttgcccaggctggataattgttaaatgaataaattcctttacacagcacctgtcttaggggaatgcttgataaaggatgtcactttaggagagacatgttcagggctggcctgcacccaggagttcccaggacctctggactgggatctagaactgcctctctaacctcctgctgggtagcctgttgggcctgaatgggacagtctccaccccttcccaagccaacagatacccacatcacctccacccttccatccccagtccctgtgggaggtcctccggcgcccagggctcctgcacgcttcctttccctggcaccaggctggagggcaggggaagggatgcatcagcctgctctccccargcgggtgtctcttgcagagtcagcaggctccgcagggaggggctcatagtgagcccagaggcctctgaggaacctcctcatggccttgagaaccccatctccagctgctgcccctcccgcttgacacagggcagtgccagatggcagggccctgaccctccatctccagcatgaggctcctgagcagacctacccgggtgctgggaagcatctcgtcttggtgtgtagcccccattgcacacagtcctgggcgcggggtcgtggaactggaaattaagggtgttggagccaccattccggatcacgggcacctgcggggaggggccaggagcggcagctcagggcccagcagggcgggagggagggatggctactaggcacagcccacacccctcggtgacagtcccaggcccgcctgacgattttgtgggaaaccagcgaggccccccagagctctcttcagccctccctccatccctttcatcctcctgcccccacctgacctgctagcgtcccaaccaactccgggcccgcaggacaccctcctccctactgactcactcacycgtgtcccccgggaggaagaccctatgtgggactggaggtggccagggatgaagtcgtccaggctgagcccagcgcggaggctgcggggtgggccctgcatgcttgggtcaaggtgggagracwccgggcaagccagctgctcctctgcgtgtcctctgtggggaaggaggaaggaagggaaagccctgctaggctaggctgcccatgccctcttggctcgaccctgggataggggaggaggggccggctgtgggagggggtcaggaccagctgggtactagctcaaggacccaggaaacaggccacgccaggcacccgcctgcaggctgcccgtgcctgccggctcccaggggcacaatggaccacttgttaggcccagggcaggagctccgggtgggagtgggggagggggagcttgggtgaggaggaggggaggggctggccaggagcccgtggggctctccctgcacgggtgcagctggcttccccactcccccggagggaaggcgcaggggaagtggggcagccggcagagagggggcctgggaacacaggactttgtttcagttccctctgcctcccccaggccgtgtgggcatctcttgcctgcgggcacaagggattactcagccacccgcccactgccctccaggaagcagtcagcagggccttaagcccaatagggccaaggggagcgtcgggggcatttccaggcagcaagacccactcttgcgagctcacagggagcatcgggcccttctttggcctccttcacagaatgaggactcagagggctccgggtgggtggagacagaagcggtgggtgagggcagagctgaacctgctcatgcccatggagagttggtgctgagtgccctggggtgttctgcatgtgggcaaatgtgcacgcacatacacgcgctccctggctccactttctcccgcccctccaggctgttttgtgagtgcagggtcttccctggcagcaccatgcctgcccacagccagcttcttctgcctcatcccaaggctggggaaggggaagggagccctaggcacccagggaatggaggggcaagaggggagcccagagtgggggtgcaagaggacaaaaaggggctcccagtttggggtgtccaagggggctttttgacccagagcacggtgctacggcgtccatccctccgcgtcttggctgctggactggaccagaaacagccaagctctgccmctgcccaggactggatggaatcaggtttgcctgtgcctgtggggtccttgggggctctcagggagggctgcaaatgcatcgggaggagctgtgtgtatgtgtgtgttggaatctgggtgcagagctgcgaatatgacttctggggggaccaccggagggaccacatgagctgcatgggggttgtgggtacagaggggtgtcagctgaacagtggtgggaggtgcagtcatgtgagcagtggaagagttgggggcccagaggggatgaaggtagaataaggctgggatgactcagcccctggacccagctcctgcccagggctagcgagggtgtagccaaggctgggggcagctccttgtctctggtttgagtttgtggggactcctgacatttgagttgctgcgacacagctcttctgtgcccatgcctgactggggggagtggagggctgaggctggaggaggagcagctccccagctgggtccaattaggactcccaccaaagcaaaacaggcagacacaccccagtccccacactccacctccccttgcgggggggagttgaggcagggtggggtggaaggtcaggagacctggagctggtcggctcctcgcagcacccctccctgcccagctgactgcttcgggccaaattgcagctcagcagctgccgcctgggccatcagctgacagcgccttccttccctgacctccccgcccacctcgtgctcrgtgagaactgctctcttggaggatgggtagggcaggaggtcccccacgacccgtagtcagaggttgcttacccttggtgcccccatctgccccttctcaaccctgccccttgtgtcgccccccaccacaggaacctccagggaagggtggtccgagtccttctcttggcagccaggtcaggagacttagggaggacttacaaggaagagggcagcatctggggactggtcccccatgtagcagagagcggaggggtcctcccagaattcagacckcccctccaggcaggcagccagccccgggagcggggagaggcccctggagcgggrgaggggaggcggctctgctggggtgggcactggcctccctgctctgaacactgccctgaccttgggtgcctggccctaagagctttcccaggtatttctcagcgacaaggccacgtggacaaggacagcttttcttgaatttcgctttttctggtatgagggctggtgggaggtacttcccagagtttgggacgcggaccccggggaggggctaggtgcgattccctggggttgggcacggatccctcccgccggcctcgcctactccccgcccctccttgcccggacctaccttccccggcgagcaggtggctgggcccgaggccgcccgggagcgcaggagcatccctgcccggctgctgcctggcgcgggcgctcgaggaggaagggcaaggagaagcgcgggccgtcgcggccctcgtgacygggtcaggacgggccgggccgggccgggcgccggcgcaggaagagggaggccgaaggggcgcgcgccggaggccggaccgtgagagtcgcgcggcggggcgggcggagtttgggtctcggatctggactgcgggccggggctgggccggagaggagggacgtgcgagtgctctccgtccgtcggggcgcgcgcggggacactggtggccccctgccgaggaggcctggccggcggggaggcggcgccgggaggggccgccgagggtccccggggagccctctctggtttcccagctgccatcccggcccctaccgcagggctggcgtcggggaggggtcgggcggcccgacacgggccactcagagtttccagcgacatttccagagtgtgggaagcgagcggcctcgcagcggagccaggacaggggcaggagcgatgaaccgggcggagccaggacaagggggcaggagtggtgaactgggcaagccgggagagacggacaggccgggagcgagatgagggcgccccgcaggcagagtggcggagcggaccaggggaaggccccgccgcccctccgcgctgggggagagggtgtgcctgcggcggcgcgcggccggtcgtgtgcaaacaaacacgcgcgcgtacactgcaaacgtggggacgctcacacacgtgcaagcacagggaggaaatcagcccaagggagcggccccccygggcgtgccgcgcccctaaagaggataagggtggggtccctttggcggggatgggattaggagggtcttggtgttcccagacactgtgtttgttttgatctgcctgcttttccgctgttctcgctgctctgagctgggtccccagagccccggcccttccrgctccccatccattctggtcatcccctctccckgtctctgccccaagcctctgtatggcacttcagaaagtgggaatgcttaaggaacattgaagraccgtggaaacactctggaatcctttctggcccttgagttggctcagggatccccaagccccaaaccagccaaccaaccaacagttactgatcaactttagctacgagctgggagtgatcaatgctaaattatgaaaactaacgtaatctcctgcattcctactgggtgtcagactggtgccagaggccacgaggagttttggagtgttttccaagctcaccactcaactcaaagtttggaaagaaagagagtagagaaaagactaagtgattttcagtccctaccaccattactgctttagtcttatcttctccctcgttctggtaaagaagctctccccgttgccttgaaacatcacatgtgaaagctggaggagatgtttgggttgagaagcttcagataggcctgctggcctctagcgcctgcggggctgccatgtggacacacagctgcaccagcagcagtgggaccactgggggacacgtcatagggaagcaggtccaaggcttcccaggacaaatttttacatgattccaggggttctgagtctgccagttgtggggcatctatgtaaaggcaactgttgcactgagcggggagctgaacaagatgaccttgaagactccttccaagaacctctgactctccaggaaggcggagagatggggatggcaggggcattgctgtggaggacagctgagcagtgggggaaccctgggacacttcttgagggacgcagcagtgcactgccccccaacctgaagcttagaaaccttcttatccacgccaggtagcctcttccctccctcagggataaaataggtgcccattttcttagacacgcatttttcccacctgtcagggtccttgggactaagaaggaccacatcgctttcactttcttccttcttctcccaagatggtgaagctgaagctcttccgactccaggaatcctggccataccccctcaccagcagcaagcttctcttattctctagggctctgacctggactccaagataaatatttagtgtagagggtgcagcagagctgacaaagttccccacttcctgtttctcacaaagggaggtggcagccatgggtaaggagctggggactggctaccagtttcatctctatgggaatcgggcgttgagtaaacagctttgcaggaggaggcggggtaggtctacgggagacctgagctttcttcctgagccgctttgacttctgcctgtctacttaggcctgggctctgccgggtttatcacctctctcaggtcagaatccaccatgttccgtggtgcccatctggcctcacagccgagaggatgggagacagtgggccacagggcagggaaaacataaggaaatttgactgattcctccctttctgcccttatctaaagagaagaattccttctctttgaaaagtagattaaggggggaaaagtagcagggtttggagattgagccaggaaccaggtgtctgatttcccgacgcctccctctagcgtcagctccccttgctgcctccacagctggcacggttagggagaggctgaggctgggaagattgtcctagataaggcggctggccggctggctgtcaacaacagaacagattcctttcctttccaaatcccactgcactctctcctttgcatgcacgactcccctgtctaagaggggcctccctccctgcaagtcgcggcttccccacctctggcactgccctttgtcaggggctgcctctgccttctcagagccacctgagccacagtaaacacagttacataactgccctgttttcccagctacctgatcccaggcatcagtattccccgctcaagcccttgaggctgcaccttttgttctgtgggtagtccccaacatcaccgtcaacaggggtctgtccacaacccccacccccctgcaggggaggattagccacgggactaccagtaaatgtggctcttcacagggagggggagaaggcggtggaatgcgggtcactctgaaaagcaatctctgtcaccaaggatgacaaatgaggggaaagagcactgaagtgaaggcggggtgagcggggtgggcagagcacccagttttagttctcaagtgggaaaagggaagccaggggtcccagaagacatgaacccggactcagttcttgaggagcgccttgctctggtgctgggaatcggcaattcagatgagtcaccctctgagatctaccctgggcagctaggcggccctagctctgtgcctcagtacccccatggagatacagggcatctgctcttcctttcttctcctccccagggatgaacttcaggtgctttgagtagattttttggggggttttgctctcagaattctgagtgttttcttccttcctctaagctgagcagtcagaccagaaggggttagcgcagaaagcactgcccrttyccagcagtttggacttctctagaaggccacagtgacacaatggtgaggaattgaaaccaagtcacatggacataccagcaggaatctggactatgtttcatgccctgggctccatccctttctcctgggtcctctgttgattcctgctcctgcaaatgttgccagccaagttctactgatggccctttccatgccaaccactcatgggaacaggagcaggcagaagaagggagtgcaaatgacccattktggggcttcaaagggcctcctatgctgacaatggcatgacgtggctcatctrgaattcaagatttctggtagagtcactgtagagtgagggatctgagtgaaaaaatacccagtacaggtcaagtatgatgggtattggggcctgacagccaggatgggtgcatggaaccccataggaatagcgaattaggctctcaggcttgcctggcacagacctttccatagcacacgcatgatgtataatgggcatctattctgggttctcagggccaatctcccaaaggctgcgggagaactcarccgtttgcccaatttatcccgcctgtcctcaaggaagttttgatactgacatcacatccacggctgttctctcttcctcttttcatggatgagcaaacaagcacaatgcacagacggggtgtctttgagaagaactgagctgggtgaacctctcttagttytcaggaaagatgaaacaaacaagtggctgtcagstctagaaagtagattttataagggaaggataagtaagtgatgacctcagagggaaaaccaagccaagtcaactcagccacaaaggagggcacagacccaggagctgggaaattaggtctgcatcagccttctttcccagctcaggtagactgcgatgggtaggataagagggctgatctgttggcccagtggataccataaagtacggctctggcctccaaacaaagaagaaccttgtcttcccacctccttgaattctatgatgaaccttcgccttaatagcatcaacattaaaaagtctgcttcatttaccattaaattattcatctactgtatcaaaattacattttctttctaaagcctgaaagttgtgataaaaaaaaaaaaargcaagaccatgcaattacatgcagcaggcaacaaagtgaggaacagatctagatggagcaacaggttaatatgaatttgcattgaagtccttcatttccaggctattaaaaatctttccacaattccagaaatatgggcaaatcttacctaattttactgaaggtttagctaaggtgtagggacattgctacatcaggatgccactgggataacaaagaacccaatgctactcagcttattggaaattagaaacctgggcccgttttctggcctgtaaactgcactgtggcccttaatgtggttgtatttagtgtaaaagtcacctcacttggacctggcagtgctggatttagcttttctacctctactgccataacctgtagagtcccctcactgacacactttcctctccagggccctggctctttccctatccccaattccccacttgcccaggggagcttgtttttccttgtgaatccacagcacctcatgatatttctacttttcagaggcatgaaaaggctagtctgacacttcccgttcttggtaggccaactccacattcaaatcctctttggctgccttggcttctccaagatggaattcaccatgtctattattaggatcacaygcacagtcattaaattacaagagtacaaaactatttttatccttggtaaacaatgtatgttttctgggatgtctttcttccttttcttcaagtagtggcctctattggagaagctgcagagggggctgggacttgggtaagaaggaggccagggttggggagtggattctgagttgggagaaacagaaacacgttgtggccaaccatagctgctttaaaatgaaagggctggagagacgaaagagagaggtcctttttattgtgatgggattccctcccttgggaggggaattccttgttatcatcagagaccagaccagacatcaaaagccaggctttctcctggggtctggaattattaaatgagtaaaagccaaatataagtacctccaccaggaaatacaggaaataaagacacagggagccaataaagttatcatttaagggtgttttcttctttttttaaatcttaagattacctctaatttatagtacaaaagtcctaacaaattaatttcttgttcacaaaaaagacattagatgatttcrgccaataagtaacatttccctcgccttctttaacataactgaaagcaagaaaaagtaggcaatctctaagcacaagcaaataatccatcattcagaaccttgaaaaaatatcacaccaccaactggtctgacgtcttgaccacctcaccatttaggaaggaatactggggccccttcttggaaaatgcctgctgacagaactatygggaaaaacagctatgggggtcaccatgcactgagaaaataaaagttagggatttacagtgtcatcctcaaaaagttctgtgacaaaaacacatctttattgccccaaatcaagatctatgacaggcctgctcctcattacatgcatttcatgttaagagtatttggagacatctacgtcaagggagtgaaggaatgtgggcaagaacttactggaaggcagtgtgcttggccctacttcagagctgctcagagggacagtccgcctccatgtcctcacttcttaatcttaagccacctagacttgccatgagggcatagaagaggagatgatgcataaccctgtctcagacaaaggtgttatttagcaggtcttgccaaggtggcaggggcgtgaggccaaggcctcccgggagggaatatactctccagtatcatctttacctttgtgactgcatagatgaaggcagctaacactgaccccattcactctcgctggctagatataggcaggtcaggtcccaaaccccaatgtaatataggctccctctttcacactctgtcaatggcacaaagccctattgttaatacagttctctactcacactcaagataagagtaaacaacactgtccttcgactacacaactttcttcctctacacacatctgctctgacagctttcctccaggcgtctcatcacagcaatactgaaagggactgtggcaagccagttttgggacccgtcctccaggtaacccgaccctcctcaatccactgctgggccttcctaggctgtcctttactcaccttctagcaggtctcagaaaagatgtggacccggtgccagacaaggtggaagccatggttataaccacaaacaatttaggaaattggagcccatacccacagatgggccctgggttcaccctccctctgccatcttttctgcctgggcaaggaaagctgggtaatgctttaggagaaacttgggttccactgttactataacaactagaataaatattggggattctagaatggtacctcaacaagtctttatggcttaggaaataattttcaatgcagagatcagagagaaaaacccaataattaataaaaagaaaaattatgaaatcaaccaatctagggcaagctcttcctaaaccaatttaattgattggtcacccagattggtcaggatgaaaattcttttttttttttttttttttttttgagacggagtctcgctctgtcgcccaggccggactgcggactgcagtggcgcaatctcggctcactgcaacctccaactccctggttcaagcaattctcctgcctcagcctccccagtagctgggattacacgcatgtgccaccacacccagctaatttttgttatttttagtagagatgggctttcaccatgttggccaggatggtctcgatctcctgacgttgtgatccaccggcctcagcctcccaaagtgctgggattacaggtgcgagccaccgcgcccagcttggatgaaaattcttaaaaggttaaactttatagatatggtacagttgaaaattttggagatcagctaccatatttacataaaatagggcagggtagagggagcagattttagctttactcattctgaggctggagagactcctgaataatgaccatgaacagcaagtccagctgtgtctcatgcaggcatggcttataatatttttcctatagagatcagctgtgcctcaaaccgtgtgtttttaaagcactcagagggaagaggatctaagggacaatgccaaaaggcaaaaaaggccccgaaattatccaatttttaaaaatcttcccttgctccttaatgacattcaataatagtctattgacaaaacaaataagggtttctctgttcctattttgaacaatgtcaggaaatcatccctaagttatcaggatggcaaagaaagctaatcttaagaaggcaaatctttgctattgagagaaacttgcttcattgaattgttcatggaagaaccaaaaaaggcaatgaaagacataaaaaatactgatgttcctggagaggctgagtcttttactcctaggcaaggagcagtatcaagctcatcagagtgtgataagcaattcttaccttgccaatcaatatccagtcacaaaagaccagcaaatcagcaatgcctctacttgtaaccaaagtgtcaccttgagagtttaaggaaaacggaggctatttttgttttatcattctattaaagaaaacacacacacacacacacacacacacacacacacacacccccttggcttattgttttgcttttgctctaaacattcagaacacggaaataaaaaaaggatatatgttttgaacttacattagatgagttttcaaatttgtaaaagaaataatcatctgatcgatttaaatgtcctgtgatatgtatgtcactaaaagtgagaaacctggtccatgtgaagcatcattttcaaaatggcatttcagaaaagtttacaaaggagtcctgacatgcctgaggaattgttttgtttttgttttcctaaatgggagaagttgcagaaaaagaaggtccctgtgggccttccacaaggaaggtcctgtgaaggaaaacacaatgtaactgtttccagtatctttagcacacacagggggaaacattcaataaaacagaagagactttgaaaacaccaaaactgcagaactttgacagcaattaaaatgtctgtttaatcatggccctagacaggaaaagtagtcttcgagcaaacccagggcagggtccagccatcttggaagttgttgtttacattaaaacagctacagaacggaagggataactttatctttagaattcaaccgaattttcaaacttaacctcctctaagagttagtgctgctctaaaacttactcaggttttcttgaaccaggaccacctacctctctactctggctgattcctccacagctcagagggaaccagtgaaatactgtatataattttgtgatggttctgtcaaggaaacttgctttatcattctgctttttgagacaatagtgaagccattcctaaataatcatccgtaataaaatattattttttgcttataaggatttacagtaactatttctactactgcctgcttatggaggcccctaagagtggtttctacctgtggattgtatatatgtaacagccttaatgaaaaggagaaaagggataaggtactagcagctctgcagtctgtcacatggaatgactttcatcagtgaaatttccaaagacaggatcttttctaatcctgggattggaaaagaaaggagcataaggatatctaggtgcttaatacccgatttgagttcaacaacaatcaggaaaagacagttactagagacttttccccccttctttcacaggttttactcacaacccattcagagatcctttatctccttcctatctttttattaatggagcaatctatgcaggcagattccattccctaagagtgccttgatttctgccataaacaaatcagaaactgttagaaaaaaaggtataggaaaacagagatagatgggctaagtcttcattcttctaatgagaagtatggttttttggggaaaaaaaaaaacaccaccaaaattatgttgttctttgtttttctggtttcctggaaactcccaatatgaagtattactgtctgaaatacttgctttagtgctagactgccgcatcacaaatgacactaaggaatgccataaatgtgcacgttccatgctctgatgtaatgttcccaggcatgtacattcactgcagagctgaccaatgactattatgacacggctcctgcgatgaggctagttaaaatgggagcctaagtagccccaaaatttccttcactagttggttgtgacttgaaaatcaaactaagggaagataattcacacactacatctgaacacttgcttttcgcattccaaaatatgctaatgaaggctgaaataccattcaacctaaagagtaactgatatagaagacaggaaatcctcacttatccaatgttctttagcaagaccttcaattcacaaggggaccattgaactcttgtcagtttctactaccccagctggtttcagtaatactgacagggaacaacagaaggatgatgggaaggcacatgcgagagctgatgccaacagcctagaagggcatatatacatcttgttgtagaaggtgctgctgagggcatttatcaaatatttagaaagtgacttcctttacagaagtcacctggggttcaaaaatgaaagtaaaataatctggcaattgtgaaagctttctgaaaatctttctcctccaaagtcctaaggaaatttaaaccaatcatgcccatggtcagatgaacacattttaagtaaatctaagaacatcccttattattttttattttgtttactagaacatatttaaacgaactgagagtccagagaaagtaggttattatagaaaacatttcccttcgcccttaaaatcactggatttgggttattcactttgaagttctactatgatccagtttcccatcaaaagggaagcacttttagccactgaaatctaagaggactttcttcaatggcacccagcagaaaaggaaaaaaatgaaaaggaaaaaatcttcttgcatttgaaacgttattagtcttacatgaaagacattaccttccaaaaaacaataatgaagactgactagttcaagtcagaaacccaggtttgaggtttccaaggcccttttattaggggaagttcccctttatagcacaagacttcacaaatgtgttgacaacaatcagattcatttcttaaaattatggagaaaaaagggaaaaacaaaacagatgcactttttatatatattgaacataaattaaaagaatttataaaacagccacctttttacagaataaatgcagactgaattataaatgcacctccacgttgaagttgttttgagttgcttttcattttccaataataaataaatagaatttgttcttgagttttagatccacctgagccacggcaggactctaagtcatgaatgggctttcttcccttggtcgctcctgtgcgcagcatgtgagtgtgctgaggttacagatttcattggcccaccagcgtgtatgctatcctttcggggtggcattcgctcattaattcggtccagacctcgcgcttcttcaaaactccggatcttgtgctgaagcgagaaccctctgatggctacagaaaaacaggaagcaggtggagagagctcaattaggcagcaaagcaacaggcttaaaaaaagtttcttagcacacagcaacctcctagagaaacacacagaaaggtggctatggagcacacgtctagtgaaagtcatgggcaatgtctgactgaatcagtcttggctgcagctactgcttccttaaagcccaaagggcagctgaaattgtgaaagtaattttcataaaagctctatatgcataatcatggtagacatatacctaacaaaaagctaacaagtacttactgggccccagtacctttaagaaagagtgtcttatgcaccagaaacatactcaatgctagaacaaaggcaacactagaataattgaacaagttaaacccagggtagttgcttttcgcacaaaggccacatagaccacaaaaaaaagtaacaaaagagctaatcttttcgtttaggacagctttctatcttgcacaaccaggagctgtacataagttaaaaacttaaaaatagcttctacatattttccttccgattcaacttttataacaccaagttaaggcattcgcattttgaaccatcttacctaataaaacaattacaagtataatacaagtttatcagttccaatggttttcatagaaacaaagttaatttaacttgcctaccttagggcaacctcagaaatgaattgaactaaattccagtctacttctgcctctgctcttgaaatcttttagaatcgctgaagaggctgacctatttggctctcttgagaatcaaatggatgtctcttgtacatggaagggatacagaagtaaaccacttgacctctcatgaccagttgcttaagcttctgccgttgcattaaagctgatagagcccagaaaaaaaactgtagctgtggtgaaggttatttaaaattaatgcaaagataggacacaaaggaaacacctgcttcgttaacatgcctagaaacaactataccttttctcactgttatagttctggtgatgcaataataaaatatttgaaatgttgataaagcttcgaaaaaccagtacacagacacatggatcacatctatcagagtaatatggccataccttcccgggcctctaccgcttctactgtggctgtaagagggcaggagcagtagcatgcaaaaacgaagacagaaaaagagtgagtaaaccaacagcactgatggcagcacagccatcccaggggcccgttttttagcctatccccatccataatgaaagtcaactagttagagaagcgagaagattattgcgagagactcaattggggtgggaggaatatggggtggggagagtttctaatatttttaacatttcaggtgccatggaacattgctcttttcattttaggtagccaactgctactttatatcttgatatccacgtatcgaaacaacatgtagaatcaaatagtttgacatcacaacaatccttagtttgtaaaatatctcaggtgatattaaatgagctactgctgggtcctattcaaaaagcttatttacaactacatcttactgctctcaagtgacttatttggagtccaactgccctattaattacttcatttaaaaaaaaaagagtggcct

SEQ ID NO: 97017 - DNA, 27533 bp, Homo sapiens
  misc_feature (1)...(27533): n = A,T,C or G
cttctccacggggctgaccgagaaggccaaccactactacaagctgttcatcccctggaccaaccagaagatccgcaagacttttgtgcagaggaacatgtttgagttcaagcacatcaaggccttcgaccgggcttttgctgacaacccaggaccgatggtgaggcccgcggcagggccggccagcacatccacacccgtcggtctcctgtcttccgcaggtgtctgggcttgggcctgcagtgggggtgggggcatctgctgccctgaccccccacctggccctgtgtgtcctgtaggttgtgtttgccacgccaggaatgctgcacgctgggcagtccctgcagatcttccggaaatgggccggaaacgaaaagaacatggtgagggcatggtgaggtgtgggaatctggaagctggaggccgacgggttgtccttccacccatgctgtctctgagctctcactggcttggcctcgtgctggccaagggacgtggctgctgctgctggggaacgggggcgatgtccgcctggagctgctcagtctctgtgacacagcttgtccacctcgggcagaacagccccagcccagccctggacagtcttgtgccaaaacctgagccctttggagtctgcagctaggcttggtcgggcgccgctggcaggtggaaacagcttccaggggttcaggcgggggcatcccgggcaaggccttgaggtgccaaggctggagttccctggctgtgagctctgtgcctgcccccaggtcatcatgcccggctactgcgtgcagggcaccgtcggccacaagatcctcagcgggcagcggaagctcgagatggaggggcggcaggtggtgagtctcgaccccgcactgggctggcagggccgaggggcacctcctggtggtaaccactgtccacgccccgtggcctctgtagctggaggtcaagatgcaggtggagtacatgtcattcagcgcacacgcggacgccaagggcatcatgcagctggtgggccaggcagagccggagagcgtgctgctggtgcatggcgaggccaagaagatggagttcctgaagcagaagatcgagcaggagctccgtaggcagccgggcgggcggcgtggggcccacctcgggtcagcacgggcagcctgggctgaggctctctcttcccccggggtccaggggtcaactgctacatgccggccaatggcgagacggtgacgctgcccacaagccccagcatccccgtaggcatctcgctggggctgctgaagcgggagatggcgcagggtatgcgggctgggcagggcagggcagggtgctcggggcaggcggctgggagcggccctcacattgatggctcctgccacctcctccgcagggctgctccctgaggccaagaagcctcggctcctgcacggcaccctgatcatgaaggacagcgtgagtgccaggacggtctctggaggggggagggccgctgctgcgctcactgacctgtccctgccccacagaacttccggctggtgtcctcagagcaagccctcaaagagctgggtctggctgagcaccagctgcgcttcacctgccgcgtgcacctgcatgacacacgcaaggagcaggagacggcattgcgcgtctacagccacctcaagaggtgggcgcccggccccgccccccccccactcccttgggccctggaggccaggcagggtctcaccgagcctccccacagcgtcctgaaggaccactgtgtgcagcacctcccagacggctctgtgactgtggagtccgtcctcctccaggccgccgccccttctgaggacccaggcaccaaggtgctgctggtctcctggacctaccaggtaaggggtgacccccaccccaccgcggtcaacacaggtatcaacattcctccctgtcctgcaccacccacaatgcttttgcctctgccctaggacgaggagctggggagcttcctcacatctctgctgaagaagggcctcccccaggcccccagctgaggccggcaactcacccagccgccacctctgccctctcccagctggacagaccctgggcctgcacttcaggactgtgggtgccctgggtgaacagaccctgcaggtcccatccctggggacagaggccttgtgtcacctgcctgcccaggcagctgtttgcagctgaagaaacaaactggtctccaggctgtcttgcctttattcctggttagggcaggtggtcctagacagcagtttccagtaaaagctgaacaaaagactacttggtactctcttcttggtgtacatggctgtgtcctgcactgtgccccatcccgcctgggacagagacgggcatccagggtgctgggacccgggcagggaggctactgtggagaccaggcagcagtgctgtgggccccaagcagctgtgactgccctggcttgaccagcacagggttgggcctggtgtggcctaactttggcttgagtgtccagggtcatccgtggctcccgaactgtggcccctgcagggtgcaggaggcagcacctgtggacggaccagaccctgcgtcagcctggggcaagaccggcccagcaccctccccaccgctgagaccactcccatgaccagggagtgggccagcccaggacgggctacgggctggcctgagggactgcagccctgggcggggggctgcttcacccccagttgctgccgtcagtggcccctggccccccaccccatgcctcggccacagtagtcactgggcacatgacaggagcttctcgtgcctgtttttcttaccgaggttcccgtacagcactgacttgaggaataagccgtgggctggggctacacgtgtctggtgcttgcccaggggatcttggctctccagaatcgtcttcacctgggcaggtgccaaagcccccagccccacggccaccagcacagccgtcatcctccgtacctgtgacccagagccacctgtgacccagagccgcccgtgacccaccagcacagccgtcatcctccgtacctgtgacccagagccgcccgtgacccaccagcacagccgtcatcctccgtacctgtgacccagagccgcccacgacccagagccaagactgcacaggggcctgcccaccctcagccccaccccctggggacggccccagaacagagcctacctgtctatacaggaaagactggctctcaaactccaggttccagaaccgcagcttcctggaaaaacacgtacctgtaggtgtctgtggggcagtgtttgccatcctcagcctactatgtggccttggacgggagagtgacagggtgggcctaaagacgagcctggttcccactagcttggccaccaggggccctggctgatctcctgcccccagtgaggcccattggaggggcttaaaaccagagaaacaatgcttgggcaaggaggcagcaggaccctggaggctgggcaggtagcctggccatcccagaggggcttgccctgggccctcacctagggtcctggtgcagggtctgggaacgtggctggtgcgggtgccagagacccccagtcctgtacctgctgctctgccacagaagtctggggctggcagaagttcttccccccttcagggctcaccccaataggggaggttctggtcagaagctgccacctggtgggtggccctcgggacagtgctgggggcagcagaaaccaccccaccagaaccactggcaccagtgagacctttccagtagctgccaacattcttccatcaggcatggcaggggtttttcagagacaagcagccttccctgttctccgctccccagcctggggggagggcacagctggaggctggggggcgtccgggcgaatcccctccagctgtccaggtcctgaggactcccggctgcctgcctcccgcctcaccttgccttaaaactgggggaggtgctggagctaaaatcagcacgtgacttgagggcagggccacagcccaggggcccttcctcacctgctctcctcgggggtgaccaaggggctggcttggcctggggaaacggagacccggcgcagcgttcgcacggggctcggcaccgggctgccagcggactggaaggcgctgaagtcgtgtgtgccgaggaggtgctgggcggcttcctgcatggcgaccatatccaggcagcttcagggaccagggtgaccgtcaggagggtggggccggcctgcccgccccctccccgctgtcagggccacactcactctgccgggagagtccagcataggttgcgttcaaacaccggcagctcatcacgccggtgacagccagtggccaggcggtacaggtaggtccgggacgtggctgcgtgacgagcgtggaagtcgctgggcactcggaaggcccgcaggaccctatggcggcaggtaaagctcaccggaggaacgaccccgcccgcccgcggtgtcacattggctctccttccccctcgagctccgaccagacaaggaagtctgtccagatctccagcctccgcccgcgacagatggagtcgggaaggcacagccccagggctgcttaggtcgcgggctcacctgatggccgggtgccgcaggtgtgtgttgagggcctcggccaggacctcgggcgggaagggcggccggcctgagcggcgctggacgtccaggtgcgccgcgttgctcagggcgtggaccccggcgtccgtgcggctggagatggtgaacctgaccggctccacggaattcagccgctcggcggcctcctgcaggaccgagccgcggggcgggcgggtgagcgaggccggaccccggggacgcgcgggcgggagcctcccccttacccctcaccgggcgtcccgtgaccggctgagcgcacctccaggtagttctggaccccgacggcgcgctgagtgcccctgacggccgcgaccccgctgcgggcagaagcgggcggaggttaccgggggcgccctgccctggggtctccgccgccgtctgaggccagggccgcttccttccccgaacgtttggaacccgcgtccagagacatccgcctgcccgcccgcgccctccttcccgcctccgcccgggcccacgtggcgcccgccgctgcgcctgggaaacctacttaaagtcggtgcccacgtactggaagtacacaagatagcgcgcgcgcacggagcctgaggccggcgccgaactcatggcggagcccagccggtggcgtcagaggcggcctccagcgcaggaatcctgcgcgcgcgcggacgcggcctggtcacgccccccccccctcccccccggccccggccgctcttgcgcctgcgcggtggcaccgcgccacggcggccagagtcggggagcggaggcggggccgggcttagggagcggctgcaaagtgccggcccgccgccgagcgcaggcgctctacctctatcgcggcgccccgggaggcgcgcaccaaccacgcggtcaccccgcgctctcgcgggcgtgcattcgttcactcgctcattcattcgccgccgcccacactccccgagcgcgcccgttcgccgcgttgcggccaagtcctcccagacgtggtttttgcaaacgccctgagttgcgcaacggccgggatggttggagcgggcgggcccgcgccctccccgcgccctccccgcgccccacatttccaccgactgtccccggagacggccgtggcaggccccgcctcacttccggaccggggtggtccctggacgctgcgagaggcgtttggcgacgctccccggcggtgacagcgggcggcgcgcgcgggcggcggaccttggcgacgctccccggcagtgacagcgggcggtgcgcgcgggcggctgactttggcgacgctccccggcggtgacaggcggggcggggcgcggcgcggcggcctcattccggggcgggcgggcgccgaggcggcgcgggcgggacgagcggtccgggccggcgcggctgccgctcggcgccgcggtcctcgtgccagtgagcgccgcggccgccgcagccatgaccgtggagttcgaggagtgcgtcaaggactccccgcgcttcaggtgcgccgcccggggccgccggggtgggcgcaggccgggggcgtcgctgtcgcctttgtgcccggcggcggggtggggaggtcagcgccgggccgggccgcggccgccggggaggggctggaggaccggcctcggacaaagcggcggccccgccccgccatgcccygggggttggaacaaaagacgctcctgccctgtgcggccgccccgggtggagggcgtgcgcgtgggcarccgtgggcacctcgggaccgtccgcccccgctctgtgtctgcacctccactgggctgagcccctcccgggccctgcagtccagctctggccagggtcgtctgggtccgtgggggcgtcggcccctggtctctgacttgatcctgtgtccagagcagcgcgtggggaacaggcagctggagccgcgtttaaggcctggggtagggtgcytggaaacgtgaagtggtttgaatgacccaggggcttggaggggtggcggcygagaagagcggcggggaaggtcaggtagggggtaggggttgtgtgcacaccgagtctgcatgttttccatcattcgtggcgtgcaggcgtgtacacctgcgtgaactacatgttcacagacgtgtgcacaagtgtgcatcggctttgcttggtggacatttggcaaacgacaatggaggcaaagaaayctctctgcatccccaagtgcgcacctgcgtgaggccccctcctctgcacgagctcgtgcggggtgcgctcttgtgaactttgcccctctgcgtgcctccctccggacaccaggccttgcacaggacgtgtggatgagctgtgccacggggctgtgcttgcttctgcatgtagcctgccgatgagtgcacgcaagcgtgtgcacacaccacctgtctgtgtgggttcacgtactgtgttagccatgtcagcaayagacacatcaccttgtacacgcgtgttccatcactaggtacacatgttgatgcgtgtctgtgcagtgtctccttgaacacacatgtatgtgtggtaccagtgtgtgcaggcatgtttgtgcatgaacatgyttgcacatgtgtgcttgattgtgtatgtgtgggtgtgcacgcgcgcgctgggtctcttgggatctgctggcaagtcagcatgtgtgtggaggcacggggagcctctgtatccctggagcyctcaccaggaggctcaggagccttggagtgggaggctcagggccagccaggagagtggccsccagccctgggcagaggaactggggccatcctctgctctcccatcttctgttgctgacctgggaaaargggttgaataacttgagcaccctaggatcctgcaytgaggacccgggctgtggggaggtgtgggcatggcctccctgctgggggctggaccctggctgaagcacccaccttctccctggcccctccgtcagaagcctaatggacctcctcctccacgcagacggccctgtactgccctcttccagtcgtgtgggggtgctggaacccactcacctctgggccttctctctggtaaccggctctcatgggagcctgttacaggagccagttatgggggctgtggggctgcagtaggtgccgtagagygactgccctgggaaagtgcctcacccctgtggggcatggactggagtggggagatgagaatggcctggcccagtgggttttggggttaggctgtgatttaactggggttcraggggctccctgaggctgtcctgggggcaggccctaagggcgtaacttgagtttcctggcctaccgccaggttggggggccaggcagggtgggcgggaagatgtggtctgtaacgtggagcctggtcgccccagcccgggagagggggaccctgcccgcaccctcctggtctggggagggcctagtggcagcccaggtgcagtgggccggaggccaggggagcccgtgtaggggaaccgcctggcctctgttcagtgtgcccctcccctgggtggggcttcaggcgctgagtcatggctttggttggggggcagcctcaccctcctccccgtcctccaagctgctgaggaaatcctgggctgagcacagcagaggaggcctaggtccccaggacygaggaagggagagctgaggggctcccagcagtgggagcggctctcggggcctctgccagggcccaccctgtccccatgagcacgtccgtgagctcctgggtgcagccatccccccttgctggctctccagggacacgggcgccccaaacccgagggcggcagctctgggtgcagctgtctctgcatccggccctgctcaggggtggctgcaactcctggggtgtggcgctctctgctgccttctcctgggaggatggtcccttctctgttctgggatcctccagctgaggtagaggtcagggtccrggggctgcaggctgggcactggcggtcagcggacaccacagcgagattccctccatcgccccctgcttcgggattcagagtcctcttagccccttgggaacaagagagggctgctcagagaggacctagtgtccttctggggtggctgggacccttcaaggtccctggctggggcagcctggtgcctgcagctccagctcctaattgaggacacgccccatgtaaaccacaggcccctcccccgaggcctgggacaccggtcagggtagcaaggtacgagggactgtaggccctgatggcctctgctcctggacccctgccctagacctggagtcctggccccagcccgggccctgtggtgcccaatccccaggaggccagatggcccggacagccagtgagccgattgtgtggagggctgccgggatcctggccctgtttccctgttgcctgctcccggagggggtggtcacgtgcccsatccatctgcctcctgtcttccggggattctcccgccgaggcttctctggtgatgtcatgccttaactcttctctccccaggcagccccactgtcaggctgtcctggtgggagtgggctctgaggaggatggcctacccgtctttccagcggaccatgccgcttgcagctgtgaggttgggggagccgggggcgtctctccccagctggtctgggtcctcctggtgctgccaggaccgagagcagctgccctactgcccccaccctgtcccacagtgcatgggygccagacctggatgggckgcagtagtgcagtggggtgaggggaggtgccgcagggttgaggggctccagatgggtccagggttgactctgaactcctagaggagaggcgggtgaggctggctcagcccttggtgggcactgtccctgagggactcccagcggccggctgtcctgggagaggctggtccagccttcttccccgagggcacagcagcggctgcctctgcctgcctggggttgggggggcggggggaagtgcactgaacctggtcccagtcctgcccccgtagcaggcaggcgtctgtctcccagcctgtttcctgaaagccccttcccatggtggagcccctcagggaggtgcggggggaggtgaagccccgagggggctgaggctgcaggtgaccccagccagccccgttcttgctttagggcgaccattgacgaggtggagacggacgtggtggagattgaggccaaactggacaaggtgaagggcgggcctggagcgccctgtgcccggccaagcttgggatggccacatggccagactcgccctccaggccttactaagccacttacaccccccatatgtggagcatgcgtgtggtgctccmggtcctggtccctgtgtcttagcatgtgtgttccagggtgcacatgtcacatgcacacatgtggctggccctgagtctcgtcccatctgggaggggctgggctgtggtgagtccccgacccacggtggctgcccgtcccctctgctgggctggtgacayggggacagctgctgtgtgggctgagccttggtgtggctggggctggggctgagaaaggggagggggcaacaggccgtggaggggggagccgtgtccatgagccccacatgggctgagaaagrgggggcaacaggccgtggagaggggagccgtgtccatgagccccacatgggctgagaaagaggagggggcaacaggccgtggagctgggagtgggcagccttatccatgagccccacatgggctggttctgctggtcctgctggccctgggtcccctgcctggctcctggtccctcccagccgagccgtggcggccccaccctcccctcccagacgggcctccaagccccaggcaggcccaggcgtgaggaagctgcaccggggcactgagtcctgagtgccaacgccctgagtggaacctaccctgggagctcttcctgcctctgartggccgtgtgtggtggcgagtgcaggcgccagtgcccactgtgctcaccacgccccgctggcccacagctggtgaagctgtgcagtggcatggtggaagccggtaaggcctacgtcagcaccagcaggcttttcgtgagcggcgtccgcgacctgtcccagcagtgccagggcgacaccgtcatctcggtgaggggccgactgacctctgacctcaaggtggggttgggggagaggcygagggaggcagccccttgagggcgtccaggccagaagcaggccggtgtctgcaccgcccaggggctcagagggcgtggctgggtgacctgggcccggatttgccatctcagcacgggttcccatctgctcctccaggaatgtctgcagaggttcgctgacagcctacaggaggtggtgaactaccacatggtgagcgcggcctccctgccacctgtgggctgtgcctggcctggaaccgagctgcgctggctcacctgaaggccggcgtcgggttggggggggcacgtttctgctcctctagtcggggggggggggaatcccacattttcaagtcagtgtggggttgggggacagccctgggggctctgccgtgtcccaggcaagggccacactagaccctgggggaggggtggtttatccagggttcccccaactgggcagggctctcgtcccaggctggcctggctgccatttgggtctgggtggcccccgggggccctggcactgacgtggatggacacacaggacaggcacccgtgagatgtggggctgcagcctgggaacctgagccgcagactgaacagaggaggtcccgaagtagacaaggcaggatggctcagccgtccctttgctcctggttgtgcccggtccttctctacttygggttccgattcagagcccaggctccagctccccaggcccagcccctgggtgctcccggctctggctgagtgctccctgctgcagggatgggcaccccagggtggccgcccagggccaggaggcagtggggctccggctcaggctgtgatgaggcagccttggcctctgcactcatcaagggccaggtgggacagaggggcaggggtgacagccatcgcctctgrgtgccaactcaggcctgggggctgctcccctgacccccttgaggccagccctgcagggtgggaccygcccctgcatctgggcctgggggcagtgccctctgctggtgagratggggccttccatctggggctctttcgggacagaccccaaggatctctgcccgcctctgcccccagatcctgtttgaccaggcccagaggtccgtgcggcagcagctccagagctttgtcaaagagtgagtggcccccagggctgggggaagaacactgaggccacgctccctcccttggaggggaagggggtctggggcagagcagaggcaccttgggcccaggcctccaggctgtgcagcggctccacaaggcagaaggctcagaggcagacagccgggtggagtgcggggggttccacaccctgcatgtgtgggtggggtgtccagcccccacagcagagaggtccagtccacgttgggtttgggggtctggagtctggggcatggctggggtctgggctggacagatcttgagagtgaggtggggaggggctggggaggcctggagcagatgrtcggggtcagcaggggtgcgggcaggcctgggataggctggtgaggaaggaggctatgcccaggagcaaagaaagggcctggagtggaggggggtggggctgggcatggtggctcacacctgtaatcccagcgtttgggaggccaaggccagagaatgccaggagtttgagaccagcctgggcaacgtaatgagacctccatctctacaaaaaaaaaaaaaaaaaaaaattagatgggcatggtggcacgtgcctatggtcccagctattcaggaggatgaggtgggaggatcagttgagcccaggaggcggaggcagcagtgagccatgattgtgctactgcactccagcctgggtgacagagagagactccatcaaaaaaaaaaaaaaaaaaaaagacacccccaagaaccaaaaataagccttatatggtggcacgcacctgtagcctcagctacttgggaggccgaggtgggagaattgcttgagcctgggaggtagaggctgcagtgagccataactgtgccactgcactccagcctccagcctgggcaacagagacagaccctgtctcaaacaaacaaaaccaggccaggcgcagtggctcacgcctgtaatcccagcacgttgggagaccgaggtgggtgaatcacctgaggtcgggagttcaagaccagcctgaccaacctggagaaaccccatctctactaaaaatacaaaattaggcctggtggcgcatgcctgtaatcccagctgctagggaagctgaggcaggagaatcacttgaactcgcgaggcagagattgcggtgagccgagacagcaccattgcactccagcctgggtgacaagagcgaaactccgtctcaaaaaacaaaaaacacacaaacaacgatgtgggagactccaggatccagcaggtgccctccctgatctctcaccccacctggcacttggcctccagggatgtgcggaagttcaaggagacaaagaagcagtttgacaaggtgcgggaggacctggagctgtccctggtgaggaacgcccaggccccgaggcaccggccccacgaggtggaggaagccaccggggccctcaccctcaccaggaagtgcttccgccacctggcactggactatgtgctccaggtcagccccagaaatgggctggggggcggggaccagctgtagcraatggaggcctcaacggccttgtacagaactggagggattttgagcaggagtracgattcttgctttgcccatgggtgggaactccagacatggggaagcagtccaggaccatgggaggatgaggctggcccagwgctgggagctgaagacgacctgggggtctcagggaaccacaagcagctcaggtggactctatggcaggtgcagggcttggggctgcctcagcctccggggctcacctgtgggctccccctctggcagatcaatgttctgcaggccaagaagaagtttgagatcctggactctgtgagtgcgtgggggctgcccctgagcacaggctgcatgttgggggctggaccrggtgtgcttgggcctcacctgtgctgcccccgcagatgctgtccttcatgcacgcccagtccagcttcttccagcagggctacagcctcctgcaccagctggacccctacatgaagaagctggcagccgaggtgagcctttgggaggggtggggctgggccaggcctccgtgaccttccctaatgccacccccaacagctggaccagctggtgatcgactctgcggtggaaaagcgtgagatggagcgaaagcacgccgccatccagcagcgggtgaggccgcgcagccggctccctgcacaccaggcgcctgggaggcccctgcgtcctcaccccatgcccggcacaccctccccgccccttcctcctgcctgtctcccacctgccctgcccacaccctctctaggggaccaaggctgctccctttgatgtgtgcagtggaggggcacgtgtgggtggggccgctgctgggatctccttttgaggcggtggtcacctctgtggcctcagtcactggctccttgcggggcctttgcttgcctgtgggacagcagccccggccaccatcccgggcagaggttggctgcaggcaggagtggctattttgggataggggagagccccccaggagttggggacgggtccaccagtcaccaggagttggggacgggtccaccagtcaccaggagttggcagccgtcactcactggctttctccccctaccccctcctgctccggccctccagacgctgctgcaggtaagtgagcacgggccctgggcgggctgtgggtcgggggagaccagatggggcggtgcctttccctcctctaccccaagggcacttcagcaccaaggacacctcccaccagtctcggctcctgctgctgatgcggctgtgaggggctggctccggccagacctccacattccccgtggggttggcggcagctgtcccttcccatcccatgtggcctggggagcaggtggccgcccctcccctctgcttccctggcctgccagatggcgggacacacagggccctcagtgactcccaggcctcctgaatggggctctgtccgcccagctggccacatgaatggggcactcaggatgcggagggtgggggcgcagcttccttcctgatcgcagcctgctggtccctgcagggctggggtggggccggcactctygggcccccagctgtgaacgtgaggggtctgccccacgggttgcagggctgggggccttgctcaggtcaagaagtggctgtggtgaacagagggtctctcgtctgagcgtgtggtccgtgggccgtgtggcagcctcagacaaggacctcacccccacctgtgctccgggaaagcacggagggtagcagggcccctggggtgggcactgagggggcgggttccatccccccaggacttctcctacgatgagtccaaagtggagtttgacgtggacgcgcccagtggggtggtgatggagggctacctcttcaagagggccagcaacgctttcaagacatggaaccggtgagrggccttcctcaggtgggggcggggtccttaggcgggggtggggtcctcaggcgggggtggggtcctcaggtgggggcaggggtcacagcagccctgggatgggccccgcctgactccccacatccccccacccacctaggcgctggttctccattcagaacagccagctggtctaccagaagaagctcaaggtgtgccctgggcctggggctggggccctgatggctggacgccccacctgggccacagggcagactggtcagttgggkttagcacagggccggggcactagtggacgccggagccggaacagtcagggagcagagagctggacacggggcttggggctcaggcagtcggmctccgggtctccaaggtgaagcargaagtgggtggtcggggccgggtggtggctgagggcaggggccacagcggtgccgcccacaggatgccctcaccgtggtggtggatgacctccgcctgtgctctgtgaagccgtgtgaggacatcgagcggaggttctgcttcgaggtgctgtcacccaccaagtgaggaggcccagcccagggtggggcggggggcgtacctgcccaccggagctgacgcccgcccctccactgcctgcaggagctgcatgctgcaggctgactccgagaagctgcggcaagcctgggtccaggctgtgcaggccagcatcgcctccgcctaccgcgagagccctgacagttgctatagcgaggtgtggcccttggtgcccctgccccaagcccgtgcacacacacgtgccaccggggatggcccctgccccgcgcctgtgcacacacacacgtgccaccggggatggcccctgccccgtgcccgtgcacacgtgccaccggggatggcccctgccccgcgcctgtgcacacacacacgtgccactggggatggcccctgccccgygcctgtgcacacacacacgtgccaccggggatggcccctgccccaagcccgtgcacacacacacgtgccaccggggatggcccctgccccgygcctgtgcacacacacacgtgccaccggggatggcccctgccccaagcccgtgcacacatgtgccaccggggatggcccctgccccgcgcctgtgcacacacacacgtgccacyggggatggcccctgccccgtgcctgtgcacacacacacgtgccaccggggatggcccctgccccaagcccgtgcacacacacacgtgccacyggggatggcccctgccccgcgcctgtgcacacacacacgtgccaccggggatggcccctgccccaagcccgtgcacacatgtgccaccggggatggcccctgccccgcgcctgtgcacacacacacgtgccacyggggatggcccctgccccgcgcctgtgcacacacacacgtgccactggggatggcccctgccccgtgccggtgcacacacctacgtgccactggggatggcccctgccccacacacgtgcacacgcctgtgtgtggctcctgcaagctgggtgtgtgctggtgtgcactggcatgctggcttgtgcagtgtggatgtgcatgtgtgtgcaggtaccatctgcccatgtgagggtgtgcacgtatacaygcgcgtgtgggagtgtgctcggcaccatctgcccacgtgagggtgtgcacacgtacgtgcgtgtgcgggcgtgtgctcggcgccacctgtccacgtgagggtgtgcgcgtgtgtgcgtgtgcgkgcgtgtgctcgaggggggggccatctgcccacgtgagggtgtgcgcgtgtacgtgcgtgtgcgggcgtgtgctcgaggggccctggcctgcattggctcttctggctggggaggagggggcctgctggggaaaccatgctggagcccctgcgggaccgagcagctccaccccatcctccagaggctggaccgcacagcatccccgtccacgagcagcatcgactccgccaccgacactcgggagcgtggcgtgaagggcgagagtgtgctgcagcgtgtgcagagtgtggccggcaacagccagtgcggcgactgcggccagccggacccccgctgggccagcatcaacctgggcgtgctgctctgcattgagtgctccggcatccacaggtgggcccctgagggccaggctgggggtgggggttgggctggagcatccacaggtgggcccctgagggccaggccgggggtgggggttgggccggagctgggggccttgcctcccccagactcatccctacctctgctctccaggagcytgggtgtccactgctccaaggtgcggtccctgacgctggactcgtgggagcctgagctgctaaaggtgcgtgtggggctcctggaggccacgggaccccgtttgtgggggcgggagctggggtctgcaggttcgcactgatgcctgctygccctgtctcccgctagctgatgtgtgagcttggaaacagcgctgtgaatcagatctatgaggcccagtgtgagggtgcaggcagcaggaaacccacagccagcagctcccggtgaggtggggtacagtctggatcagtcagggagccccagcctgggggcacagcctcatgttcccccctggtccaggcaggacaaggaggcctggatcaaggacaaatacgtggaaaagaagtttctgcggaaggcgcccatggcaccagccctggaggccccaagacgctggagggtgcagaagtrcctgcggccccacagctctccccgcgctcccactgcccgccgcaaggtccggcttgagcccgttctgccctgtgtggccgctctgtcctcaggtgggaggccatgccccggcagggctgggaggggcttgccttggtcggggatggactccgtcaaggggctggtggcagggctctgggggcacctcaggctccgcagactcccggygtgacctggggttccctgccccaccccgggcctgttccacactctgaacacgcactgcccctgcagtgggcaccctggatcgtaagttccgccgagactccctcttctgtcccgacgagctggactcgctcttctcctacttcgacgcaggggccgcaggggctggccctcgcagtaagtgtggggtgggcccagccaggtggcagggcagggccaaggaggctggcctgaagggtgcctgagtgtggatggcccttgccagggaatggagcagcatctgaaggggcggggggcctcctggccacacagctrgaggccaaggccctgactgtcaggggtgagctgtgcaaatgtgtgtgtgggctgtgtgcacctgggtgtgtgcacacagcgggtggcccggggtgctggggaagcagagggcgctgccagccggccctcagcctagggcccttctggagccatgctgcccgttggttgggtggagacatttcagcctgggccagccacagacggggctggggggcccactgcggggggtgccgggtaaggcggcgagcgggagggaagggcttcccaaarggcctgggctktagggggctacccctggcacctttgagctgttatttggttttctctcctttgctcctagcctgcagctggctccccccggccctgggtgggagctggtcctgtccctaggggtggcccctggagggtgggtggagttccagccttgccccagggctctggacggagtctgggcctcccaccctcaggacccccttccctgcggacctgcaggtctgagtagcgacagtggccttgggggcagctcggatggcagctcggacgtcctggctttcggctcgggctctgtggtggacagcgtcactgaggagggtgggtggcgtcttgccctcgcccgaggcccctgcccagcccctgggcagccccgggggttgctttccctgaccgccccctccccacagagggtgcagagtcggaggagtccagcggtgaggcagacggggacactgaggccgaggcctggggcctggcggacgtgcgcgagctgcacccggggctcttggcgcaccgcgcagcgcgtgcccgcgaccttcctgcgctggcggcggcgctggcccacggggccgaggtcaactgggcggacgcggaggatgagggcaagacgccgctggtgcaggccgtgctaggggtgagcgagccacgggggctgcgcgcaggacacaggtgcacagtcgcgtttgcatcttctgtggcgcccacacaagggtcgcctgtccgcggtggggaccamgttcggtcccggctgggggcgcccaaggccggggtcagggtgcagaggcgcggagaggggccggtgccgtggctccgtctgagttgccccggctccccagggctccttgatcgtctgtgagttcctgctgcaaaacggagcggacgtgaaccaaagagacagccggggccgggcgcccctgcaccacgccacgctgctgggccgcaccgggtgagacgcgcaacccacgccccgccctgtgccccgaccacgcctaccccggcccggctacgccctgtccgccatgccctatccggccacgcccccgcgaccacactcgccccgccccgccccgccccgacacgcccctccgacctcgcccctcagccaggtttgcctgttcctgaagcggggcgcggaccagcacgccctggaccaagagcagcgggacccgttggccatcgcagtgcaggcggccaacgctgacatcgtgacactgtgagcgcggccgggccctcggggctgggcggggcctccagggcaggggcggggcctccagggcaggggcggggcctccagggcaggggcggggcctccagggcagggkcgtctcacgctgtgcctccccgtaggctccgtctggcgcgcatggcggaggaaatgcgcgaggccgaggctgcccctggtcccccgggcgccctggcgggcagccccacggagctccagttccgcaggtgtatccaggagttcatcagcctccacctggaagagagctagggccgggcaggccgggcagctgccaccccgcccggcccgacgccccgcatgccccgaagtccctggcgcccacccggccgcggccctgcgtgtgacccgcgggtcgatacctggcagccccagtgctggggcgccgcggccctgctcgcccaggaggagagcgagggccccacactgagtctcttgaagcctcacgtttccctgggggggtgctgcatcgtcgggtgtccctcaccccacctggggaacctctgtcttcaggtcaccccttttcaggggcctgggttgctcatgtcacaagccacttttaaggcccgtgtcacctgtgtccctgtgtcctcagggcctgtgttacttcgtgccccacttctgcccagaacactgacctgttagctggctccctcctgcacaccccagagcctcctcccagggcagaaagggtggcccatccagggaaccaacgagtacctcacttagtgaccccagcatccaggctggcgtcgcgggtgctgggcgggaggggctctggcctgggtcctcagccctggctggacgcgggcgtcccaaggccacgtggctggccacgaaggtccccgtgccagacagccccagccgcatcccggcctcctccggaggcaccttctcctggtactcggcccagagcctgcgcataaagccactttgccactttgcagccctcatctcatgttctttgtagcggaccgagtgggtttgctataggcctcgtctgactttgtcttgcgtcttttctctgtggactcttgaggacgcctgagccccagccctgcccctgaccagcctcccccttgggtccaggggtctttcggctcatattgcagggcctgccaatgccttcacgcaccccttccccaaaggtgcccggcagggaggcagggcctcccccactcagcgcaggtcaggctaaggccagtcggctggtcactatgcaatgctgccctggggaggctccctgagggcacagtgggcgctggacccggccccccaactytcttgcctgctgcctgygaccctgaagaacagaattgattcttgcccctctccctgtgtgagcttggccccgcctcttgccccaggcccctgctggcgggtctcaccccccacccctcgctttgaataaagcacttgcgcccmctgcctgctcctgggctcccgtgccttgctctgctctgtctccggggagtgtctgtgtcccttgccctccccgaggggcattcctgagccgggtagcactcactcaagtcagactccaacaggccgcaaggggcctgatggggacctggggctcgtttgacaaaatctgggtcctgatgcccctggtccccattgtctcgcccttctacccttctctgtcctagactgagtttcctggtgggaagaggggtggacgcgaaccggcgaggctaggctggggctcgtcccgccaggtgcagtcagggtttcagctcaccgggcgcggggcggctggaggggcacacaggcacacactggccgccaggtggagtcaacagctttatttcagagcagcccaagtgtgtccgtggggcctgccttgccttctgcctccctgcagctgaggtggctaggcttgacacacgtacacaggtgcatcagacgtgtggacatgcagacacagacacacggagcatgggtacatcaccgcgtgtcggcacgtccagccgcactcgtgtgcacgcgggaacccccctccgccccgggcctccttgagacccaccccaggcagtgtaggtggtttgaccagaggcgccgacatgcccggtgcctgcctccccacggccgcgtgtgctgcttcctgggctgctggtctggcccaccctgggccgctggggagcctgctgctgccacagctgcaaggaccaggccaagagatcgcacagccctggcaggtctggttcaggtgtccagagtctcaaggggctggggcccagcccagctctcttcggctgagactcccgccagaacccctggaagcatcacccgtgggagatgaggcccgctgggctccgggtcatctgacgtgccgcctgcaggcgggggcatctgactggcctctggcttgatgctggacgcccctgaggcagggctggctctgggccaggagaaccacgccctgcggagccggcggccgcctagcaccagggtgagggcagaagcatcgagcagcagctccaggagctccaggagggagaggacggaggccccaaaccacaggctgcagaggctgcccatggccgagagcagctgcggcacctgcgggtggggtgcgggtgtgaggggcgggcccaggcccccgtgccccttctgtgcagggccagccactgtcgctgcccccgctctagcccaggcagggggccaaggctcaccgagtacacgggcgcctcctccactgagcggtagttgagctcctggtagacgatgttgattttggccaggctgctcctggggcaggatagaggcatgagggcgctggcccagaccttcatgatggggaggggggctttgaggggagaggggctgtgatgcctctctggagggcgagggtgcacccacctctgtctgtggctctgatgcggcagcccctgttcacctagcgtggccagagtccatccctgcagacggaaggtttgctgtggccacggctcccccatgcccccggccatcctgggtaccacgggcggatgtgggggcagagaccacggggcataggctgggtcagttccggccctgcccttgtcttgggtgggctctgtgggacctgtggggtctgcctggctgtccacacccccaccccaccactttggggactcacagctgacttggcggaaggccacctggaggtcccagtggagagcttgaatgcagactccctggaagagacagccgggtgtcacctgccacgctacctggggcaatgatccctggccgcgaccccaacacccccgtctcacctgcagggcctggggcagcgggaggtacaggggagccggtgggtctccaggtcctggtagaggcggtagaagcagtgtccttggggaggggtcagaggcatgtgtgaggctcgctgtgaccccccggctaatggctgacagagtgggaggcagcgagcaggactcaccccaggcagggtgccgggcagagctgcagtactcagcccccgccggcagagggtggaggtagtagccacaggagcaggtctccaccatcagctgctggaagcaggacaccaggcaggcctggggacatgggggatgagcagggacatgggatggagcggagacatgggggacggggcagagacacgggacggagcagggacacgggacggagcagggacacgggacggagcagagacacgggacggagcagagacacgggatggagcagagacacgggacggagcagggacacgnnnnnnnnnnnnnnnnnnnnnnnnnnnnnnnnnnnnnnnnnnnnnnnnnnnnnnnnnnnnnnnnnnnnnnnnnnnnnnnnnnnnnnnnnnnnnnnnnnnnnnnnnnnnnnnnnnnnnnnnnnnnnnnnnnnnnnnnnnnnnnnnnnnnnnnnnnnnnnnnnnnnnnnnnnnnnnnnnnnnnnnnnnnnnnnnnnnnnnnnnnnnnnnnnnnnnnnnnnnnnnnnnnnnnnnnnnnnnnnnnnnnnnnnnnnnnnnnnnnnnnnnnnnnnnnnnnnnnnnnnnnnnnnnnnnnnnnnnnnnnnnnnnnnnnnnnnnnnnnnnnnnnnnnnnnnnnnnnnnnnnnnnnnnnnnnnnnnnnnnnnnnnnnnnnnnnnnnnnnnnnnnnnnnnnnnnnnnnnnnnnnnnnnnnnnnnnnnnnnnnnnnnnnnnnnnnnnnnnnnnnnnnnnnnnnnnnnnnnnnnnnnnnnnnnnnnnnnnnnnnnnnnnnnnnnnnnnnnnnnnnnnnnnnnnnnnnnnnnnnnnnnnnnnnnnnnnnnnnnnnnnnnnnnnnnnnnnnnnnnnnnnnnnnnnnnnnnnnnnnnnnnnnnnnnnnnnnnnnnnnnnnnnnnnnnnnnnnnnnnnnnnnnnnnnnnnnnnnnnnnnnnnnnnnnnnnnnnnnnnnnnnnnnnnnnnnnnnnnnnnnnnnnnnnnnnnnnnnnnnnnnnnnnnnnnnnnnnnnnnnnnnnnnnnnnnnnnnnnnnnnnnnnnnnnnnnnnnnnnnnnnnnnnnnnnnnnnnnnnnnnnnnnnnnnnnnnnnnnnnnnnnnnnnnnnnnnnnnnnnnnnnnnnnnnnnnnnnnnnnnnnnnnnnnnnnnnnnnnnnnnnnnnnnnnnnnnnnnnnnnnnnnnnnnnnnnnnnnnnnnnnnnnnnnnnnnnnnnnnnnnnnnnnnnnnnnnnnnnnnnnnnnnnnnnnnnnnnnnnnnnnnnnnnnnnnnnnnnnnnnnnnnnnnnnnnnnnnnnnnnnnnnnnnnnnnnnnnnnnnnnnnnnnnnnnnnnnnnnnnnnnnnnnnnnnnnnnnnnnnnnnnnnnnnnnnnnnnnnnnnnnnnnnnnnnnnnnnnnnnnnnnnnnnnnnnnnnnnnnnnnnnnnnnnnnnnnnnnnnnnnnnnnnnnnnnnnnnnnnnnnnnnnnnnnnnnnnnnnnnnnnnnnnnnnnnnnnnnnnnnnnnnnnnnnnnnnnnnnnnnnnnnnnnnnnnnnnnnnnnnnnnnnnnnnnnnnnnnnnnnnnnnnnnnnnnnnnnnnnnnnnnnnnnnnnnnnnnnnnnnnnnnnnnnnnnnnnnnnnnnnnnnnnnnnnnnnnnnnnnnnnnnnnnnnnnnnnnnnnnnnnnnnnnnnnnnnnnnnnnnnnnnnnnnnnnnnnnnnnnnnnnnnnnnnnnnnnnnnnnnnnnnnnnnnnnnnnnnnnnnnnnnnnnnnnnnnnnnnnnnnnnnnnnnnnnnnnnnnnnnnnnnnnnnnnnnnnnnnnnnnnnnnnnnnnnnnnnnnnnnnnnnnnnnnnnnnnnnnnnnnnnnnnnnnnnnnnnnnnnnnnnnnnnnnnnnnnnnnnnnnnnnnnnnnnnnnnnnnnnnnnnnnnnnnnnnnnnnnnnnnnnnnnnnnnnnnnnnnnnnnnnnnnnnnnnnnnnnnnnnnnnnnnnnnnnnnnnnnnnnnnnnnnnnnnnnnnnnnnnnnnnnnnnnnnnnnnnnnnnnnnnnnnnnnnnnnnnnnnnnnnnnnnnnnnnnnnnnnnnnnnnnnnnnnnnnnnnnnnnnnnnnnnnnnnnnnnnnnnnnnnnnnnnnnnnnnnnnnnnnnnnnnnnnnnnnnnnnnnnnnnnnnnnnnnnnnnnnnnnnnnnnnnnnnnnnnnnnnnnnnnnnnnnnnnnnnnnnnnnnnnnnnnnnnnnnnnnnnnnnnnnnnnnnnnnnnnnnnnnnnnnnnnnnnnnnnnnnnnnnnnnnnnnnnnnnnnnnnnnnnnnnnnnnnnnnnnnnnnnnnnnnnnnnnnnnnnnnnnnnnnnnnnnnnnnnnnnnnnnnnnnnnnnnnnnnnnnnnnnnnnnnnnnnnnnnnnnnnnnnnnnnnnnnnnnnnnnnnnnnnnnnnnnnnnnnnnnnnnnnnnnnnnnnnnnnnnnnnnnnnnnnnnnnnnnnnnnnnnnnnnnnnnnnnnnnnnnnnnnnnnnnnnnnnnnnnnnnnnnnnnnnnnnnnnnnnnnnnnnnnnnnnnnnnnnnnnnnnnnnnnnnnnnnnnnnnnnnnnnnnnnnnnnnnnnnnnnnnnnnnnnnnnnnnnnnnnnnnnnnnnnnnnnnnnnnnnnnnnnnnnnnnnnnnnnnnnnnnnnnnnnnnnnnnnnnnnnnnnnnnnnnnnnnnnnnnnnnnnnnnnnnnnnnnnnnnnnnnnnnnnnnnnnnnnnnnnnnnnnnnnnnnnnnnnnnnnnnnnnnnnnnnnnnnnnnnnnnnnnnnnnnnnnnnnnnnnnnnnnnnnnnnnnnnnnnnnnnnnnnnnnnnnnnnnnnnnnnnnnnnnnnnnnnnnnnnnnnnnnnnnnnnnnnnnnnnnnnnnnnnnnnnnnnnnnnnnnnnnnnnnnnnnnnnnnnnnnnnnnnnnnnnnnnnnnnnnnnnnnnnnnnnnnnnnnnnnnnnnnnnnnnnnnnnnnnnnnnnnnnnnnnnnnnnnnnnnnnnnnnnnnnnnnnnnnnnnnnnnnnnnnnnnnnnnnnnnnnnnnnnnnnnnnnnnnnnnnnnnnnnnnnnnnnnnnnnnnnnnnnnnnnnnnnnnnnnnnnnnnnnnnnnnnnnnnnnnnnnnnnnnnnnnnnnnnnnnnnnnnnnnnnnnnnnnnnnnnnnnnnnnnnnnnnnnnnnnnnnnnnnnnnnnnnnnnnnnnnnnnnnnnnnnnnnnnnnnnnnnnnnnnnnnnnnnnnnnnnnnnnnnnnnnnnnnnnnnnnnnnnnnnnnnnnnnnnnnnnnnnnnnnnnnnnnnnnnnnnnnnnnnnnnnnnnnnnnnnnnnnnnnnnnnnnnnnnnnnnnnnnnnnnnnnnnnnnnnnnnnnnnnnnnnnnnnnnnnnnnnnnnnnnnnnnnnnnnnnnnnnnnnnnnnnnnnnnnnnnnnnnnnnnnnnnnnnnnnnnnnnnnnnnnnnnnnnnnnnnnnnnnnnnnnnnnnnnnnnnnnnnnnnnnnnnnnnnnnnnnnnnnnnnnnnnnnnnnnncacgggacggagcagagacacgggacggagcagagacacgggacggagcagagacacagggaatggagcggggacacgggggatggagtgcgggcctccacggggactgccccgttcccaggccctctagtactctcccagacccctcccccgttccacccgcccacaccccctggccagcccagcctcacctgcccccgcaccccctgccagcccagcctcacctgcctggtgtaggaggtgttgtgtagcagctccacctccacgccttccccgccggcggtgcagtggccgtaggggctcccgagccggtgcacctcgtcctgggaggggacgcttcagttccatgggccctgccctcaccccccaaagcccaggttgggcaggaggcctgggccggaggttggctgcagaggccagctcacctctcggatgctgatggtggcctccgtccctggccggacgctgaagctgtggtgccccaggaagggcgtgtggttacggccgtgaaccatgaccc

SEQ ID NO: 97018 - DNA, 12690 bp, Homo sapiens
caagctcacgtcccccctcatgcactctctcctcaggcacgagcctgatgagactgatgactgtgcatcgtgctcctggtgaggctctgcagaagtagggggggcggtgagaaggaaagacctgggaaggtcacagggataaaggggaataggggagctagatgtgagaggcggaaggagagacacagagggagaaacaggcagcccagaaccagagagaggcggatacaaacagattgaaaaagacagacagagattggcagatgcagagatgagaacacggagacagagcaacggaagagttcagtgaaggtgacagagacagagagacgtagacagccaggcagagacaggcttggtaaaccagggagactcagagataaaggccagggggagactgagcagaaacctggtaggggaccggggactcagaaatgggggagaccccagagggaattggcctcgaggcattgggacagagaagggggagaaaccagaaatgtctgtaatcatgttctagtcacctcgacaaagagtccgacccaagggcagagacattgattggagtgtgtaagagacgtggagatagagatgcgagacaacagagagaggctggtgcctgcccccacacctgtccgaggggcacgcaaccagggtctgagacgcagaaggggacgggtggcgacggggggcgctgtgtgcggggaggggtctcccagggtgtggccggcctgccaggactgcgctgggcaggcgggccctggagggaagtcgggcgctctgggctcaggctggccaactgggtgctgaacggacagctcccaagccccgggccgccgcccaggaacgggcgcagcctcgctctctctgggacctttccagtcaggctttcctttccgttccagtcccctccaggttccatttagttttttatggcttcctgtctctcaccccaactccgggtgtatcttaccctcccgcttcacctctggtctcagccctctattctttctccagtcttctctcacctcacccagcctctctccctgtctcgccggctctgtgtcctctagctctctctccccatccccctcccgcccactctgcccccttcgttgtctctccccatctctgtctctcgccatccctccatctctccctttctgctcggcctcgttttggctcttgctgtgtgaccttcactcgtccttcctcagctgcagtttccacagaaacctccggcggggcagggagggcggggacagaaggcggacccacctttctcctgcgccatcagcccttcagcctctcccacccctgcccgcccacccaccccccagtctactgggattcctcacttcctctcttgggggttggggaggtacattttcaacagaaacacgggatcacagccacagacagttgaagatggcctcgcagatgcgtgcacacacgatcacaacgtcactgaatcaccccggcccaggcacacactcgccaccccaggcacggccacactcaacagctcactggccctcccctcccccagccccatctgttttctgtctttctgtgtctccgcttccggtgtctccgcgtctccagatccctgcatctctccatctgtctcagggtctctgtcgcagcctccctctgtcctgagagaaggtcagtggagaggggccagctgctgggacccgggctggcctgcagcctgtaggcagggctgagggtggagagagcatggaagtaaccatcgaggctcactctgattctcagcaggtgccccggggacccaagcctccaaagccctcacacccccaggaaatgagagacggtatccccagttctggggttttgttcttttttttattccaacaggggctgcgatgtggcaaggggagggatgggggcccaactgaccccctccctgggggaggtctcatagaaattccgaggtttctccccccaaaaaagagaggaagagaagagtggaggggcaccaggggacacccatctgtccagaggccctccccacctccagaagcgtggggggctgcgtcaagtcttggggagcctgagcagtcccagaatggggtcctctccgctgactgctttccgcttcccagagccgcccccgaagtccccagcccctggagtcctcggttcctgcgcccttctcgcccgcggcaccctctcgcgagtccactggggggcgcaggcgggctccagagccaggcctcggacttcgcggggaaccaaaggcaaaatcgcggcgtccggggcgccggcgcacaagtcctgtcccgcgcccgctgcgggagcggagactgctggggcctggggcgggccccgtcccttcggtcagtccgggcgcccgcacagccccgcccgtggtcactcgtgctccgccagctcccgggggccggcggggccaggccgcggccggggcgggctggtggcttcggcggggacgcccaggccacgcggaggcgcgccggcccccgaggcccgcagcgcctggatgcgccggcactcctggcagacgcgcacgtgggtgcagggggtgggggcggcgggtcgggctccgctggggggccccgggtcgtccaggaggcgctgcgggcccccgtgcgcgctgcccgcatccccgcccgcgccggccgagtagagcttgccgttgctgaggcgcatctcgcggaccgcgcgcagtgacagcagggcccggctcgggccgcccgggcgtcggcgccggcgggaacgcgacgtcttgcggcaagaaacggcgtggcgcagctcctgcagcatctcctggcacaccgacacctgggggtggcgcgggcggtcaccgtcccggcgcagtccgcctcccgcctcccccagcccctctccacatcccactcctcctcctcctttcctcgcccgggtctttcttccttctgccctcgcttcccttcccacttctcttccctttatctcccccgtgttttctgcctcccctctccacctctccccacttatcttcaatgtctccattctactctgcgtttgttcctgaatctgcccttcaccttccacctaagctcctctctttcctctggtcttttcactgtctctaaattttctccagttcttccttcctgatttcccatcttctgcccctcatccatgcgttcattattgcaaggcatatttacctgtggcctgctgtgtgcccggcactgttctgagcactggggatatggcagagaaggaaacagacagaagtcccagccctcgtggaggttatgctcaagtgtgcagagacagaagataacagacatgtatgtagtgtgttaggcgtggtgagtgctttggaaagaaagaaaatcgggaagaggcctaaggtgtatgggtagggagtgacgatgaattctgagacaggacagtcaaggaagacctcactgagagaaggatccttaaataaagacagggtgagccactggagacctgggaagccagcctgctggacagataaccgggcagggccgaaatgcccaggtgggagtgacttggcacgtctgaggcactgcaagcaggtcagcatggctggaggggggcgtgcacagggaagacagaaaaatgaggtcaaaggagcagtggcggccagctctggtaaggcccataaaccactggaaggatttttggctttcattctgaaaatcagaatgagagtcagacgggaatcactggggagctttaggtagaggagtgctgtgttttcataggatcactctgtgttgagaacagattgtagggaggccaaggcaagagcagggagctcatggaggaagctatgacaataacccgggcaggagatagggatggctggaccagagcaacctgagaaaggtctggattctggatatattctgaaggtggagccaataggatctgctaagagatcagatacggggcatggaagagagagaatagtgaaagaaagctccaatattttggcccgagcaactggaaggaccaaattgcctcacaggtgggcagaagcccaatgttggacacatcgcatcacgtgcacacctatcagatatccaagtggagataccaagtgtggagctgaagttgcagaccttggcttcaggggagacacatatttgtgggttaaggcaggcagccttcaagatcccacctcccgcgtccacgcccctgtgtaatcccctctgacactgtgtcagagctggtctgtgtgaccaacagaataagtttcagccattgcacattctgcttccgccttgctctctctgatcactcgccctgggggatctcagctgccatggtgtgaggacactcaagcagtccttggagaggtccttgtctgaggaactgaggcctcctgccaactgccatgtgagtgtattcatcatgttttttattttctgtgtcttaggatgttttgacactttaaacatcttgcaggctggggagagactacccctcccagaactagccaagccttagagatagcagagggctcagctgcctttcatgtgcaaaccaaccaatctatacccccaacctccccctttacctaactctcacataccaagccaatattcttcctgacctaaatcaacccggggccaggtaccagataagtagggacagcccctatagcccagagtccactgacattatccaaactggtgaatcgtaagctgtttccccttctcctgggaaatgttaaagaataaaaatcatttttctttctgtttctttttgagacagtctcactctgtcacccaggctggagggcagtggtgcaatctcggctcactgcaacctccacctcccagattcaagtaattctcctgtctcagcctcctgagtagttgggactacaggtgtccaccaccatatctggctaatttttgtgttttcagtagagacagggtttcaccatgttggccatgctggtcttgaactcctggcctcatgtgatctgccctcctcagcctcccaaagtgcttggattacaggcgtgagccaccacacctgggcaaaaatcatctttcaatgaaattggtctccatgttgtcacttggccacctccagaaactaaaatcccatggggacatttgggacagtgagccatcttagaacggaaccctccaccctttgttgagccttcagaccacagcagtctggccaaaaaacatgactatgacctcatcagagacccatggcagccagaaacatccagctaagctgctccgaggctctggacccacagaaactgtgaaccaatggaagctggctttttaaaagctgttaaggtcatttgttatgatagcaatagataactaacacaagaatcaccagcacatagtgggtcttaagagccatttggctggtgggatcattgaagtagtggagaaagaccgagaagagaagcagtctaaggactgagccctggagccccacaacaaacagagcctggggagaaagagaaacccaacgagggagcctgggaaggagtgaccggagaagtgggagaaggggaagaaggggctttgaggattgagagtgactggctgtgccgaagcccactgctacctcatatacatgaggcctgagaccgggaatttcagacatggaagttgctggtgacaagagtggcttcagtggagtggcagggaccgatgccagactggagtggggggcaagaggaaatgggaggaaagaagaaactggaagcatcagggagaccccccactgctgccaaggctgtaaagagaagggaagaaagtgggcggtggctgggagggaaagtgaggtcaggagagggtttaagactggagaaatgacagcatatttgtacgttggtggcctgaatccaataaagagaggacaactgatgctgcaggaggaaaggacagacttgccggagggatgtccttgagaaggcaacctggacacgggtggagggcacctttactagcagcatggacggctccttcagaggagtccttgggccaagtgcagaacactggcaggcagctggatgcagagctggggtctggggagtagatgtaaggtcagccgctggatgtgaggagggggaggaagggctggaggctgacagagagaggggaagcagggaaccagcagtccaggggtgcaagagcacgaatgggtctggaaatgcaggggtgtggctgggcggcccccagggacatggaagcagccctcctgaacacagtgtgggaccagtccagggctgtgtcctcttctggttccctctgtcacccaggctggagtgcagtggtgcaatctcagcttactgcaatctccacctcccgggttcaagcgatcctcccatctcagcctcccgagtagctgggattacaggtgtgcaccaccmtgcccggctaatttttgtatttttagtagagatggggtttcaccatgttggccaggctgatcttgaactcctgacctcaggtgatccgccagcctcggcctcccaaagtgctgggattacaggtgtgagccactgcacttggccctgtttctcttcttatttcttcttgcttttctgcctctgtggctccccacatcctgtccctcacctcctctccctgcatcctcattgctccctgtgcctactttccctcctgttcttcctcacgcgctgattctctggccccatcagctctcttacttccccacctcctgcattcctctgcccccttctcgcgatccccaccaccctccaggtatggctcccaatgccacaatcttcacgcacctcagcccctgggggtccctgttcctgcccacccccacccccagcctcctcacctcctcggactcagctgacctccgtgtggaccatatgaattccatgaccgccacgaagacagcaatgatgaggccacagatgagcacgataaaaatgccaccaatgttctccatgcccaaacctggagggcgaagggagttggggggcaaagggagttggggctgtgtgggaagggggctgggagggggctatgggaaggggacaccatacgcgggaactgacctttagctcgatggtcctcctccttggggcaccggcccccctcccaccacttgcgcttcaggatctccagccggttgttctcctgaagctgcaggatggccagtgtgatctcatcccggaacggggagcctgggcaggcacacgaggggctggaccagccatcgggccctgcagccctgaccgccccaaaccccaaactgtgccctcaccacggccttcccccgcctctaccacgtgcccagggtcttccctgcagcctctcctcacccccagcccagtctcctctcaacacagcagccagagagacagtgttaggaagagtcagaggccatacctttcctgtgctcaggactctccatggcttcctgttgcaagctcctcccctcggccactctcagacaccctcacccccacggctctcagctccagcctcatcagcctcctggctgctccccaaattcatcacacacagtcctgtcttaggacctttgcctctgcctggaatgtccctctccgcacttcatccaggtctctgcccacatgctggctccccagggagtctattctgatgactttatttaaaatggcaccaagcgccccactccctgtcagtgtcttccctttaatttactttggagcagctgtcaccacctaacactgtattatatggctatgtgtttatcatctttcgtctgcatccagtgcgggacttggcatgcagttggacaccagacgaatccccatccacacctctccctggaccacctctcctccccaacctcacatcctgcccttaagccatccttgggcttcaacaccccacacaccctattctatacttatttcttcattgactaagatacttcccgaccaactaccacagaaccagagacacgggcagatgaaagtgattaatatctaccaggcaccaactgtgtgccagaccctgggtttattcaggtcttatgatgatcctgtgggacaggtatcccacctgaggcaagtgtttctgaatgacgaaagtgatacacttgcttaagactgtgcactgagtcagggaggaaactgagatttcttcctttcttttgacagaatctcacttggttacccaggctggcatacagtggcatgatcattgttcactgccacctccacttcctgggctcaagcgatcctcctacttcagcctgtagctgagactacaggtgcataccacacctggctaattttttaattttttgtaaagacagggtcttgctatattgcccaagctggtctcaaaactcttaggttcaagtgatccttccggcttggcctcccaaagcactggaatcataggcataaaccacagtggccagccggaactgggatttgaatccaggtcggtgtgactcctgagcctgtcctccaagcaccaagctacactgcctccctggcaccgactcacctacaaagctgctaagatctggggcaatttgctatgcagtaatagataactaatacaggtgtcatcagtacataaatgattttaaaagccaaaatgccaaaatttggtgacaatttggtcgtgagttccaccactgagtcctggaaaaacatgtcctgggccatgcgaggtggctcatacctgtaatcccaacactttgggaggccaaggcgggcgacagagcaagactccgtctcaaaaaaaaaaaaaaaaaaaaacaaaacaccaaacttgtcctgaaatataaataggcacatacaagtctccctaccagatcattccatccttcccatccatcttacaagcatttttcaagcacctgctctgagccaggctataggatttttccaagaaataggaaacaagaccaggtcctcacccccacagggcccttgggggaagacagcaagccccaccacccacatatactgaattgtatacacagtctcactgaattctcccaacagctctgggagggctggattgctgctaggcctggttttgcaggttgggggtacagaggctcaggacggtgatgtcgcctgcccaagaccatacagccaggaggccacatgcaacacacccagcctgcctcgggggtgcctggcccggtcctgggcctgctcacaggtggttttggatgcccacggccctgctgtgttccacaccgtgctgtgccgtacccagcggcatgccaatgccgtagcccttggtgtcgaggagtcccccgatctgggtgaggttgcagttgaggcgccggtggtattcgttcatggtggactcgagcaggaaggcgtagcgggagttgaggacgcgggcaatgccctcttctgtgctcttgacgaacacgctgggctgcttcgactgcatgtagttccacatgcgctggtacgtttggtaccgtgaattctgggcaggaggatcacaaggggaagatgggagggtctttccagccgcttcctttccccgagcccttcccatcctccaggaagtctccctcaacccaggagaatgcaaggtgatcaaaggaagacagagccaaaggtagaggagagagaggagatggacaaactgtccaggccaggtccaagtcatccccacagccactgtgcccaccacccacctggggggcccggtgagtgcacctccacctccttccccttaaccctccagccggtggccgctgcccaactcaggcctcctttagaccactaggacctccctgccaagcttgctttcctcttctttccttcccaccaccccaaaatacaaaagatcaagcacttttcaccttgaagggccttcccttctctctgtcagcccatattcctggtcccgacccttccagcagcctccttgatcccatttggcccatatgacattgacatttgataccacatatgcctccctgccctcattccccagttccctagccagccagctgcgagccccatgacagcacatgtgtgttttctgctccccagcctccaggctgtcactgacaatcagtccctctgacccaggagaccctgcccagacccatcctgagctgctttgcatggcagggatcccaacaccacgcctgagaggttctggtggccccacctggaagaaggtcatggtggagccggcgtggatggtgccatactcgatgttggtctgatctgccaggtcatcggccgactccacaggcacctccatgcgctgcacggtgaggaaggcggccaggttggccgtgtaggaggagatgatgatcaaggtgaaggcccacctgaagggtgggaggggtgagtcacgggctggagtcacccctgctgacctgcccccgtggccatgccccccattggtggtgcccctcccaagtgaccccagcatctggaagactcagtgactgctgggtgcagaagcggggagtgtggattctgaagccagacttcctggttgtaaatattgcatccggagacttctacttccagatataaaagagtaagatggtctggaaataccctcccaccataaacagctaaagagctggatagaatacaggaaacttttttcttttttttttttttttgagacagatcttgctttgtcagccaggatggagtgcagtggcacgatctcagctcactgcaacctctacctttggggttcaagtgattctcctgcctcagcctcccaagtagctgagattacaggtgcccaccatcacgcccggctaatttttgtatttttagcagagacggggtttcaccatgttggccaggctggtctcgaactcctgacctcaggtgatccacctgcctcagcctcccaaagtgctgggattacaggagtgagcgaccacgcccggccaggaaactatttaaaacataggacaagagacatcatagaactgtgatccctgagaagagaaacaaaatgagtcttattgtccaggctgcttggctggatttaatttataggaagggaagcccaaacagcccagcaatcctgctgagttgcagagacggagactggtgatcaggcaggccaacatggctggaatttgggggatagagtgcctgagaggagggagctgcaaagagagggaggattcagaaaccggtggtccccttgagtctttggctgaatatcaatctgtgcatgcatggggtgaaactctgtggggctggacaagagcaactttcaaggagaaaacaattcttagagttgacacagggctgagagtcttttgagctccctgcagccagagtagaaagatttcattgaatacatgagacattcagtagagacccaaaagtgtaacatactagaaataggattaagttagccctagaataaaggcaatgctaaagctgcactaaaaaagcttaaaaacaggcctagaagtatcaaagtaattcacaagtaacctaactagattccagaaaaagtttataaatactctgtaaaaaaatatattcagcaatgtaaacaatgtctgttatgtaatttttttttttttcttgagacagagtctcactctgtcacccaggctggagtgcagtggtgtgatcttggccactcccgggttcaagtgattctcctgcctcagcttcctgagtagttgggattacaggcacctgccagcacgcctgactaatgtttgtatttttagtagagatgaggtttcaccacgttggcaggttggccttgaactcctgacctcaggtgacctgcccacctcgcccacccaaggtgctgggattacaggcatgagccactgtgcccggcctattacataattttttaaaaaaataccaggttgggcacggtggctcacacctgtaatcccagcattttaggaggctgaggtgggcggattgcttgaggccaggagttcaaggacaacctggccaacatggcaataccccgtctctactaaaaatacaaaaattagctgggtgtgatagcacacgcctgtgatcccagctacttgggaggctgaggcacgagaatcgttggaatccaggaggtggaggtcgcagtgaaccgagatcaccactgcactctggcctgggcaacaaagcaagactcttgcctcaaaaaaaaaggaccaggtaaacaaaggtgcaggaaaatgtgacctataaccaagagaaaaatcactcaattgaaacagacccagaattgacatagatgatgacggaattagcagacaaggacatgaaaacagctattataaatacattcagaatgctcaagagtataaagaaaaacatgaacgtaatgaaaggaacagaagatataaaaagaagtgaacagaacttttagagaatgatatacacatatctgaaagaaaaattttactgaaagggattacacagattagacaccggcagcagaaaagatgagggaatttgggccaggcacagtagctcatgcctgtaatcctagcacactgggaggccgaggcaggaggatcacttgaggctgggactttgagataagcctggtcaacatagccagaccctgtctctacagaaaaataaaaaaattagatgggtgtggtggtgcctgcctacagtcccagcaacttgagaggctgaggtgggaggatcacttgaggccagaagtttaa

SEQ ID NO: 97019 - DNA, 64392 bp, Homo sapiens
ttgccctggggaagggggaccccttccccctgtccccagcacactcacctctgtcctcctgcccgtccttctgttcccgctgctgtcctgtccccaggctacttcagccaggactgctgggagcttggatctgagttgggggggtgctcggaggaggacaatttcctgtcaggaaacccctccctctctggggccaggggcgggaaggactcattatctgtctgcccttttaggccaggctgcggttgggctgggaaggccgaggcccacagctgggcccccaccctcacccccgctccaggccggaatccgcccactcctgcatgctcttcacgcctcccaaggtgacaacaccatcctgggcgccccggggagacaccccaagctggacgccagcccagagctgctctccagcatgggcaagccccgaggccttagaatgagaaccggggggcaggcacgcatctctctagagttccctgccacgggctgaagaccaggagggaagttttgctgggcccaggggctggggagggggacctatggaggagggcactggacatggctttggaattgtggttctctttgtctagaagcccctgtacccaggtctctgcatgaggccctccttttcatcatcccagttccagccccacagtctcttcctctgttctccactgtcccgtctcacagagtcgtcactctgctttgtcaatttatttttctttttttttttcctgagacagagtcttgctctgttgcccaggctggagtgcagtggcgtaacaatagcttactgcagcctggatctcccagactcaagagatcctcccacctcagcttcctgagtagctgggactacaggcatgcaccaccatgcccagctaatttttgtattttttgtagagacacgggtctcattaggttctccaggctggtctcaaactcctggcctcaagccatcctcctgcctcggcttcccaaagtgctgggattacaggcgtaagccactgtgcccagcctgtcaatttctttattgcaccttctacaatctgaaattatcagatgcaactggattccttgcagataaactcagcaaagctcactttgttgatcctgttcatctttataagcctagctgcgtgcctggccctcagtagtcaagatttaaatgaatttaaatgaagctgagggttggaggtgggtttggagatggacttcctgctagagttgggatgccaagtgaagtgagggctggggctggagctggtgctgggtggggttgggtatgagagtcagggttactttaaaaggctagggccatgtgtggtggctcatgcctgtaattccagcactttgggagccaaggcagggggattgcttgagcccaggagatcaagaccagcctgataatatagcaagaccccgtctctacaaaaaaaaaaatttttttaattagccaagtgtggtggcacgctgtagtcctagttactaagggagctgaagtgggaggatcacttgatcctgggaggtggaggctgcagtgagccatgatctcgccactgcgctccagcctgggtgacagagagagaccctgtctcaaaaattaagaaaaaaaaaattttttttaaataaataaaactgggctggttgcagtggcttatgcctataatcccagcactttgggaggccaaggtgggtggatcgcttgaggtcagaagtttgagaccagcctggccaaactgatgaaaccctgcctctactaaaaacacaaaaattagccaggtgtggtggtgcatacctgtaatcccagctactcgggaggctgagacggaagaaatcgattgaacccaggaggcagaggttgcggtgagccgagattgtgccactgcactctccggcctgtgagacagagtgagactccatctcaaataaacaaacaaacaaataaataaataagataaactgtgttcaagtgctcaggcacagcctgagggggatgcgtgatcactggcctaggcaaagtccaggctgggatcagggttggggtcaacattaggatcgggggctgggcttagggatcacagctccctcctggatccaagggttaagattcaaaggtctgaatgccccagttgaaggaatgaattcaccagacataggttgtggaggaagggctagctggatgaccaggtcgggaggcagaggaacaggccttgccccccagctcggcctctgcaccgcggacccatggtcagcagtggcccatcatgtactgggatcgtgcaggatttccaccccgccttatttatttatttatttatttatttatttagagacggagtcttgctctgtcgccaggctggagtgcagtggcgtgatctctgctcactgcaacctccgcctcctgggttcaagcaattcttctgcctcagcctcccgagtagctgggactgcaggcgcttgccacctgcaagcgcccggctaattttttgtattttttttagtagagacaggttttcactgtgttagccaggatgatctcgatctcctgacctcgtgatctgcccgcctcggcctcccaaagggctgggattacaggcgtgagccaccgtgcccgtccccctcctttttaaaaattattttttttattttgatttagagacagggtctcactatgttgcccaggctggtctcgaactcctgggctcaagtgatcctcccgttctggcctcccaaagtacggggattacaggtgtgagtcaccgcgtccagccccctttttaaattttattattattttttattgaaatacaattcacatacataagagtcacccttttcaaacagagtccggtaggttttagtatattcacaaggttgcagcaagcgtcaccactatttaattccagaacattctcatcaccccaaaaagaaacctggtacccatcagcagtcatttctcattccccagcctccaacccctggcaaccattaatctactttctgtctatggatttgccaattctgaatatttcatatgaatggaagcatacagtaagtggtcttttgcgtctgacttctttcgctaaacatgctgttttctttttttcttttttgagacggattctcactctgccgcccaggctggagtgcagtggcgcgatctcagctcactgccagctccgcttcccgggttcacgccattctcctgcctcagcctcctgagtagctgggactacaggcgcccgccaccgcgcccggctaattttttgtatttttagtagagacggggtttcaccgtggtctcgatctcctgacctcgtgatccgcccgcctcggcctcccaaagtgctgggattacaggcgtgagccaccgcgcccggccacatgctgttttcaaggttcatccactttgcagcctccctctctgtaagcctcggtccccccacatctgggaaatggggtggggacgctgttggggaagggagggcaggggtggaccctggagtgtgtggggcgcgtgtagggaggtgatcggctgcccccgtgtggtgcacggtagaactgcagctctcagcgccaatgcagggaacgggttgggggcgctcagcccctctagcctacccccaagacccccactttcaccctgcggcgtccctgggatcacagtacgtctagaacactaccccggaactccaccctctctgccactgtccctgaggctcctcgggccatatttgccaaatagtaataataatgtccccacatatgaattttgaatctggtcccctgtgaagcactttactcaaagattctcatttatttgttagcagtaacattaaaataacaaataaatataaacaaattgacaaataaaaatagtagcagcctgaggttgctgctattatttttcggagacaggaaaccacagtggttgagagagggtccaagttctggaacttgggagcacttggattcaaattgtagccctgccactaatttgccgtgtgaccttcagcgtgtgacgtttctcccttccttgggcctctgtttcctcatctgcaaatgggattgataaagatgctccctacctcttggggtggcagaaaggagaaactgctcagagcctggcacaagggcaactgccatgagtctgtgttgctcatagtatcaagcagtgctgtgctttcacaaccagcttttggctgagtgcagggtagtcccagcactttaggaggccgaagtgggaggatcgcctgagcctgagagttggagatcagcctgggcaatatggctacaaaaaattagctgggcgtggtggtgcacacctgtagtcccagtgacttggtggggctgagctgggaggattgcttgagccggggatgtccaggctgcggtgagccataatcgtgccactgcactctagcctgggtaatgcagtgagaccctgtctcaaaaacaaaacaaagcaaagcaaaacaaaacacccccagctctctgcaggtgggggtgtggagccttaatttgtagcatttgccaatttccatggtgtaaatattcccaccatggctaatttcaagctaccaaggtgatatcacatggcatttttgccccccattatatagtaattttactgtgcagctacaatagacgtaggtaacctcaagatcacagataatggcaaatgtagtaagataactaggacgtgatgagtatgtattacttgtacctttaatgtaatttaattgtatgtttgcataatttaatttttaataatggctgtgtttaacaaccagttccaaaattcctgagacataacaatcagctcgctccagccagatccagcacactgctgttttagaaggggaaactgaggctcaggaaaataagcctcagatagaagaaggcagggcacagaccccttcccaaaaccatgtgactcccaggccaagactatgtaatgcctgtctttctttcatcccaccctggtccacagagcatggatggtccccacagcgctgtgtggcctccgagaggctcttgtcctctctggtctcagcctgcccgcatggggagtggctgtgccctgcaggcgaatacctgcacagggttccttcgcacctgccagtgagcaacacacggattcttcctttcactttacaaactgggaaagtgaagcccagaaagggcaagtgcttgccccgggtcatacaggtggacagagagggtccccacaccccagctggggtgcaaaggagtggatgctgcagccccaacctgcgggtctggatctatgtggctgagtggaggcagcctgactagggaggtcactgagccctcagcagtggccaagccccgcacaccatccccttcacccaccccacccttaggcctccgaggggagagcttcccccgctcccccccgccaactggggagagaatgggccagggggagggacaatgtgggcagcgcctctggggtcttctctggctcagtccctttatctctatctcttcacagatctctgcgtctctgtatctctttgtctctccctgtgtgtgtgtggggtctctctcagtctttgtccctctgcgtctctgggtctctctgtctctgtctccctgcgtctctctctctctgtcatctggctcttccttcatctccttgcgcctctccacccttttgtaactcgtctctctctcttcgtgtctctctatctctacgtctctcgatctctctctctgcgtctctggcgctctgccccggcctctctctccccttctctcctctccagtgcgcctctcgtctcgggcgagaacacgctccccgccggcgtgcccagacccgcctccgcccccggagcccccggagcccccggcgccccgaccagcccgggcctgcgcctttaagggccggcggcggggggcggggtcccggcgccccgccctgcccgcccctccccctgacgtcccttcctccctccccagcccctccaccgcctccctccgccgccgcytgggccggctccgcgccccctccgcggcccccgcccgcccgcctgcccgccgcccccatggcgcccggggtccccgctgcacggggccactaggaccctcggcgtcccttcccctcccccgccctgccccctctcccgccgcgcggacccgggcgttctcggcgcccagcttttgagctcgcgtccccaggccggcggggggggaggggaagagaggggaccctgggacccccgccccccccacccggccgcccctgccccccgggacccggagaagatgtcttcgcggacggtgctggccccgggcaacgatcggaactcggacacggtgagtggggcccggccccttggggagccctggctgggtccagccgccaaacccttctccccgttgtacccctcgccccgcgagcccctaccctcgtttcctgggcccgacccggctcgtcacctctcgacccctcccggacttccaggcctctccaccctccccaccttttccagcccagcccgacccctgggggcgcccctctctcgggacccctctcttgtccccgtgcagaccgcttccgctcgggtctgttccctccaggaagccccttcccctgcttccaggagcccctcccttctcttgcctgtgctaagccgtttcccctccaggccgtccgcgtccgacacctcgccccctcccggatttgcagggcccctgaccccccaaggcccggccctggcactctcagcagggcctggcccagtcctgcctctggctccggccttccctgtctggggctgggtgccggctccccaggagcccccctcctcttattcccagccctctgcccctccaggacgcacccagggcgcctgtgggcagcccctggcaggaagctggtttccacctctcctgggccccggcccttttctggcttcttcaaggtctctcccgtcccaggcctggtccccatcttccaagcagccctgtccctagatcccagcaccccggggcccccagatgccacctggaccctttctggtctcttcctctcccaggaagccttggcctccaacttctaggccctcacctcacccaggctggtatttctaggccctggaccagtctgactccaggcctcatccgccctctatcaacttctcagcttcaggcagccccttccccaacccccaacctctggaccccctgctaggccaaactcagaccccttccccacaaaccaccgtcctttctcctgccccagggcctcccccttccttgctgggagtctggccttccaaggaagccccctcctcagcttcagaggccttcctcagctacagggcctggccccagatccttcttccagaaaactcctggacctgaagcctctcgtcttgccctggtttcaagcccttttcccttgggtcaatctgctggaagctttctccccaaatttctagaccccttgaccttccccagggctcagcctttattcatctgggctgctccttgcccaagaagttcctaccccatacttccaggccccccagacccttctctggtttcaaggacttctcctagaagcccccttctctgattcctaggagcttccccaagacccagggattcctggcctctgacttccactgcccccatggctttgtcactttccaccattcccaggcgccccctgcccctacactgcttcccagagaggcccctccccatctcctgtgtctctgatcrctgatcacttccaaagacctgcccaccacccaatcctagacttctccccacctgggatctttgtgsctttctccaaatccttctgccaggtccctgttccccttccccctgtttccctcacctccgacagacccccccmcacacacacaccatcagagagatttatatctgtcccttcctcatcttgcagatccctccctcacagagaccaccccgcatcatcactatgggccagaactccaatttggagtctaatgaaatgcctaccacctctgttccttggtcactacaatctacagtgaggtgccaggggctccacagtcctgggttccaatgctgacatggccagctggtttgccttgtgtcctcagacaaccagttctccctttctgagcctcagtttcctgccctggaaaataggggtgaccgcttgagtgcctccraggcttactygattcaggcgaaggctggcacctaggaagcactccacaaatgccagctgctattgtggctgtgggtatgagtcagacagcccgtggattctcagctcagggctgttattggttgttgagtgagcctgcagattcactcccagcttgcagcctcagtttccttatctctaaatcgggttgatgatggccccccactgttagggatgtttgcaggagccagcgacgtgatgtgactaaggtgcacagggcctggcatgtgtcgtggctgttgtggttattagcactactttaattgttcagataaacttgggttcacatcctgtttctgtccctccctagctgtgtgacctcgggcaagtaaccttacctctctgagccttggtttccttgtctgttaagtggaacgcctaatgaagacttgctgttccctgggttgttaagatgcgtgcatggtgcggatttgaggatggctaatccccttttctctcctccaactcttgtcrctaagacctgcctgtcagtcctggtggggagtcacttgcctgcctctggaatgggaggttgcagccccctctcctgttacctggttaccatggctacagccacgtggggtcatgctcccccaccccaagttccagggccccccaccagggggccagcctccccaggttccctagcaacagtcccgggtgttggggcgccagccgggcgggagggagccaggccagctggtggtgcaggccaattttagctcccacccccggcccccaggggctttgtcacccactgccccagctgcccctcgcaggggtccctcagccatgctgccttcagcgtggtgccatcccacctccagctggctgccctggcgccacctgacagggcttcttctccaggtccttatcttggtggggatcggaggccttatctccaggatctccacctgcctccctggtctctcctgggaagaagcctgggcctgtggggaagcctggctcagcactcaggaggaatcagcaggccggggttcgcatcccagcactctgctccatctgccctgtgaccttgggggagggactccccctgcctgagcctgggtgtccccgtctgaagactgcagatcataattggacccacattggaggccagggtgagggcacggcaggcagtggcggacgcgtggttagagccctggccgtggtggttggaactgcccagctgtggggaggttgtctttctgcccctgtgaatggactgtgtgaccttcacatggcaccttccctctccaaggctcagtttctctgctggaacatggagtcattccctgggctactgcaggaattaagtgtaggcgagttacctgtttacacaggacttggtccatagcatgagctgctttgtagaaatggttcatgacccagcgtggtagctcacacctataatcccagaactttgggagacccaggcaggaggatggcttgagcctgggagctgaagactagcccggacaacatagcaagactccatctctacaaaaaaatttaaaaatcagctgtgtgtggtggtgcactcctgtggtcccagctactcaggagcctgagrtgggaggatttgcttgaacccaggcagttgaggctccagtgagccttgattacaccactgcacttcagcctggrtaacagagcaaggccctgtctcaaaaaaaaaaaaaaggttcaggtgtgagaggcagtgtggtattgtgacagagaagagcatcaagtytggtggaaactatcgggcacggtggctcatgcctgtaatcccagcactttgggaggccgaggtgggcagatcacctgaggtcaggagttcaagaccagcctggccaacatggtgaaaccccctctttactaaaaatacaaaaattagacggttgtggtggcgggcgtctgtaatcccagccactcgggaggctgaggcaggagaattgcttgaacccaggaggtggaggttgcagtgagttgagatcgtgccattgcactccagcctgggcaacaagagtgaaactctgccaaaaaaaaaaaaaaaaaaaaaaaatactggtggaaactgtttgggttcagatcgtgggtccgggtctcactttccccacctgtaaaatggagataatagtgtggtaatggcctcatattgcatcaatgaccagcattaattaaacgttagttgtcgttgctatcaagtggcccggcagtgtctttctcagagacttgggcccccagcccatcagcctcttggcctttcttcctcccctcctgttgtcctcctgcttcccactcccagccggaagggcacaggcagaactgccttggcgggaggcctcaggcaccctgagccccagccctgaaagggagmcagtccctggggcttccaatcaggccagggcagctcagagcaggcaggtgacctgcgggggagagaggccagggagggacaggacagtaggaacagaacatcaggaggagagaagccatggtgtgggagacagcaagtcagggcgcttctcaagccctgggtgtttcagggggtggcagaagcaacagtgtttcccatggaaggaggataacagggattcaaccaggtctcagggccagtgaaagacttggttaccctgcagggggtggtggctcaggcctgtaatgccagcactttgggaggccgaggtgggtggatcacctgaggtcaggagttcaagaccaacctggccaacatgatgaaacctcgtctctactaaaaatacaaaattaaccaggtgtggtggcacatgcctgtaatcccagctactcgggaaagctgaggcaggagaatcgcttgaacccaggaggcagaggttgcagtgagccagactgggccactgcactccagcttgggcaacaagagtgaaactctgtgtcaaaaagaaaaaaaataagacttggttacaatgtttggagtccaatctggggtaacagtgattggaatcaaatgttaggggcattccactgggaatcaaatgttgacatttgggtttgaagtagaatttgggggctggagaggggacagttgatgggtaaaatagcaagtcaggaccagtggtggtggaggaggagcctcgagtccagattgaggtcagcgttgattggggttgagggcagcctcatttagggcaaaatattgtagagttgatccaggctccaggacaggcatatcctgctttttcgcactttgccttattgagcttcacagatacagtgttttctacaaattgaaggtttctgacgaccctgtgttgagcaagcctgtaggctccatttttccaacagcctgtgcacaatttgtgtctctgtcacattttggtaattcacacagtatttcaaactttttcatcattattataatagctgttatggtgatctgatatcagtgatgtttttcctcttttttttttagagacagggtcttgctctgttgcccaggctggagtgcagtggcatgatcatagctcactgcagccttaacctcctggggctcaagcgatcttcccatctcagccccctgagtagctgggactataggcatatgccaccatgcctagctaattttttttttttaagtttttctagagatgggtgtctcgctycattgcccaggctggtctcaaactccctggcttcaagcgatcctcccgccttgtcaatgattttgttttattgtgattcactgaaggttcagatgattgttagcatcttttaacaagaaagtattatgaaattaaagtatgtacattgtttttatagctgtaatgctattattgcacactcagtagactrcagtatgatgtaaacacaatttttctttctctttttttttttttttttttgagatggagtcccactctgtcacccagactgtagtgcagtggcgcgatctcagctcactgcaacctctgcctccctggttcaagtgattctcctgcctcagcctcctgagtagctgggattacaggtgcgcgtcaccatgtccggctaatttttgtatttttagtagagacggggtttccccgtgttggccaggcaagtttcacactctgacctcaggtgatccacctgccttggcctcccaaagtgctgggattacaggcgtgagccacctcgcctggcccataatattttttttttttttttgagacagagtctcgctctgtcacccaggctggagtgcagcggcgcgatctcggctcactgcaagctccacctcctgggttcatgccattctcctgcctcagcctcccaagtagctgggactacaggcgcatactgccacgcctggctaattttttgtatttttagtagagatggggtttcaccttgttagccaggatggtctcaatctcctgacctcgtgatctgcccgcctcggcctcccaaagtgctggaattacaggtgtgagccaccatgcctggccttttttttttttttttagaccaagtctcactctatcactctggctagagtgcagtagagcgatctcggctcactacaacctctgcctcccaggttcaagtgattctcctgcctcagcctccagagtagctgggattacaggcgtgtgccaatgcctggctaatttttgtatttttttagtagagatggggktttcaccatattggccaggctggtctcgaactcctgacctcatgatccacccaccwcagcctcccaaagtgctgggattacaggcctgagccactgcacctggccacctggcccataatttttatatgcactgggaatccaaaagattcatgtgcattgcttttttgcagtatttgctttattgcggtggtctggaaccaaacttgcgatatctctgaggtatgtgtgtaattagaaaaggaggttggggctggatgcggtggctcacatctgtaatccgtacagccgaggcaggtgggtcacctgagtcaggagtttgagaccagcttagtcaacatggtgaaaccccgtctctactaaaaatacagaaattagccaggcatgatggtgcacgcctgtaatcccagctgctcgggaggctgaggcaggaaaatggcttgaacccgggaggcagaggttgcagtgagctgagatcgtgccactgcactccagcctgggtgacagaggaagactccatccgaaggaaaaaaaaaaagacaaggaggttgggggtagtcagactgcagtgagggttgaagaaggggtgtgatgcctggggccctgaatgttgcagatttggaggacatgggggcttttgttcctggaggcgtcyttttgtagagaaagatgaaggatgcttggctctctggggcctgagtttgaaaagggccacggaggggccggtagccaggcctcaagttaagtgcactagcccacgggttccacggaaggtgggattggatagctcatgctccatctcccccgcccagcatggcaccttgggcagtggccgctcctcggacaaaggcccgtcctggtccagccgctcactgggtgcccgttgccggaactccatcgcctcctgtcccgaggagcagccccacgtgggcaactaccgcctgctgaggaccattgggaagggcaactttgccaaagtcaagctggctcggcacatcctcactggtcgggaggtgagtatgggcacagggtggggctcggggcaggtccctgtgggaccaggtcttcrgtgtatgttgatagaggtcaggattggccctgggtttgctttgtggcctcaggtaagttcccgactctctatgggacaggtcacaatatctctgatgttcccagaaccacccccrtgggaaaagagaactaatttcaygtatccctgaaattgccgggaaatctcagatcacaggcagtccaatgtgtgcrttgctaaggatgcatgtggcttttgtagataaacctgagctgtggccggatgcattggctcacacgtgtaatcccagcactttgaaaggccaaggcaggaggattccttgagctcaggagtttgagaccagcctgggcaacatagcaacactttgtctccactaaaaaataagtaaaattttttaaaaattagctgggtgcggtggtgtgtgcctgtggtcccagctacttgggaggctgaggcgggaggatcgcttgagctcaggagtttgaggctgcggtgaggtgtgacctcaccactgcactccagcctgggtaacagagtgagaccctatctcaaaaaataaaaataaaataaaataaaagagggctgggcatggtggcttacgcctgtaatcccagtactttgggaagctgaggcaggtggattgcttgaggtcaggagttcgagaccagcctgaccaacatgatgaaaccctgtctctaytaaaaatacaaaaattagctgggcgtggtggcacatgcctataatctcagctgctcagtaggctgagccaggagaatcgcttgaacccaggaggcggaggtttcagtgagccgagatcatgccactgcactccagcctgggtgacagagtgagactctgtctcaaaaaaataaaaaaattaaaaggccgtgcgcggtggctcactcctatagtcccagcactttgggaggccaaggcaagtggatcacctgaggtcaggagttcaagaccagcctggccaacatggtaaaaccccgtctctactaaaaatataaagattagcytggtgtgatagcaggcacctgtaatttcagctacttgggaggctgaggcaggagaattgcttgagcccaggaggcagaggttgcaatgagccaagatggtgccactgtattccacctgggcaacaagaccgagactttgtctcaaaaaaaaaaaaaaaaaaattggccgagtgcagtggctcataccaacaaacacagcgctttgggaggccgaggcaggtggatcacctgaggtcaggagttcgagaccagcctggccaacatggcaaaaccccatctttactgaaaaaaaaatacaaaaattagctgggtgtggtggtgcgtgcctgtaagcccagctacctggaaggctgaggcaggagaatcactggaacccaggaggcgaaggccgcagtgagccgagattgtgccactgcactccagcctgggtgacagagcaagaccatctcaaaaaataaataaataaataaataaatagtaaataaattaaaaataaaaaataaataaacctgagctgcctctctgttttaagggtggactttggttccttgaaatcttcctgtgatctggagaacacagcaggtttatttatgttgtattctcagttacacacagcctcactctccccaccacctcttccagagcaggcatctgtgctgagtatggtgacattattgcaaaaagggcccacacaggctttgcagcctagatatgaggtctctaactcacttagaggaaaaggaatggtgggtgatttcatgatttccccacccctccttcaacttcagagaaatgattggaatgaattatcctgccttggatggactctcccctgccctcacgctgtctacaccatacacgcaaaagacaccgggccccgatggtcttacaggcaaatcctaccagatgttcacattttatgccagttcttccagagactaaagaaagaactgccactgcctgactgatttttacgcgctagtttgtccttaagagcaaaaccagacaagaaacaaaattacaggccaatctggtgaacataggtataaaaatcttatacaaaatattaacaaacagaacctggcaaatcaattaaagaaagctgtgtgatgacgaaactggctttatctcaggaatgcaaagttcttttccctttgacaatttattcatgtacttcaccacattctcagattaaagaagagaaaccatatgatcgtctcaatactggcataaaaagtgtttgataaaatttttaaaaacacattcgtgagaatatgaggaaagctaaggggctctctcttccatgaagaacacatggttccctatatgtggatctggttccaggggtttctgagagggacctggccccatctctgttttaaaaataaaataaaagttttactgcagactgggtgcggtggctcatgcctgtaatcccagcaccttgggaggctcaggcaggcggatcacctgatgttgggcgttcaagaccagcttggccaacatggagaaaccccgtctctactaaaaatacaaaattagccaggcrtggtgacgcatgcctgtaatcccagatattcgggaggctgaggcaggagaatcccttgaacctgagaggtggaggtcgcggtgagccaagatygcgccattgcactccagcctgagcaacaagagggaaactctgtctcaaaaaaaaaaaaagtttcactgcaaaagaagtataaggagagttcaatgacattctgatttcctccccatgatgtatctcaaagctgttttaaaagttgtgtttaagaggtagattccatcaggctgcataagttcaaatctgggccacaacttactacaatttactagccatgtaactttggccaaatgactaaacagctctgtgcctcagtttccctgttggtaaaatgatgataatcctgttagccaaatgttggtggcatgtgcctgtggtcccagctacttgggaggctgaggtgggaggatcacttgagcccaggaggtcaaggttgcagtgagctatgatcacaccactgtaacaccactgtactctagcctgggagacacagcgagactctgcctccaaaagaaaagggggcgggggggtggggtgggtgcggagaatgggagggataatcctagcacttatctcacaggttgttgtgaagattaagagttctcgtttgtaaagcgcatagtccttgtagtgagggcttagtgcatgttaaccagttgttatttattccactgttcatttgttcaaaacaaagatgtgatgggccagtgatcttcattgccctcacaaagggatcccctcaaggtctcgtccatgcccacatccactcaggcagctctggagcagcgtcagccaggccctgctgtggaataaggatatttctctgcagaagtgagggtggcagtggagacagtgaggacagcttgtgcaaaggccctgaggccctgagttccccatccacagggtatggcccagagtgagggctcttctgggagagggggcaaaggaaggatatcccagggtgatctgagctgggccagctggagtgcagtgacgtcatcttggctcactgcaacctctgcctcccaggctcaagcgattcttccaactcagcctccagagtagctgggattacaggtgcctgctaccacacctggctaatttttgtatttttagtaaagacagggtttcgtcgtgttgaccaggctggtctcgaactcctggcctcaagtgatcctcccrccttggtcttcccaaaatgctgggattacaggcctgarccaccatatccagtggggcttgtggcaccttgaccgtccctcctcctttcctccccctctaggttgccatcaagattatcgacaaaacccagctgaatcccagcagcctgcagaaggtgaggctggggagacgggggagagcaggagccaggcttccggcacagccgggtgacccacctgacccttcctgcgggggcccggctggggaaaggatccyccaagccacccaccctcactctcctctgtcttcctttctggccacgcccagctgttccgagaagtccgcatcatgaagggcctaaaccaccccaacatcggtgaggagggaatgggagcaggggcaggccaccaactggaacacttgcaaaggagttgggggtggtggcagtggttagaatagttggagacccaccaggcgcagtggctcactcctgtaatcccagcacttagggaggccgaggcgggtggatcacttgaggtcaggagttcgacaccagtctgaccaacatggtgaaactctgtctctactgaaaatacaaaaattagcagggcatggtggcgggcgcctgtaatcccagctactcgggaggctgaggcaggagaattgcttgagcccaggagccagaggttgcagtgagctgagatcgcaccactgcaccccagcctgggcaataaagcgagacttcatctcaaaaaaaaaaaaaaaagaaaaagttagagacctggtttctcatagttgcatcactgctgtgtgaccttgggcaagtcacttaacctctttgagcctctattttctcttctggagtaggggtgataagagggcctattaccaggtcattgtgaggattgacaaagatgatgcatccaaaatgcttagtttgggctgagctatgggacttggtccarttatttccaccagcatcaacatcctcactgtcattatcattgggcagaggcgggagtgaggggtctttagtgagagaagcggagtttagctccgcctggatgtggctgcagcatttgttcattcattcattcatttactcagtaattattgattgagtggccgctatgtgccagaccctggggacacaacagggaagacaacaagacacaaatctctggcctcatggagctgacattcttgtgagagagaaagtggaaagggtggctgggcgcggtggctcacgtctgtaatcccagcactttgggaggccgaggcgggtggatsacctgaggttgggagttggagatcagcatgaccaacatggagaaaccccgtatctattaaaaatacaaaattagccggatatggtggcgcatgcttgtaatcccagctactcgggaggctgaggcaggagaatcgcttgaacctgggagggtgagcagagatcgcgccattgcactccagcctgggcaacaagagcaaaactccatctcaaaaaaaaaaaacgaaagtggaaagggtggtagagggggctgaggagtttggaaaatcttgctgtcagtagggagccattgagtgttgagttggggtgggggtgttatggttggcacatttkcatagttactgaggacaggttaggaggggccctttctccctaatgccctacactgttcccaaccattatagtgaagctctttgaggtgattgagactgagaagacgctgtacctggtgatggagtacgcaagtgctggtgagccgcccaccctctccgccctgcccctgtgccacctccccctgccgctgcacctgaccctgaccccgctcggcctctgccctgcaggagaagtgtttgactacctcgtgtcgcatggccgcatgaaggagaaggaagctcgagccaagttccgacaggttggggcagggctgagggtggggctgactgggtgcctgggtccctgggagggcgtctgagagctgggcatggtctgggctgtccagcgacctgggggcggggcttaagtctgggcaggggtgaaggtgcagagctgggtgtgctgggcatatagttgcccagatgtgagggcatccggatgtaggtttgcaggtgccccgttgggtgggtgagaggatgtttgggcatgaaggcgccccggtgggcaggtgttgcatgtgtagggcatgtgggtgtgcccagcgcgtaggtgtgtgggtgatgggggcacgaaggtgccagggtgccaggtgtgagtgtgccggagtgtgattcaaaagatgtgtgggcagtagctatgtgggtgcccaggtatgtaggtatgtaggtgtgtggggaagagagtgtagggcaccccaggtagatgggcaagagagggctgaggggtggttgtgtaagcttgtaggtactagggcatgccggtatgtgggtgcccgggtgtgcgagtgcccagatgtatgggtttccaggtgtgtggtagtgaggacacccaggtgtgtaagagtgtggggggggccaggtgtggagtaagaggacgtgcaggtgtgagggtgcccaggtatgtgggataagaagaagtgcaggtataagggtgcccaggtgtggggtaagaatatgtgcaggtgtgagggtgcccaggtgtggggtaagaggagatgcaggtatgaaggtgcccaggtgtggggtaagaggagttgygggtgtgagggtgctggggcatgaggggtaagaagatgtgcgtktgtgagggtgccaggtgtgtggggtaagaggagatgcaggtgtgagggtgccggggcatgtggggtaagcagatgtgcaggtgtgagggtgccgggcatgtcggctaggaagatgtgcaggtgtgagggtgtttctgccttgacgctgctgtcctgaactcaagggccataagccctggtgagttggggcrgcctgtctrtctacaggtatgggatatccccatgggagtttccagatgtgaaggtcaagagaggctggtccccatgccttggttccgacatccctgggcatgggggtgtcctgggggagrcgtgtgtctgcccaggttccacgggcacctcttgctgtgactgaatcagrgtgtgaggccccagatctcaggctgtgccttgggsaggcctgggscccagctgtgagtggtttcacagtccactgagggaggctgagggttttgggagccacaaataaccaaccttccccttccctcccagattgtttcggctgtgcactattgtcaccagaaaaatattgtacacagggacctgaaggtaagcccccgacccgctgtgatctcagggaccacrgctcagcccacagacttctccctgcccccacccctccatggtttccgtggcctccagcaaattcctccagcccttttctcctcctgctcttccctccacacccagcacccccttgaccctttcccaagcttttgtggcagaaacaaggccagcagatgggggagcggatgsggrggaggggacaggaggagtgaacaaagcagggagaaacaaagtgtcccaaaatggccctggatgctacagggctgttggataaggacgctgggacatgataaggggtttgtcgctctcagagcctttgggaccttggcattctccgaccttaggacattcaggactccttgaggatttaggttgcagagccccagagtcactctgcccacagggtcccagagtcacaggaatctgagaacttttttttttttttttttttgagacagagtctcactctgtcgccctggctggagtgaagtggcgcgatctccgctcactgcaagctccgcctcctgggttcacaccattctcctgcctcagcctcccaagtagctgggactacaggcgcccgccaccaagcccggctaattttttatatttttagtagagacggggtttcaccgtgttagccaggatggtctcgatctcctgaccttgtgatccgcccgcctcagcctcccaaagtgctgggattacrggcatgagccacggcacctggccgggaatctgagaacttragaaggcttcgtttttatttttatttttgacatggagtttcacactgttgcccaggctggagtgtagtggccccatctcagctcgctgcaacctccgcctcccgggttcaggcgattctcctgcctcagcytcccgagtagctgaggtcacaggcacctgtcaccatgcccagctatttttgtatttttagtagagacggagtttcaccatgttggccaggcttggtcttgaactcatgacctcaggtgatccacctgcctcggtctcctagagtgctgggattacagatgtgagccaccgtgtccagtctgagaaggggctttgagagaaaagccaccttggccagtaccaggcaggaagggactcaacggggctccagcccagctacctgtaggagctgagccaggcagcctcctcgagtacctgtggccccagggtccgcattccacaccttcygctgtatgtctcagtcctcgcgctccaagaccaggtggctgaccgtttggttggctcaaatccggttgtcttgactgtcgttttgtgagcacctgtgtgctaggcggcatcctaagtgctttaaggaagtgcttctggaactatctgtgaggaaggactgggttggttttgttgttttgttttgtttttttgttgcccatactgaagtgtgatgtttccatcacagctcactgtagcctcaacctcttgggctcaaatagttctctcacctcagcctcctgggtagctggaaccacaggtgtgagccacaaagcctggctaatttttgagttttttgtagacaagggatctcactctgttgtccaggctggtctcgaactcctgggctcaagagattctcctgcctcagccttctgagttgctgggattacaggtgggcaccaccatgcccagctaatttttgtatttttagtagagacggggtttcaccacgttggccaggctggtctcaatctcctgaccttgggtgatctgcccgccttggcctcccaaagtgctgggattacaggtgtgagccactgtgcccagccacaaaccccattttaaaagctattattagattctaaagaaattccacagtcaaattcctatggaggaccaggcgcagtctcacacctataatcccagcactttgggaggctgtggtgggaggattgcttgagcccagaagttcgagaacagcctgggcaacacacccaagacctgatctctacaaaaaataattgtaaaaaattagcttggctggacgcggtggctctcacctgtcccagcactttgggaggcctaggcaggcagatcactggaggccaggagttcaagaccaacctgggcaacacggtgaaactccatctctactaaaaatacaaaaattaggtggtcgttgtggcgcgtgcctataattccagctgcttgagaggctgagacatgagaattgcttgaacctgggaggtggaggttgcagtgtgccaagatcgcgccagtgcactccagcctggacaacagagcaagactccatctcaaaaaaaaaaaaaagaaaaaaaattagcttgtatgcctgtggtctcagctactcaggaggctgaggcaggaggatcccttgagcccaggaggttgaggctgcagtgagccatgatcatgccactgcattccaacctgggtaacagagcaaaaccctgtctctaaaaacaacaacaaaaaatacaaaagcagaaagtgcatctgaaaaaaagaaaaataatacaaaatgaaaacaaaaaacaaattgctatagaggttcaagtgctaaccctctcttcacttccttccactgggctagggtgtccctccacacggccctggaggcagcaccttagaggcttccatgattcacctggaggtcgtatgtcccctggtggagggtccccaaagcagctaacaygagttttggggtcgtattagtacaccaggggtaccaaccaaggggaccaacccatgtgactttggggctggattgcggagcctcaaatggcaggaaaagaaatgtaatccctggcctggcgtgacggctcacacctgtaatctcagcactttttgggaggccgaggtgggcggatcacctgaggtcaggagttcgagaccagcctggccaacatggcaagacctcgtctctactaaaaataaaaaaaatagccaggtgtggttgtgggcgcctgtagtcccaggtactcgggaggctgaggctggagaatcgcttgaacccaggaggaagaggttacagtgagccgagatcgtgccactgcactccaacctgggtgacagagtgagactccatctcaaaaataaaaaataagaaaaagtaagccccgagcaagccagatgctattayattyaggtttagggaggagctctgtggtgtgtctttgtagggtttgggcctttattggggcaggagctggggaagagtggtccagaaataaaccaggagacatagggagacctgggaggaagccagggatgctggtgacctgggcgagggaaggaccgcagttgggatgggccagacgcgggtgacattttgaaaggtggaggtgtgcctctgtttgtagtcagaaggctggaggcttcttcctccgcgcactgtggaaacgggtggccttgtttagattctagttgtgctgctttcttgcaatgggcatgagttgtggcctcccacagcttctgtttcctcccctgtgaaatggcaattgcaagaccrcatgccgcaaaaaaatagacaaaactttataacaatacaaaacgtttatttatttatttattcacttatttttgagatggagtctcgctgtgttgcccaggctggagtacagtgatgcagtttcagctcacgcgattccttgcctcagcctcccaagttgctgggattacaggcacccgccaccacgcctggctaatttttgtattttcagtagagacagggttttaccatgttgcccaagctagtctcgaactcctgacctcaggagatctgcctgccttggcctcccaaagtgctgagattacaggcgtgagctaccgcgccyggccatgaaatgtttactgatcactgactgtgctctaggggccgctgtgagcactttacgcttaaacccacaaccacgcttgaggcaggtgtcgagatcaccctcagtttacatacaaggaaactgaggcacagagaggtctggtaacccacctaaagttcacacagcgagtgagtggtggagctgggatttgcagctggaattctccgagagtctgtcgtttcaccttcacgttatgcagacagacactgttataattgatagtccacagagcccagtgcatggtagatatgcaaccaggattaaattattgctttcgttttcctgggtcttgagcaatcaggccttattttgtttctgctgggtaacttgaggctccaagaggggcaggagattacctgaagacccctagatctgcagaccacatggggtaatagtgatattacatagtactcgctgggtatgaaatactgttctagcttttctttttttttgagacaagttctcactctgttgcycaggctggagtgcagtggcacagtctcagctcagtgcaacctctgcctcccaggttcaagcaatttttgtgcctcagcctcctgagtacctgggactactggcgcacaccaccatgcccggctaatttttatctttatgtttttttgagacggagtttcgctcttgttgcccaggctggagtgcaatggcatgatctcggctcaccgcaacctccacctcctgggttcaagcaattctcctgcctcagcctcccgagtagctgggattataggcatgtgccaccacgcccagctaattttgtatttttagtagagacggggtttctccatgttggtcaggctggtcttgaactcccaacctcaggtgatctgcccacctcggcttcccaaagttctgcgattacaggcgtgagccacggtgcccagcccaatttttgtatttttagtagagatggggattcaccatgttggccaggccgatcttgaactcctgacctcaggtgatccacctgccttggcctcccaaagtgctggtattataggcgtgagccactatgtctggcctgtgmtaggttttctatgtggattaactcataattctcaaactacgctatgaaataggaactaagattatccccattctatggatgaggaaactgaggctcagtgaggtaaagttactacctaaggtcaggtagagagtaaaggacaggcccaagagttgatccctgtgggccagccctagagcctgtgctcctgtctgcctcccacgtccatgaarggctttggccttgagtcccactttccgccctctccttctctccctgcaggctgagaacctcttgctggatgccgaggccaacatcaagattgctgactttggcttcagcaacgagttcacgctgggatcgaagctggacacgttctgcgggagccccccatatgccgccccggagctrtttcagggcaagaagtacgacgggccggaggtggacatctggagcctgggagtcatcctgtacaccctcgtcagcggctccctgcccttcgacgggcacaacctcaaggtaccgagaggggctgggtgcaggggcatcagcccctccccacagtcaggcccctatcccccccacacctcccctgcagagggcctcagtggtgggactggcctgagttctcatgggaagatgggggatgggcaggattcaagtcccctctgcagtgaggccagccgaatggactgtgccatgctggggttaagggcatgatctttgcagctgataggcttgagttcaaatcctgactcatccgttcactgagctaatatttatggcccacttctctgtgtcaggctctgttttgggctttgcatgtaaggcgagaacaagagaggcaaaaactcctgcttggccgggtgcggtggctcatgcctataatcccagcactttgggaggcrgaggcgggaggctcacttgagcctgggagttcaagaccagcctgggcaacatagggagacgctgtctctacaaaaaatacaaaaattaaccgggcataatggcgcacgcctgtagtcccagctacttgggaggctgacgcgggaggatcacttgaacctgggagatcaagactgcagtgagctgagatcgtgccactgcactccaacctgggtgacagagggagaccctgtctccaaaaagaaattaaaaaacaaaccctgccctcgtatatgctacgctgtgggtgaaccttgaaaacattgtgctaagtgacagaagccagtcacataaggccacagaatgtatgattccattaatgtgaaatgtccagaataggcaaatccatagagacagaaagtggattactggttgcctgaggctgggggggaggagcaagttggaggttgattgctaaagggtactgaatttcttttgaggtgatgaaaartgttctaaaattcaatgtagtggccggcctgatggctcacacctatattcccagcactttgggaggccgaggcaggcagatcacctgaggtcaggagttcgagaccagcctggccaacatggtgaaaccctgtctttactaaaaatacaaaaattaaccgggtgtggtggcaggcacctgtaatcccagctactggagaggctgaggcaggagaatcgcttgaacctgggaggcagaggttgcagtgagtcaagattgtgccactgcactccagcctgggcgacagagcgagactctgtctcaaaaaataaataaataaaattgaatgtagtaatgattgtgcaactccgtgcatatactaaaagccatcgaattgtgcacttcgcttcaaacaaaacagttcctgtcttcccagactaacattcctactggggccaggcagctaacaaaacaataagcaaactagatatgatatcagatgctggcctgtgctatgctggggggaatactgtaaggggatgggaggtgtgggctgagttgttgcttgctttttttttttccccctttgaactttttattttgaacgattgccaatctacggaaaagttgcaacagtagagcaaataacacatggtatgtttcaggagcttcacaatcgctggcctgtgtccacatttgctctatctgtctgtatttgcacatgatctttgctgccctcatcggcattgatggcgcatttgacagttagttgcagacgctgtgtccttttatccctaaaggcgagagcgggttatctcctgagaccaggggcgttttcctgttgacggtgacatacaggaaatacagcagtggtataatcctggcctctacgccatggcccatactcagatttcatccatcatcccaggaatatctttggcagctatttttttttcccagtcggggatccactcgggtccctgcgttgcatttagctgcgccatctcttgtgtctcctttcatccggaacagttctcagcctctcttttgtctttcatgacattgacattatcgattagttcaggccagttaattttgcagaacgtccctcaatttgggttgcctggtgtttcctctcgattggaatcgggggtgcaytggggcaggaattctgcagctgggacgctctgtcctgctctgcgttgcccgtgaggagcacgtactgtgatatgaaattgtaaagtcagggaaatacttgcagaggacagaccatcaaagsggaaccctgagtgatgaagaggagggagtcccttcttcacagtggccttggccawatagccaacccctctaagcctcagtctcacctgctgttcaatgaagatcataaaggtaccaaccctgtgggccgggcgtggtggctcaygcctgtaatcccagcactttgggaggccgaggcgggcggatcacgaggtcaggagagcgagaccatcctggctaacrcactgaaaccccgtctcttctaaaaatacaaaaaattagccgggcgtggtggcaggcgcctgtagtcccagccactcgggtggctgaggcaggagaatggcatgaacctgggaggtggagcttggagtgagcggagatctcgccactgtactccagcctgggcaacagagcgagactccatctcaaaacaaacaaacaaaaaagatgataccaaccttgtggcagtgatttttaaggactggctgagatcagggatgcaaagtgctcattcaagacagccttctggccgggcacggtggctcaggcctgtaatctcagcactttgggaggctgaggtgggcagttcacctgaggtcaggagttcaagaccagcctggccaacatggtaaaaccccgtctctaccaaaaacacaaaaattagctgtgcctggtggcatgcgcctgtaatccctgctactcgggaggctgagacaggagaattgcttgaaccagggaggcagaggttgtagtgagccgagatcacaccactgcactccagcctggatgacagagcaagactctgtctcaaaaaaacaaaacaaaacaaacaaacaaaacaggctctgacactccggccatagctgaagtctggggtggggaggtgttgtcacagaataatttttctgagcctcaagcatgaagctaagagacctttttgaagggccaggccagtgtcttacctgccccaggtccttgtcactttctgccatcctggtgtccccaccaggcaccccaggccttgctgtgcaaaggaggcacacagctgagaagaggcaggttctagctctgtcatttcctttctgagtgaccttggacatgtccttttctgaacctcagtttccccacctgtaagatgaagacactaagagtattcaggacaggtgtcgtggctcatgcctgtaatcccagcaccttgggtggccgaggcgggcagatcactggaggtcaagagtttgagaccagcctggccaacatggtgaaaccccgtctctactaaaaatacaaaaagtagccaggcgtggcggcacgtgcctgtagtcccagctacttgggagactgatccaggagaatcacttgaacctgggaggcagaggctccagtgagccgagattgcgcccctgcactccagcctggacgacagagcaagactccatctcaaaaaaatawaaagagtttgacaccagcctgggcaacatttcaagaccacatctctacaaaaaatattttttaaattagcctggcattgtggtgcatgcctgtagtcccagctacttgggatgctgaggtgggagaattgcttgagcccaggagttccaggctacagcgaactatgatcacgccactgcactccagcttcggtgacagaacaagagcctgtctctttaaaaaaaaaaaaagcatctgcttgcagcccgtctgcatatgttaagcccttcactggagcttggcatctggccacagcatcatgcttgggagctgcgctggaggtggcagtggtggcctgatggtttcttctcccccatcacgtgataggcagtgtggcatggtggtcacacagcacaggctccagagccaaggctctgccactttctggctgtgcaatcctggggcaagtgaccaaacccctccaggcctcaacctcctcgtctggaaagtgggcgttataaccgggcttcgcggcgttgtgaaaatggatgtaatatgcataaagcacttagaacactgcctgctaaggggtaagtgtcctgaaagtgatccaaattaaatattaatagccctttatgatctgcagaggctccccaggcatgggcatctttcagcccttttaggagaatgctgcagcagaggactctgtcctaaaggagtcctgttcacccccaacgctcaattcattcctacctgttttctgcctcccttcgttttttttgttgtctgtttgttttttgagacaaggtctcagtcacccaggctggagggcagtggtgcagtcacagctcactgcagcctcaacctcccgggctcaagcaatcctcctgcttcagcctcctgagtagctgggaccacaggcatgtgccaccacacctggctaatttttgtattttttgtagagacagagtctcgctgtgttgcccaggctggtctcaaactcacgggctcaagcggtcttcccaccttggcctcccgaagtgctgggattatagacataagccaccacgcctggcctattgcggttttttattcagatggaaagagctccccctggtctgccaagcyatggatttatcttatttttcacagctttggtagggcctctcataaaaggcccttaaagagaaagccagcagataaatccatgaatggccttgaggagtgtgtctctttggacagcaggcatggctgggggaggggagagacgagaaggcaggagaggcagtagggtctccttccccttgagtgaatctcatatttacataccgctctctggctctgggccaggcatgtggtaagcattttacagatttttttttttttttttttttgagatggagtcttgctctgccgcccaggctggagtgcagtggcgcagtctcggctcactgcaacctccgcctcctgggttcaagtgattctcctgcctcagcctcccgcgtagctgggattacaggggtctgctaccacacccagctaatttttgtattttttttttttttagtagagatggggtttcgccatgttggcctggctggtttcgatctcctgacctcaggcgatctgcctgcctcaccctcccaaagtgctggaattacaggcgtgagccaccgcgcccagccacatttttacggatattaactcacctgtaccctggtagcaagcatgtgaagtgggtcctgtaatccctttcacggataaggagaccgaggccccagtggctgactcacttacctacctccctcttacctgacttagagaataaacttccttttttttctgagacagaatctcgccctgtcacccaggctggagtgcagtggcgtgatctcaactcactgcaacctccacctcctaagagtttaagtgattctcgtgcctcagcctcccaagtagmtaggactacaggcagccaccaccacacccagctaatttttgtatttttagtggagatggggtttcaccatgttagccaggctggtctcgaactcctgacctcaggcgatctgcctgtctcggcctcccaaagtgctgggattacaggtgtgagccaccgtgcctggccagataataaactttctctgcaagttttcctctgaatgaaaagttatgtagcttaaatttttttttttttttttttgtagagacaggctggttgttcaggctggtcttgaactcctgggttcaagctatcctcctccctcggcctcccaacgtgtttggattacaggtgtgcaccaccatgctcaggtcattttttattttttgtagagatgaggtctccctgtgttgcccaggctgttcttgaactcctgggctcaagcgatcctccggtcttggcctctacgcctggccaagaatttttttttttaaattgcagygtccatatgatgttcccattttatggacagggaactgaggtcaggagaaaggaatggggttttgcttacctcgtcaaggactgggactcagagcttctgtcacttctatcaaaggggttgggacaaaggttgtgtgtgtgtgtgtgtgtgtgtgtgtgtgtgtgtgtgtgtgtgtgtaataggtggggggcggggcagaccccctcctccagtaaccccatccctgcaggagctgcgggagcgagtactcagagggaagtaccgggtccctttctacatgtcaacagactgtgagagcatcctgcggagatttttggtgctgaacccagctaaacgctgtactctcgaggtgagcccagcctcacagccagcgggagcccttctagtctcctgactcccctaaactctgcctgcccccacccacaaaagccttcttgacacacttttcctctcctgtgcccaccgaagatctgctgctggtgagtgggggtagacaggccgtccagggaaaagctcccaggcctgtcctgacgccacccccccgacaggctcacccactccctgccttgccagtaattagctaatgagctcctaggatgattacagggtgccagggacccagatgatgcggaggagggagggtggcatcaggaggctccggcaggggacgtsggggagagagaggcccaggaggcgctatctcttaggaagcccgcaattctgggtgttaggcctcggaggtttggggcagggcagaagctgtatgatttctggttccttctgacacctgtcttcccccttccctgctcctgatgcctgcagcaaatcatgaaagacaaatggatcaacatcggctatgagggtgaggagttgaagccatacacagagcccgaggaggacttcggggacaccaagagaattggtgagggtcagggagagccatcctgtcacccaggatggagtgcagtggtgcaatctcggctcactgcaacctccgcctcccagaatcaagagattcttgtgcctcagcctcccaagtagctgggaccacaggcgcctgccgccatgcccggctaatttttgttatttttagtagagacagggttttgccatgttggccatgctggtctcaaactcctgacctcaggtgatctgcctgcctcagcttcccaaattgccaggatcacaggtgtgagccactgtacccggcccatgttcgctttgatattaagacataaagagagaccaggcgaggtggttcatgctggtaatcccagcactttgkgaggtcgaggtagaagaatcacttgagcccaggagttggagaccagcctggccaacatagggagaccctgtctgtacaaaaaaataaaaataaaaaattagccagttgtggttgtgtgcacctgtagtctcagctactcagcaagctgaggtaggaggatcccttgagcccaacaatttgaggctacagtgagctatgatcatgccactgcactccaggcgacagggtgagaccgtgtctcaaaaaaagaaaaaaaggtcaggcacagtggctcacgcctataatctgagcactttgggaggctgaggctgacagatcacctgaggtcaggagttcgagaccagcctggccaacatgatgaaacctcgtctctactaagaatacaaaaattagatgagtgtggtggcaggcacccgtaatcccagctcctctggaggctgaggcacgagaattgcttgaatccaggaggcagaggttgcagtgagctgagattgcaccactgtactccaccctgggcgacaagcaaaattccatctaaaataacaataattacggtttttaccattaaatggcaaaaaccggaattacttttgtatcaacctaattatattagtaggttgaacacaacaaaaagttgaaccatatgaaattgccatttttttggtttaaaattgtcagtaccaccaattttgtatggtttaacctaatagtgatgatttattctgccacataactaaaatgaatagagtatgcagccttcaggcacagttgtatccaggtgctcagagacagttgttgggaatgttttctgtggtagctttttcccaggctgctctccaggaggcaagcagatctgggtcacatgccttcaatgaagcagtcagtgtggctttgggtgtagaacacactaattagccagacctgggttatccgcctgccttagggttggagcaggggagccatccacgtgatctgagcggaaagaatgttctttcaaaggaaatcaatgtgctgttgggaagggaggatgggtactggacaggtcaaagagcagacaccrgtgaatgacacagaaatgagtggaagtgggccaggtgcagtggcttatgcctgtaatcccagcactttgggaggcccaggtgggtggattgcttgtgcccaggagtttcaaaccagcctggacaacatagcaaaaccctgtctctactgaaaatacaaaaactgaggtgggaggatcagcagagcctggggaggcygaggctgcagtgagctgtgaccgtgccactgcactccagcctgggtgacagagtgacaccctgtctcaaaaaaaaagagaaatggatggaagttaaagtttctgggagtctgaaacttctctccatccccccctcccagaggtgatggtgggtatgggctacacacgggaagaaatcaaagagtccttgaccagccagaagtacaacgaagtgaccgccacctacctcctgctgggcaggaagactgaggtcagggggcgccaggggcccttggggacgcgtgatgcctgggtggagggacttggggtgcagaagagcctcatctgtcatcctctcgcaggagggtggggaccggggcgccccagggctggccctggcacgggtgcgggcgcccagcgacaccaccaacggaacaagttccagcaaaggcaccagccacagcaaagggcagcggagttcctcttccacctaccaccgccagcgcaggcatagcgatttctgtgagtatcaaccccacgccctcacgcaccctccttctccccaaggcccagacttacagttacgtcagggttctctgattggcaagcaacagaaacccactggagctaacctcagagagggaggaatgtcttataaagacacagggcattgcatggaacttggaggcaggaatgcacagccaggctcaggaagggattaaaaccggaaaagcagccagacccagagcagacactctctgtcttgcttcctctctgcttgtgtggtttttcctttgtctctcacttatctcatcctatcttttttcctgatgtcccagctccccgatttttttttttgagatggagtctcactctgtgcctcaggctgtagtgcagtggtgtgatcttggctgatggcaacctctgctgcacaggttcaagcgattcttctgccttaggctcccgagtagctgggattacaggcgcctgccataaccccccggctaatttttgtattttcagtagagatggggtttcaccatgttggccaagctggtcttgaactcctgacctcgtgatccaccctcggcctcccaaagtgctggcattacaggtgtgagccactgtgcccagccttttcttttcttttctttctttttttttttgagacagagtctcactctgtatcccaggctggagtgcagtgtcgtgatcttggctcactgcaacctccacctcttgggttcaagcgattcttgtgcctcagcctcctgagtagccgggattacaggcacctgccaccacacctggctaatttttgtatttttagtagagacagggtttcaccatgttggccaggctgctcttatactcctgacctcatgatccacccacctcagcctcccaaggtactgggattacaggtgtgagccactgcacccagcccccaatttcttaccttagagaccagtccaaatggcagctggaatctctggtccaggatgaagctctgatatcagagtcaagtttgaattaatccattgtaactggggcacaggaggacacgttgtacaaagtggctgctgagagtctgccctctggctttgcctccacactgaagtaaaggaggctctggaagagagctgggcggacagctgattataccccacattctgcaactgacagacatctcatctgctgcagaaaatgaatacagagtctgagtttaaatctgggccaggcacggtggctcatgtctgtaatcccttgggaggccgaggtgagtggatcacctgaggttgggagtttgagaccggcctggccaacatggtgaaaccctgtctctactaaaaacacaaaattagctgggcgtgttggtgcgtgcctataatcccagctactcgggaggctgaagcaggagaattgcttgaaactgggaggcggaggttgcagtgagccgagatcatgccattgcacaccagcctgggcaacagagagacctcatctcaaaaaaattaaaaaaaaaaaaaaaaggatacacaccaccatcagcacccattaggcatggagacttctgagaggtcccttcacccacacactcatcaaattttaaccctctcttctattttttttaacggctttattaaggttaaaattcatataccaaacaacgtacccatttaaagtgcacaattcaggccgggcatggtggctcacgcctgtaatcccagcactttgggaggctgagggcaggaggattgcttgagcccaggagttctagaccagcctaggcaacatagcaagaccccgtctctacaaaaaaattaaaaattggccaggcacagcggctcacgcctgtaatcccagcactttaggaggccgaggtgggaggatcacgaggtcaggagttcaagaccagcctggccaagatggtgaaaccctgtctctactaaaaatacaaaaaaagccaggcatggtggcgggcacctgtaatcccagctactcgggaggctgaggcagagaattgcttgaacctgggaggtggaggttgcagtgagccgagatcacgccactgcactccagcctgggccacagagcgagactccgccaccccgccccctaaaaaattaaaaattaggtgtggtagtacacgcctgtggtcccagctacttgggaggctgaggtaggaagaccacttgaacccaggagatcgaggtcgtggtgagccgtgatcgcgccactgtactccagcctgggttacagagcgagacctcatctcaaaaaataaattaaaaagtgcacaattcagtggctttaatatatttatagagttgtacatctatcatgatgaccgatttcagaacattttcattaccccaaaaagaaaattcacaacttttagcaatcaacttccaggcagggcatggtggctcatgcccgtaatcctagcactttgggagactgaggcaggcagatcacctgagcgcaggagttcgagaccactgggcaacatggcgaaaccccatctccactataaaatacaaaaattagccgggcgtagtggcaggcgtctgtaatcccagctactcaggagtctgaggcaggagaattgcttgaacctgggaggcggaggttgcagtaagctgagatcgcgccactacactctagcctgggcgataagagtgagacttcctctcaaaaaaaaaaaaaaaaaaaaaaaaaaatcaacttccaatcccccttccaccctcagctactaatctactttctatgtcgatgaatttggctattctagacatttcaggtaaatggaattacacgatgtgtggccttcagtgactggcttctttcatttagcagaaagttttcaaggttcatccatgatatgggtatcagcacttcattccttttcattggcaagtaatattccattgcatagatagaccacattttgtttatccattcatgaacacgtggattgcctccactttttggctgttgtgaatgatgctgctgtgaacatttgtatcyrtgtttttgtgtggctgtgttttgccgtcatttctcttgggtacrtatctgggagtggaattgctgagtcatctggtaacygtgtgtttaataatagtttgaggaactttcagggtgttttccaactctgttcgttttacagccctgcttgtctgcaggggtgaagttcttactctgggacaggtactaggctgtctgcttgtctaatcttttttttctctgtcttacatatctcaccttatctttttctagatctctcagctcctagatttcttcttttttttctttttttgagacagagtctcactctgtcgcccaggctggagtacagtggtgcgatggtggctcactgaaacctcagtctcccaggttcaactgattctcctgcctcaggcccccgagctggaattacaagccaccttgcccagctaattttgtatttttagtagagacagggtttcaccgtgttggcctggctggtcttgaattcctgacctgaggtgatccacccgcctcggcctcccaaagtgctgggattgcaggcgtgagccactgtgcccagccgctcctagatttcttttcttttttttttttttggaggcaaaatctcgctccgttgcccaagctggagtgcagtggcgcaatcttggctcactgcaagctccacctcccgggttcatgccattctcctgcctcagcctcccgagtagctgggactataggtgtccaccaccacgcccagctaattttttgtatttttagtagagatggggtttcactgtgttagccaggatggtcttgatcgcctgacctcatgatccacctgctttggctttggcttcccaaagtgctgggattacaggcatgagccaccgcgcctggcccgctcctagatttcttacatctcagttttagaatccagcccagggctgagtgcagtggcttacgcctgtaatcccagcactttgggaggctgaattgggtggatcacttgagctctcaagttcgacaccagcctgggcaacatgatgaaacctcatctctacagaaaaatacaaaaattaggctgggcgcagtggctcttgccttgtaatcccagcactttgggaggccgagctgggtggatcacctgaggtcagcagtttgagagcagcctggccaacatggtgaaaccctgtctctactaaaaatatcaaaattagccgggtgtggtggtgagcacctgtaatctcagctacttgggaggctgaggcaggagaattgctggaacccgggaggcagaggttgcagtgagccgagattgtgccattgcacttcagcctgggcggcaacagcaagactctgtctcaaaaacaaaacaaaacaattagctgggcatggtggtgtgcacctgtaatcccagctacttgagaggctgaggtgggaggatggtttgagcctgggaggccgaggttgcaatgagtccagatcgtgccactgcactccagcctgggcgatagagccagactgccgtgtctcaaaaaaaaaaaaaaaaaaaaaaaagaatccagcccaagtgttagctagaatctccttggtccactcatcaggatcaggatggagctctgataycgagtccagttgggattaatctgctgtaatgggggcacaggaggacacattgcacaaagtggctgctgaaagcctgcgctctgacctcccctccacactgaagtgagggaggagagaggtgtcagggaatctgagacccagcatgagccccacacgggaagtggtgcttctgccctacccccaccattgctggaggtcaaaccattccctgcccctgcgtcttgtctttcccacctgtaaaatgacagggcgtgcccagaaagttcctaaggagcttgtgactttggtatcatatggttagaacgtggtaaccttcagaactccccacactgagacctgagttccagggattctcagagagggattgctggcaggtgccaggtatctgtcattgtcattgtagagctctcagcttgtggttctgggacttctgagcatgtatcgctcctgaggatgtaacaagcagaccttctgaccctctcaagtttgagatcacttttcacccccgggttctaaaacagtagattcctaagatgttcctagagaccagaattattttgtgttgcttttgaaattgttcatacaataacatccttgaaaatgtgttagtttggaaaggatagacagtgaaaaagtcttcatccaacacatatccccagctcccagtttctcaaatgcagcaactgttacggttttttgttgttgtttttgttttgttttttgacggagtctcgcactgttgccagactggagtgcaatggtgtgatctctgctcactgcaacctctgcctcccaggttcaagcgattctcctgcctcagccttccaagtagctgggattacaggtgcatgccaccatgcccagctaatttttgtatttttagtagagacagggttttgccatgttagccaggctggtctcaatctcctgaccttgtgatccacccgccttagcctcccaaagtgctgggattacaggcgtgagccaccgcgcctggccctgttatgggttttaatatgaattcctttggagagattttattcataaacaaacatgtaaagagataaatatgggaccgggtgcggtggctcacgcctgtaatcccagcactttgggaggccaaggtgggaggatcgctggagtccaggagtttgagaccagcctagacaacatggcgaaatcctgtctctacaaaaaaaaatacaaaaattaggtgggcatggtagtgtgtgcctgtagtcccagctacttgggaggctgaagtgggaggatggcttgagcctaggaggccaaggttgcagcaagctgaggtcacaccactgtacttcagcttgggcaacagagtgagatcctgtctcaataaaaaaattaaaaaaaagaaggaaactaaagatatataaaaacaataaattctccccttttgaaacaagttatagtcctttggagatattcatatataagcaagtagatatagatacacacttttttgcttttgtagacamatgataacacattgttgacccatctcttgtcttgccttttctactttccagtccgtcatgaagatcattctgtactggtgcataaagtgcttccttattcttttttatagctgcataattttccactgtggaaataccttgacttatctagtcattcctctactaaggggcatttaggctgttcccagtctaatggtacaggccaggtggggtggcacacacctgtaattccagctacttgggaggctgaggcaggagaattgcttgaacccaggaggtggaggttgcagtgagcggagatcgcaccactgcactccagcctggcaacagaaccagactttgtctcaaaaaaaaaaaaaaaaaaaagaaggtgcaatgaatggcctgtatgtgcatgatgtcattgatttggagtttctaagtcagtatatgtgcgttggtaatcttgaggtaattttgacagatattgtcagaatggcccacacagagattgcaacccacgtgaggaattctcaggttccaacgatcccccagagtcagttctgggtttccgtggtgatgccagctctaaacggtaccccctcccccaggtggcccatcccctgcacccctgcaccccaaacgcagcccgacgagcacgggggaggcggagctgaaggaggagcggctgccaggccggaaggcgagctgcagcaccgcggggagtgggagtcgagggctgcccccctccagccccatggtcagcagcgcccacaaccccaacaaggcagagatcccagagcggcggaaggacagcacgagcacccccgtgagtgaccagggctggggggcagggctgggggcgccacctgggccacattcctcaggccctgccttcatctcattccccagacggaactccttcttaccaactccttcttctacccattcattcattcaacaaacatttatcgagtgcctctgtttgcctgagctcagtttatacactaacatttgatgttagcgtataaattagtgttctgtgtcaaagaagtgcagaacgtactcttggcagaaaggatttaatacaggaaattaagtgcttttaaraatgtgggaaaggccaggcacagtggctcatgcttgtaatcctggcattttgggaggccgaggcgggaggatcacttgaggccaggagttcaagaagcatagcagacgccatctcaactaaaaatcaaaaaaattagccaggcatcatgttatgtacctgtggtyccagctactcgaaagaccgaggtgggagaatcacttgagcccaggaggttgaggctacagggagctgtgttcccgccactgcactccattctgggtgacagagcaaaaccctgtctcaataaatcaataaataaaatattaatagtaatttaaaaaatcaggccaggcacagtggcttacgcttgtaatcccagcactttgggaggcagaggtgggcggatcacttgaggtcaggaatttgagacctgcctggccaatatggtgaaaccccgtctctactaaaaatataaaaatcagctgggcgtggtggcgggcacctataatcccaactacttgggaggctgaggcaggagaatcgcttgaacccaggaggcggaagctacagtgagctaagattgcgctactgcactccaggataggtgacagagtgagactccatttcaaaaaaaaaaaaaaaaagccaggtgcamtggctcatgcctgtaatcccagcactttgggaggccaaggcgggcagatcatgaggtcaggagatcgagaccgtcgtggctaacacagtgaaacctcaattctactaaaaatacaaaaaattagctgggcatggtggcatgcacctgtagtcccagctactctggagggtgaggcaggagaatcgcttgaacccgggaggcagaagttgcagtgagccaagatcataccactgcactccagtctgggtgacagagcaagactctgtctcaaaaaaaaaaaaaaaaaaaagtcgtgggaagcagcagcagcttccccagctcctcagctcttccggcatctacattcggtcccactccctgctcttctgctctgcacatgttcagtagccgccccacgtggctgtgcccttggcctttcgaggctggtcacggcaggttactaccagtcaagtcccagccttgaccagggtgcacacaggtgtgagtctgagccaattgtgggcctaaacttttaaaagtatgggtcacctgccaggcgcrgtggctcacgcctataatcccagcactttgggagtccgaggagggtggatcatgaggtcaagagatcgagaccacctggccaacatggtgaaaccccatctatactaaaaatacaaaaattagctggctgtggtggcgcatgcctgtagtcccagctactcaggaggctgaggcaggagaattgcttgaacccaggaggcagaggttgcagtgagccgagatcgtgccactgcactccagcctggtgacagagcaagactctgtttcaaaaaaaaaaaaaaaaaaaaaaagcatgggtcaccacccacacagacacaaaatacttatarttatcctttaccataagattttgctctttaacaaataagttggctgggcacggtggctcatgcctataatctcagcactttgggaggcccaaggtgggcggatcatgaggtcrggagttcgagaccagcctggccaccatggtgaaaccccatttctactaaaaatacaaaacttagccaggcgtggtggtgcacgcctgtaatcccagctactcaggaggctgaggcaggagaattgcttgaacccaggaggcagaagttgcagtgagccgagatcacgccactgcactccagcctgggcgacagagcaagactctgtctcaaaacaaaacaaaacaaaacaaaaagtcataaaaattaagtttttagtcagacatggtggctcacgcctgtaattccagcactttgcraggctgaggtgggtggattgcttgagctcaggagttcgagaccaacctgtgcaaaatggtgagaccccttccctacaaaaaatagaaaaattagtccggtgtggtggtggcacgtgctggtagtcccagctacttgggaggctgagggaggaggatcacttgagtccaggaggcggaggttgcagtgagccaagatcgtgccactgcactccagcctgggagtctccagagggagaccttgtctcaaagaaacaaacaaaaaagtttttaaatactaatttttctcgtacgttcttgagaacattcatctttttaacttcttcttagtgctcttggtgcccctgggtacttccagtttattttggttctaaacacccaaggcaaaccaaggtctcactgcatggctgtttgcgaggtaggggtgtttctccagaggtcctgaccatcaggaggcacccagccgtggtggctggtggtgtctggctgttaccagcattcaccagccttgaccggctttgactgattgtgactggccttcactggcagtgcctgacagggccccactgaagctttgaccacaagtgtccacctkttaccagtggcagccagctgtggccagcattaaccagcctttactggcagtgtccagccatgaccagtattaaccagcagcaactgactgtgaccggctttgaccagccttgactggccgtgacwacccttggccaacggtatctggctgtgaccagtggtgtctggctattaccacttatgaccagctttaactgtccctgactgttggtgactggccatgaccagccttaactggctgtgacaggctttgaccagcagtgtctggccatgaccagcagtagccagcagcaactggcaatgaccggctgtgtttggtttggctagctgtgaccctgccaccacctgtgaggactgctagtccaggttcagggccctggactccagggctgtgcagagcccggggtcagtacagggaggggagtggaatgttgtgagggaaccccgtggggatgggccaggagagggtgcacctgaggacagctcactggctacctaacagcagaagggccttggggaaacagatcttgaaggcatcagctcaacttcaggcaggtggcacaggagggaggccgggatgcctgtgtgtcctgagtattccggataagtacaaattcatgccccttggctcttccccagccccgagacctggagcttcacaatgcagcctctgaggcccgtgtgtcagagaatgatccacaacccagagaatggatgggagcggcagggccaaagaaggagaggatgaggtggttaaagaaaaaagaaaacaaaattgtaggaaggactggaggagcggacaatgggtgggatttgtaggaacaacagtcacaaccacaccacagaactgacccaccaagggagctgctccttctgaggctgccccagcactggtgaattcaagagtgcattgttaggccaggcatggtggctcatgcctgtaagcccaacagtttgggaggccgaggcggtgaatcacttgaggtcaggagttcaagaccaacctggccaacatggcaaaatcccatctgtacaaaaaatacaaaaattagggccaggcgcggtggcttacgcctgtaatcccagcactttgggaggctgaggcgggcggatcacgaggtcaggagatcgagaccatcctggctaacacggtgaaaccccatctctactaaaaatacaaaaaattagccgggcttggtggcgggcacctgtagtcccagctactcgggaggctgaggcaggagaatggcatgaacctaggaggcggaggttgcagtgagctgagattgccctactgcactccagcctgggtgacagggtgggactctgtctcaaaacaaaacaaaacaaaaaaccacattgtcatggctgtaacccaagactcaaaaacttcatcctccatcagaagagcttcttgatgcccagagggctggacaataggcactggggccctgctgaagcaaagaccttcatctcatagccttgcctgtgtgagctgaagtcaaagcaggcaggagagcagctgctgccccatttccaccttccaaatcttcatgaatgcaaagattggcagaacccaacttatatgcagaacctgagctgcaaaggattctgggaaatgtaggacttggcttttttgcatctgagttcccaagaacagcaaagtacgaaaatatcctcaacataggaacaggagagtggaggcagagctggacatggtggcacacacatgtagtcccagctacttgggaggctgaggtgggaggattgcttgaggccaggagttcgagaccagcctgggcaacatggtgagatcctatctcttaaaaaagagaaaaagggtggaggcagtttgagaaagtggccgggactctgaagccacgtagagtttgaattacattaatgagccgtgtgaccttgggcaagtaacttcacctctctgatctttgatatctcactatgtgaaatgggctcattaaagaacctgggtcattgtgaggatcttgtaagatctcatacgtgaagtacttcacatactggcacagtaagcactcagtgaatgagagctattgttattgctaaacgaaacccacaccttaagaaggtaaaaaaggaaaagcaaataaacctcaaagaaagtagaagggaccggaattggtggctcatgcctgtaatcccagcagttcgggaggctgaggcaggaggattgcttgagcccaggagttcaagaccagcctggacaacatagaccctgtctctgccaaaaataaaaattagctaagtgttgtggcacatgcctgaggttctagctacttgggaggctgaggtgaaaggatccacttgaggccaggaggtcgaggctgcagtgagccatgatcaccccactgcactccagcctaggcatcagaacaagaccccatctcaaaaaaagtagaagggaggaggcattaaagagaataaatcagtgaaggagaaagaagaggtacaataaagcaacaaaacctaaagttggttttttgaaaagattaataaaatcagtctgggcgtggtggctcatgcctgtaatcccagcactttgggaggctgaggcgggtggatcacttgaggtcaggagtttgagaccagcctggccagcatggtgaaaccccatctctaccaaaaatacaaaaaattagctggatgtggtggtccacacctgtaatcccagctactcrggagactaaggcaggttcacttgaayctgggaggtggaggttgcagtgagctgagatcatgccattgcactccagcctgggcaaaatgagtgaaactctgtccaaaaaaataaataaataaataaaatccaatggacccctggtaaaaatcaattaaggaaaaaagacagcaaacatgaatcaccagtatccacaatgaaaaggggaactttgttctaacattaaaagatagtaagatgatattaggaactactttgtgccaataaatttaacagcttagatgaaatggacacattactttaaaaacacactgtatcaaaactgacacaagaagaaatagaaaacctgaacagtcttatattcttgttaaagaaattgaattcgtaactgaaaaccttccctataaagaaaatttttggcttggatgactcccaccagtggaattcttccaaacacttaaagaagaaataacactaaccttagacaaacttccagagaatagaaaaagagggctctcttcctaacatgtttatgaggcagcataatcctgatattccctgtgttcccagagctcacagcccagtatgggatggggacatatatgagaacagacattgacagcacagtgattgaagctgcagtggggagcccaggggcctgtgggaacccaamggaggaggcacgtgactcagcctggggccgggggtggtggtagattatgaactgacacctgaaagatatgtaggagtgagtcaggggaaaaggtaggagtaatgttctaacaggtgagacagccagtgcacaggctagtcacagtgacagawtgtggcatgaataagtacattagcaaacgtttggtgtggctgggctggacctcaagaaggtgggcattgctgggagaagagcggtggacaaggatgccccctggaaaccttccctgcctcgttttccctcagtgcccccctcttctccggtctccaggggtctcccctgactcagcctcggtggctgggattactcatgaacctttcacatctttgggacctttcaccatctcctactcaccctgggttcccacatgagcccctgacttattcatcgatggggagggcagagaagggaagagggagaagctcaggggcatgtcttcaccccctcactcccttcctggcygtgtctcctgcagaacaacctccctcctagcatgatgacccgcagaaacacctacgtttgcacagaacgcccgggggctgagcgcccgtcactgttgccaaatgggaaagaaaacaggtacggagggggcagcaacagggtgaggggtgggaagtagggggtaggtgaacaggacctcccttgatctgagatgataggcattggaggctggtgccatggggaccagagagtgagtgtatctgccctgcccttggcagaatcgacccatgtacccccctgaaaatcctccccacttaattaattagtcttaagcaccaggaaagcagttggccctgttctccgcctacaagccttgggaacctgaattgattttttgaatgatccatttttagaactcgagagaagccccagaatgtcacagcttcagcgtcatctggttggctggttttccggcttgttggcctgagtctgtgaggtctcttccagctggcaagggagrgaaaccagttcagactggctggagcagagagagggaagggattggttcacatcacaggtcaaggccagctagaatggggccagctccaggatgaggacactgccccccaccagggctgtagggcaggttgatggccaacaccagggcacactctgggatgcacctgattagtgggtgcaggtgttcccactgggtgtgggcagaggaatggggtagttaacagtcacaaatctgtccaggcacagtggctcatgcctgtaataccagcactttgggaggctgaggcrggtggatcaagaagtcaggagatcgagaccatcctggctaacatggtgacaccccgtctctactaaaaataccaaaaaaaaaaaaaaattagctgggtgcagtggygggcacctgtagtcccagctactctggaggcagaggcaggacaatggcgtgaacctggaaggcggagtttgcagtgagccgagatcacgccactgcactccagcctgggcaacagagcgagactccatctcaaaaaaaaaaagtcacgattctgtgaatactcagttctgagttcgaatcttacctctgtgctcacactgctagcagaatgaccgggtaaatccctgtgcctctgtttcctcctcggtaaaatgggcttgatgctggccgggcatggtggctcacacctgtaatcccagcactttgtgaggccraggtgggcagatcacctgaggtcaggagttcgagaccagcctggccaacatgatgaaaccctgtctctactaaaaatacaaaaattagccaggaacgatgtcatgtgcatgtaatcccagctactcagaaggctgaatgaggcaggagaatcgcttgaacctgggaggcagaggttgcagtgagctgggattgcgccactgtactccagcctgagccacacagcaagaatcygtctcataaaaaaaagggctgatgctgtccacttccaggccccattatagagatgcagtagagatcaggtgtgtcctgtacctggcactgggtctgatgcttaggaggccttcattcagtgacttgagagtgcttttttttggtggttatcaaataacaatagtgaacattcatgaagcagcagctacatgccaggcttctatgtctattgcctggctcagtgcccctaacaactctgtgaggtagatcctaatatctccattttacagctgaggacataaggcacagagaggttaagtaacttatccaaggccacacagctggtaagtcaagaagcagattccagacttgactccagaatcttatttgtaatcactgtagtacatggccttccagttctgctcaagagayagtggaacagttaaattacagactcagacaaaaaaaatcaaaaattaaaaaaaaatttaaaaacaacaaaaaataaaaagtatagactcagctagctgctgtaataaaaacaaagagatcccagggtagagtaatttaaataaaaaggacgtttagtccggagggtcctccaaggacccaggtaagttcttccagccccaaaatgagtttccagctctgggactgaggccgctgcaccagcagccatcatttcccaatcagsaagaagtggggaaagagtaggggacaagcaacaactctttgtaaaggcgtcacccagagatggtacagagcacttctgcttatatcccattggccggagcatggtcacataaccatctctagctgcaagagagtctgggaaatgtagtctctggctgggtggccatgtgcagtgctcatactcttaggggtttggttaccaagaacgaaacagggaggatggattctaagggagaagtaacagcctctgccacaatcaggattcttctctsagatccaggctgggcctggagtccctgggaggatagaaattggaggtctgggctgggcgcagtggctcacacctggaatcccagcactttgggaggccaaggccagtggatcacctgaggtgaggagtttgagaccagcctggccaacatggtgaaaccccatctctcctgaaaatacataaactacccaggcgtggtgctgcatgcctatagtcccagctactcaggaggctgaggcaggagaatcacttgaacccaggaggcagaggttgcagtagccaagattgccccatggcccttcagcctaggtgacagagtgagactctgtctcaaaaaaaaaaaaaaaaaaaattagccaggcatggtggcacacgcttgtaatcccagctactcaggagggtgaggcaggagaattraactcaggagatggaggtctggcccctgctgtcgactaggagggtccgaggggctggaggagggtcctgggacagtggaacccccactgcccagattaccatagtgaatacaggtatccttgacctttacatctatccctttcctgattttagatggtgagagttcagatagcaaagtgtttgccaagttgatttggttcctgaggtttcggcaaatagcaaggaagtcacccaaaaatgtctgtgcatctattcagttgctgcgtttagagagaggagagttgtgataggagatgatttggagygggtagagtttgaagaagggacagtttgaaggaggggtaataggagaggagagagtcagtaaaataatgctaggattgtatagtgcacagcctgcacaactgtacgttgcagccctgtctctgagttccaggctggttgcagtccctggtctcaggacaggaatgtgaagaatcaaagggactggggccctggcctgcctcagtcccccaccctgacttgtctgtctctgcccacagctcaggcaccccacgggtgccccctgcctccccctccagtcacagcctggcacccccatcaggggagcggagccgcctggcacgyggttccaccatccgcagcaccttccatggtggccaggtccgggaccggcgggcagggggtgggggtggtgggggtgtgcagaatgggccccctgcctctcccacactggcccatgaggctgcacccctgcccgccgggcggccccgccccaccaccaacctcttcaccaagctgacctccaaactgacccgaaggtgagctccgcggggatggcaggggcagggcggggcggggggccgatgggacctaacctgtcttccactctgctctgtctcctgtaccccaacatttcctcttcctcctcctcctcctcstcgtttcctcctcctcctcctcctttcctcctcccctgtcacccctcacctccctcctcacactgcagggttaccctcgatccctctaaacggcagaactctaaccgctgtgtttcgggcgcctctctgccccagggatccaagatcagtaagtcccgtccatgccctgttctcgctggctctgcctccctgcctgcatgtctgacctgtgtgtgcgggcattgggagggggctctgtggatgtgagggtctgtgcgtggggtctggttgttcatttactcacagaagcacagcctatggagccagactcgggggttcaaatggcagctctgccaagtgaccttgagcaagtcactcaaggtctctgggcctggttttcctcttctgtaaaatggktatagtaataacaatacctgtctcctagggttattgtgaggactaaatgaagtgacgtatggactgagcgtagaacattgccttggaaagtgctttacatgtgtattagttattaattgctattattcattgagcccctactgtgtgcctggcactgtcctaggccctgtagtagagggtgagcaaaatgtacaaaactcctgccctggcagacccaacattytactaagggatctagacaaaaaacaaagaaataagtaaaatatacttactatatagactgctaggtagtgygaagtaactaagaagaaaaatagagtaggagccaaatttggtggcttatgcttgtaatcacagcactttgggaggctgaggcgaggggatcacttgagcccagaagttcaagaccagcctggacaacgtagcaagatcctatctctacaaaaaagtaaataaattggccgggcgtggtgactgcacctgtattcccatggaattgggaggccgaggcaggaggatcacttgaacgcaggaggtcaaggctgctgtgagctatgatcatcagtcttggcaacagagggagaacctgtctctaaaaaaaaaaaaaaaaaaaaaaaattgaacagggaggggaataaggggtgtggggaagggatggggtgcagcattaaatgggcagscctctggatgaggtggctcaggccagcaatcccagcactttggacagatgacttgagtccaggagtttgagaccagcctgggcaatgtggcaaagccccatctctacaaaacaaaacaaaaaacaaaaagcagatgtggcacgcgcctgtagtcccagctacttcaggggccaaggcaggaagattgcttgagcctgggaggttgaggctgcagcgagctgagatcacgccactcctgcatgacagagtgagacwctgtctcaaaaaaagaaaaaagggcaggcctcacgaaggaggtgttgtttgagcaaagcatgaatgtatatgtgagcgagggagtgtgtgtgtgtgcacacgtgcgtgtgtctctctctttctctctgtggccacttatctatgtaagggtgtgtctctgcccactcccctccctttcatcttccacattcttcagtrtctttcctgtgacctgcactaaccatttcagaatgagccccgttatggggatggacaaggagatcaaatcctgactccaggccctcaccagcccggagggactggggttgaggcaggggctgcttggagtcccagaggcagtggrttgcgggaggtgggttccctatgtccagattagacactctgtccccctcccctcccctagggtcgcagacgaacctgagagaatcgggggacctgaggtcacaaggtgagtgcttgggcctacccctgactgccacttcccctctcctgcctcagcacctcccgacacttaccccagggcattagatggggccccagtctcatcctgcaaggccaacttcctgaaatgccctgtggccccagccttctctgccagctcctctcattcccacccaaccccaagcaccttcccttgatcatcttaaacttcagcctccggctgggtgccatggcccaagcctgtaatcccagcactttgggagtccaagggaggcagatcacctgaggtcgggagtttgagaccagcctaagatggagaaaccccgtcgttactaaaaatacaaaaattagccgggcgtagtggcgcatgcctgtaatcccaactactcgggaggctgaggcaggagaatcgcttgaacccgggaggcagaggttgcggtgagctggattgtgccatcgcactccagcctgggtagcaagagtgaaactccgtctgaaaaaaaaaaaaaaaaaaaaagcctcatcccatccacaactcaactcctcttctggtcaatgcccccacctccttttgcctctcatccagtcatggcacaatgtttgctggcagctcagggccagcaggaggcaaacatctgtacggacccagatcatgaagattttaggctttgagggccaggcaccctgtgtcacgcctgttcagttgtgccattgtagtgcaaaagcagtcatattcaacacaaaacaaatgggtatggcagtgttccaatgaaactttatttacaaaagcagacagcactggagtttgccaagccctggttttgtctgagttcccggtttagagacccaagtggaaaccggagccttcccagcagctgcaacaaactgccagggctgactctcattggttgggacttggtcacatgctcattcctaaaccaatgcctgcagccagagaggagaagtactctggttggtcagacctggtcatgtggtcacccttgacccaagcacagtggccgggaagtagaatgctatcattggcagagctgagtcgtgctcacccaagctgaggggcggccccaccggaacaagggaggctagtcctgggatgctcatgtagagcagcactctcgtacttcaggcgggacgtttctttgttgtgcagggccctcttgcacattggagaatgtttwtcattcctgacctaccccatccccaacctagtcagtgccagcagtgctcccatcctmagacatgtgacaatcaaaaagcccccagaggccgagcacagtggcttatgcctgtaattccaacaactcaggaggccaaggcaggaggatcacttgagcccaggaggtcgaggctgcagtgagctgtgattgcactactgcattgcaagaccctgtctcaaaaaaactaagaagtggccgggcactgtggctctcgcctgtaatcccagcactttgggaggccaaggcaggtggatcacctgaggccgggagtttaagacctgcctgcccaacatggtgagactccgtctctactaaaaatacaaaaattagctggccgtggtgcctgttctcccagctacttgggaagctgaggcaggagaattgcttgaacccgggaagcagaggttgcagtgggccaagattgtgtcattgccttccagcctgggcgacaagagcgaaactctgtctcaaaaaaaaaaaaaaaaaaaaagccgggcgcagtggctcacacctgtaatcccagcactttgggaggtcgaggcgggcagatcacaaggtcaggagatcgagaccatcctggctgacacggtgaaaccgtgtctctactaaaaatacaaaaattagctggggccaggcgtggtggcgcgtgcctgtaatcccaactactcaggaggctatggcaggagaatcgcttcaacccaggaggcggaggttgtggtgagccgagatcgttccattgcactccagcctgggtaacaagagcaaaactccgtctcaaaaaaaaaaaaaaaaagaaaagraaaaagaaatttctcattcaaacattcaaaccatgtggccaagccaggctggtaaggccactgtgatctatgcggtcattcaggtccccaggttattgcatcccgattccctggagcccttgtcatcttcacagttgaggctggcctgtgccactgctaagtccagctcctgggagatgtgggacaggagagcctggcacatgcaggttctttgaaggaactgatgtggatggcacatctcacttctgctcatgtcccagaatttacagacaaggtcacacctggttgcaagggaggctggaaagtgtggtctctagctgggcagctctgtatccagttgaaactgtcgctggggtaacaggggaagatgttttttgaggggatggctaggaatgtgtccygaattgggaagagttgtcccttcagccctccaccacattcctcttcgctcccatctctgacccctgacatcttctcgcctcagttgccatctaccttgggatcaaacggaaaccgccccccggctgctccgattcccctggagtgtgaagctgaccagctcgcgccctcctgaggccctgatggcagctctgcgccaggccacagcagccgcccgctgccgctgccgccagccacagccgttcctgctggcctgcctgcacgggggtgcgggcgggcccgagcccctgtcccacttcgaagtggaggtctgccagctgccccggccaggcttgcggggagttctcttccgccgtgtggcgggcaccgccctggccttccgcaccctcgtcacccgcatctccaacgacctcgagctctgagccaccacggtcccagggcccttactcttcctctcccttgtcgccttcacttctacaggaggggaaggggccagggaggggattctccctttatcatcacctcagtttccctgaattatatttgggggcaaagattgtcccctctgctgttctctggggccgctcagcacagaagaaggatgagggggctcagcggggggagctggcaccttcctggagcctccagccagtcctgtcctccctcgccctaccaagagggcacctgaggagactttggggacagggcaggggcagggagggaaactgaggaaatcttccattcctcccaacagctcaaaattaggccttgggcaggggcagggagagctgctgagcctaaagactggagaatctgggggactgggagtgggggtcagagaggcagattccttcccctcccgtcccctcacgctcaaacccccacttcctgccccaggctggcgcggggcactttgtacaaatccttgtaaataccccacaccctcccctctgcaaaggtctcttgaggagctgccgctgtcacctacggtttttaagttattacaccccgaccctcctcctgtcagccccctcacctgcagcctgttgcccaataaatttargagagtccccccctccccaatgctgaccctaggattttccttccctgccctcacctgcaaatgagttaaagaagaggcgtgggaatccaggcagtggtttttcctttcggagcctyggttttctcatctgcagaatgggagcggtgggggtgggaaggtaaggatggtcgtggaaraaggcaggatggaactcggcctcatccccgaggccccagttcctatatcgggccccccattcatccactcacactcccagccaccatgttacactggactctaagccacttcttactccagtagtaaatttattcaataaacaatcattgacccatgcctactccatgccaggcccagtgctggacacagagacatgaagctctgtctgtgggagacagggattctgacacagacaccggacaaaccattgtcttggggagcccagaagagaaagtgggcagggtggggtcattggggaagatgctctagaggaattaatgctggaatggggtgttgaaggatgagtaggagttagttaggcattgagtttgccctgggcaaaagcccagaagtgggagtatgtggtatatcttcagagaactgggtaatttcagtgtggctgctgtgttgggcatggatggagaatcagcaagagaaatgctgtattaggactaataatccatctacgctgcttaagcaaaaaggtatttgttggtttatgttacttaatagtccaggggcacctggcttcaggtaggtttgatccaggcatcaggccattgcatctattttttcagtgtaagttgaattctagtaatttttatcaagtaagggctcctttcctggtggcacagatgacttcagcagttagaagtttctatccctccagctttctgcagcagaaagaccctcattgtcagtttcccagcaaaagtcccagggcagactctcattggcccaaatgggccatgtgattttctctaaaccaatcactgtgactctagagtggccagactcagagctgcacttagtaggggttcctcaaaggaaggtcaagtgtcatgagcaggagaaaaggcatgggagctggacagattatagtggttgaagtctgtgcagtacagaagggcggagcttattcacacagcacctttggggccaaaatgaataagctggactttctccccatggcactggggaaccatggaagttcagggaacttcagggaagaggcttggtcaattcctgagagcatcctctgtgctggggacacagtggtaatcaagacagccccaacactgccctcatagagctcacagtccaatggaggaggcagatgtgtcctcaggcagcgactgggcagggctggtataggggagtccagaggtgatgcctgcctcagccagggagggcttcctggaggagaaggagccagctagacatggataggagtgcgttttaggcacagcaaatggcacatacaagggccagggagcaagagagaggacaggtcctcaacaaatggcatgtgacttggtaagtgtagaattgctgtgaggtatggggctaggggcgtcagtagggccttgaaggttatggacaggggcctgggctttcttccaagggcactgggggagccatggcaaggttgtaggtagggtagagatgggcgggtttgtgctatgtgcagggtggaagggagggaagttgacaggtcagaagatcaggaaagaggtcggggctggacagatggggagagcgcagatagatttaagagagtcctgtgaggcaaagtgggcaggacctggtaacaggtgtctggactgtggctttggctggctcagaaggtccccactggcgtgtgtggtctatgtagcctctgggtgtggagctgggatcttcaactggggacagtacagtaaagaacatcacagcatctcacaggttctgcataccttaatgtttagaatctctcctaaccttccttgtagtaatctccctgggaacttttggggacatccctaggcctcaatttcccctctgtaaaacagagggcagattgaactacaagggcccttaatctctgtgactcttgaggtttgaaaaagcaccttaggttcctgagggctttgtcggttcttccatttactcccacctcacttttttttttccctaaaacgtttgtcttttggggcccaccgactgtgtccttgttaacgtagacattggcctgtttgactgggtggaggtgattgacgtgcccaacacccaatgcatgttcagctactgcttgacttctattaactcttctccctccaccaattgctctaccacacctctttcctgttccttcctgggactgagttctccaaaaggcctatccctaaagacttcatggggatgctcagactcacagattggagagggaaacagcttggtcaaagacattgaggtgggaattggagggtgtcaggtgtgaaagaatcagaggagtaatggggaaagaactggaaaggtgagcctccagcaaatggtatgcatttcagtgtggccttgagttgcaaaataacagaaaagctttctaggagaaatggggagccatggcaggttcttgagaaagtaagggactggcagcagctacagagggatgaagtcagacgggacagaaggaggccactgagaagcagaatataggtagatgtgacgagctgcatgggaggtctcaaaactggagaccgttgggctaaattcaagtttcagacatttcgtttggctgcattcctccccagcgtggacctcgtgtttgagatctgagcatgactaattcaaagccatagttggaaagggcccatgctttgggtgagtgacactgggctcagtgtctctctgggtctcagattccccatagagccttctaatttttggactagattctgtgacctaactttgcctcattttagacccgggataagacatgtttagtacatgcctagacaggacaaaccactctgagaccacacagtggccaattgcacgtcctccctcaataactatcgcacaaagctaaggccaccaatgcttttatttatcgctttgcgtggagacaaagcacaagctccgagtgtgctgggagctctccattaactagagctcctggttggggtggagctctgggaaaagaagaggaccctgccagggagatatttcattggccagaatccagaggatggagcccattggttggaactctggttgaaactggaactctgagaagggtggagagagcccccaggtgggactctgggacagggggcggggcgaggagtgagggagcaggactctggtgggccaggccctcccactggctgggttccagcagtcggtggcaggtgggcaggcgcctacttctgggcggggatcatgtcgtcgatggactggcctttctccaacttcttctccatttccaccatgagcttcacaccatccaccaccagctgcacctgttctacttcggacgagcccagccgatcagcgttggacacgtcaaatactgagcccacggcagctgtgtccacgccacctgtgggagcaagggacaggggcgtgaagaggcagcgaaggtgcagaggggctgggacgtggcccccgtgccaaatgcaacagccgcatgtagtgagtgcctactgtgtaacaggttacctgcacacaggtaatgcctgttcattcgtgagctcacgagtctctgacttcagatggggtaccacgccactcagttatcaaacatagtatagtgggtaagagagtgggttctggagccaggcggcctagggtcgaatcctgaccactcctcgctttataaatggggaaactgaggccccgagggaggtccaagggcatgtgcaatgcatattatataatcatgaaaatcccacattgactcctatcacataggcatattgacacccattttacagaggaagaaatgcaagctcacagagggtcagcccttgccggatccccagaactcgcagggatgtcgcacctctccttgcatccctgcaaagggccctcgctccccctccgtcgtggtgcaaaggatgtgggagccgtacctgtacccctcttctgcagacgcaggcgggtgaggatctcctcgaacttggggtgcttgctcaggtgcgccagcttcacatgcacgcctccacgcagcccagtgcccaggttggatgggcaggtgagcacgtagcccaggtgctggttccacatgaaggggtggccagctttcttaaagatctcctcaatctgaggttcagagagaggaccaggggtcagcgccggcaggcacccccaaatgcacccgcaacatggacagggtccggagggacagggcgtgggaacgtggtggaggtgggattctgaggggaacagggaggtaggagattccgagggtgctggctagacaatggggaccaaggcaggattttgaggggcggggactaagaacgctttgaaggcgggttttttttttttttttttccagagtctctctgtgtcacccaggctggagtgcaatggcgtgatctcgtctcactgcaacctctgcctcccaggttcaagcgattctcctgcctcagcctcccgagtagctgggactacaggcgcgcgccactacgcctggataatttatttatttattaattttttagtatagagacggggtttcaccatgttggccaggctggtcttgaactcctgaccctcctcagcctcccaaagtgctgggattacaggcgtgagccaccgctcccggcctgaaggcggatccttacgggcggggcttgggcatagggtggagctgggtccaggggcggggccctgaaaagcgggtggggctagttttggggggcggggtttggcatggggtggagccaggtccggggggcagggccctggaaaatgggtggggcagggcttagtataggggaaggggcggggcctcggaaagcaggtggggcgttcaaggtggagtcagaagtcagcagctaagggcagacacccaccttctgcagccctacgcagaagcggcggaaaacctccttcatgttgccccccttctccatggagatgacccggaggtgatcctcctcgttcacccacaccaggaagctcttgttgtcattgtgcctagagtaaggtgccgcagcaagaggccaaggtgtcagccccgtgggaaccccattcccagccctcccccaaaacatctgcccaccgatgggggaagagggcctgaggggtgggaggtgggtggcatctgcctcctcaaaacgcagaagcttaaacctgtagactctaatgtcacaggatctgcaaaacgctgaatcctgggatcaaggacttttagggacttaagtctttgaacagtattattatagatccttgggatctcaggatgtttgacaaacagaagcttgggatcagaactgataacacttggaaatcctacatctggtttcaggaccagaaaatcttcccatcgtagtgtgttagctcccaatcctagcatctcagaagcaggatcttagaacataaaatattaaggctgggtgcggtggctcacgcctgtaatcccagcactttgggaggccgaggcgggcggatcacaaggtcaggagatcgacaccatcctggctaacacgtcgaaaccctgtctctactaaaaaatacaaaaaaaaatctgggcatggtggcgggcatctgtagtcccagctactcaggaggctgaggcaagagaatggcgagaacccgggaggtggagcttgcagtgagtcgagatcgcgccactgcactccagcctgggcaacagagcgagactccatctcaaaaaaaaaaaaaaaaaagaacataaaatattaagatccggaaatggccgggtgtggtggctcatgcctgtaatcccagcactttgggaggccaaggccggaggattgcttgagcccaggagttcaagactaccctgggcaacatggcaagacccacatatctacaaaatttaaaaaattagcaggcatggtgggacacatgcctgtagtccaagccactggggaggctgaggcgggaggatcacttgaccttggaaggtccaggctgcagcgagctatgatcccaccactgcactccagcctgggcaacagagcaagaccctgtctcaaaaaaaaaaaaaaaaaaacctgagggcaggcatggtggctcacgcttgtaatcccagcactttgggaggctgaggtgggcggatcacttaaggtgaagagttcgagaccagcctgagcaacatggcagaacgc

SEQ ID NO: 97020 - DNA, 12843 bp, Homo sapiens
gccatccccggtggcacgtgtgtgtgtgcacaggcacggggcaggggccatccccggtggcacgtgtgtgtgtgcacaggcgcggggcaggggccatccccggtggcacatgtgtgcacgggcttggggcaggggccatccccggtggcacgtgtgtgtgtgcacaggcgcggggcaggggccatccccggtggcacgtgtgtgtgtgcacgggcttggggcaggggccatccccggtggcacgtgtgtgtgtgcacaggcacggggcaggggccatccccagtggcacgtgtgtgtgtgcacaggcgcggggcaggggccatccccggtggcacgtgtgcacgggcacggggcaggggccatccccggtggcacgtgtgtgtgtgcacaggcgcggggcaggggccatccccggtggcacgtgtgtgtgcacgggcttggggcaggggcaccaagggccacacctcgctatagcaactgtcagggctctcgcggtaggcggaggcgatgctggcctgcacagcctggacccaggcttgccgcagcttctcggagtcagcctgcagcatgcagctcctgcaggcagtggaggggcgggcgtcagctccggtgggcaggtacgccccccgccccaccctgggctgggcctcctcacttggtgggtgacagcacctcgaagcagaacctccgctcgatgtcctcacacggcttcacagagcacaggcggaggtcatccaccaccacggtgagggcatcctgtgggcggcaccgctgtggcccctgccctcagccaccacccggccccgaccacccacttcctgcttcaccttggagacccggaggccgactgcctgagccccaagccccgtgtccagctctctgctccctgactgttccggctccggcgtccactagtgccccggccctgtgctaaccccaactgaccagtctgccctgtggcccaggtggggcgtccagccatcagggccccagccccaggcccagggcacaccttgagcttcttctggtagaccagctggctgttctgaatggagaaccagcgcctaggtgggtggggggatgtggggagtcaggcggggcccatcccagggctgctgtgacccctgcccccacctgaggaccccacccccgcctgaggaccccacccccgcctaaggaccccgcccccacctgaggaaggcctctcaccggttccatgtcttgaaagcgttgctggccctcttgaagaggtagccctccatcaccaccccactgggcgcgtccacgtcaaactccactttggactcatcgtaggagaagtcctggggggatggaacccgccccctcagtgcccaccccaggggccctgctaccctccgtgctttcccggagcacaggtgggggtgaggtccttgtctgaggctgccacacggcccacggaccacacgctcagacgagagaccctctgttcaccacagccacttcttgacctgagcaaggcccccagccctgcaacccgtggggcagacccctcacgttcacagctgggggcccgagagtgccggccccaccccagccctgcagggaccagcaggctgcgatcaggaaggaagctgcgcccccaccctccgcatcctgagtgccccattcatgtggccagctgggcggacagagccccattcaggaggcctgggagtcactgagggccctgtgtgtcccgccatctggcaggccagggaagcagaggggaggggcggccacctgctccccaggccacatgggatgggaagggacagctgccgccaaccccacggggaatgtggaggtctggccggagccagcccctcacagccgcatcagcagcaggagccgagactggtgggaggtgtccttggtgctgaagtgcccttggggtagaggagggaaaggcaccgccccatctggtctcccccgacccacagcccgcccagggcccgtgctcacttacctgcagcagcgtctggagggccggagcaggagggggtagggggagaaagccagtgagtgacggctgccaactcctggtgactggtggacccgtccccaactcctggtgactggtggacccgtccccaactcctggggggctctcccctatcccaaaatagccactcctgcctgcagccaacctctgcccgggatggtggccggggctgctgtcccacaggcaagcaaaggccccgcaaggagccagtgactgaggccacagaggtgaccaccgcctcaaaaggagatcccagcagcggccccacccacacgtgcccctccactgcacacatcaaagggagcagccttggtcccctagagagggtgtgggcagggcaggtgggagacaggcaggaggaaggggcggggagggtgtgccgggcatggggtgaggacgcaggggcctcccaggcgcctggtgtgcagggagccggctgcgcggcctcacccgctgctggatggcggcgtgctttcgctccatctcacgcttttccaccgcagagtcgatcaccagctggtccagctgttgggggtggcattagggaaggtcacggaggcctggcccagccccacccctcccaaaggctcacctcggctgccagcttcttcatgtaggggtccagctggtgcaggaggctgtagccctgctggaagaagctggactgggcgtgcatgaaggacagcatctgcgggggcagcacaggtgaggcccaagcacacccggtccagcccccaacatgcagcctgtgctcaggggcagcccccacgcactcacagagtccaggatctcaaacttcttcttggcctgcagaacattgatctgccagagggggagcccacaggtgagccccggaggctgaggcagccccaagccctgcacctgccatagagtccacctgagctgcttgtggttccctgagacccccaggtcgtcttcagctcccagctctgggccagcctcatcctcccatggtcctggactgcttccccatgtctggagttcccacccatgggcaaagcaagaatcgtcactcctgctcaaaatccctccagttctgtacaaggccgttgaggcctccattcgctacagctggtccccgccccccagcccatttctggggctgacctggagcacatagtccagtgccaggtggcggaagcacttcctggtgagggtgagggccccggtggcttcctccacctcgtggggccggtgcctcggggcctgggcgttcctcaccagggacagctccaggtcctcccgcaccttgtcaaactgcttctttgtctccttgaacttccgcacatccctggaggccaagtgccaggtggggtgagagatcagggagggcacctgctggatcctggagtctcccacatcgttgtttgtgtgttttttgttttttgagacggagtttcgctcttgtcacccaggctggagtgcaatggtgctgtctcggctcaccgcaatctctgcctcgcgagttcaagtgattctcctgcctcagcttccctagcagctgggattacaggcatgcgccaccaggcctaattttgtatttttagtagagatggggtttctccaggttggtcaggctggtcttgaactcccgacctcaggtgattcacccacctcggtctcccaacgtgctgggattacaggcgtgagccactgcgcctggcctggttttgtttgtttgagacagggtctgtctctgttgcccaggctggaggctggagtgcagtggcacagttatggctcactgcagcctctacctcccaggctcaagcaattctcccacctcggcctcccaagtagctgaggctacaggtgcgtgccaccatataaggcttatttttggttcttgggggtgtctttttttttttttttttttttgatggagtctctctctgtcacccaggctggagtgcagtagcacaatcatggctcactgctgcctccgcctcctgggctcaactgatcctcccacctcatcctcctgaatagctgggaccataggcacgtgccaccatgcccatctaatttttttttttttttttttttgtagagatggaggtctcattacgttgcccaggctggtctcaaactcctggcattctctggccttggcctcccaaacgctgggattacaggtgtgagccaccatgcccagccccacccccctccactccaggccctttctttgctcctgggcatagcctccttcctcaccagcctatcccaggcctgcccgcacccctgctgaccccgatcatctgctccaggcctccccagcccctccccacctcactctcaagatctgtccagcccagaccccagccatgccccagactccagacccccaaacccaacgtggactggacctctctgctgtgggggctggacaccccacccacacatgcagggtgtggaaccccccgcactccacccggctgtctgcctctgagccttctgccttgtggagccgctgcacagcctggaggcctgggcccaaggtgcctctgctctgccccagacccccttcccctccaagggagggagcgtggcctcagtgttcttcccccagccctgggggccactcactctttgacaaagctctggagctgctgccgcacggacctctgggcctggtcaaacaggatctgggggcagaggcgggcagagatccttggggtctgtcccgaaagagccccagatggaaggccccatcctcaccagcagagggcactgcccccaggcccagatgcaggggcgggtcccaccctgcagggctggcctcaagggggtcaggggagcagcccccaggcctgagttggcacccagaggcgatggctgtcacccctgcccctctgtcccacctggcccttgatgagtgcagaggccaaggctgcctcatcacagcctgagccggagccccactgcctcctggccctgggcggccaccctggggtgcccatccctgcagcagggagcactcagccagagccgggagcacccaggggctgggcctggggagctggagcctgggctctgaatcggaacccgaagtagagaaggaccgggcacaaccaggagcaaagggacggctgagccatcctgccttgtctacttcgggacctcctctgttcagtctgcggctcaggttcccaggctgcagccccacatctcacgggtgcctgtcctgtgtgtccatccacgtcagtgccagggcccccgggggccacccagacccaaatggcagccaggccagcctgggacgagagccctgcccagttgggggaaccctggataaaccacccctcccccagggtctagtgtggcccttgcctgggacacggcagagcccccagggctgtcccccaaccccacactgacttgaaaatgtgggattccccccccccccgactagaggagcagaaacgtgccccccccaacccgacgccggccttcaggtgagccagcgcagctcggttccaggccaggcacagcccacaggtggcagggaggccgcgctcaccatgtggtagttcaccacctcctgtaggctgtcagcgaacctctgcagacattcctggaggagcagatgggaacccgtgctgagatggcaaatccgggcccaggtcacccagccacgccctctgagcccctgggcggtgcagacaccggcctgcttctggcctggacgccctcaaggggctgcctccctcggcctctcccccaaccccaccttgaggtcagaggtcagtcggcccctcaccgagatgacggtgtcgccctggcactgctgggacaggtcgcggacgccgctcacgaaaagcctgctggtgctgacgtaggccttaccggcttccaccatgccactgcacagcttcaccagctgtgggccagcggggcgtggtgagcacagtgggcactggcgcctgcactcgccaccacacacggccactcagaggcaggaagagctcccagggtaggttccactcagggcgttggcactcaggactcagtgccccggtgcagcttcctcacgcctgggcctgcctggggcttggaggcccgtctgggaggggagggtggggccgccacggctcggctgggagggaccaggagccaggcaggggacccagggccagcaggaccagcagaaccagcccatgtggggctcatggataaggctgcccactcccagctccacggcctgttgccccctcctctttctcagcccatgtggggctcatggacacggctcccctctccacggcctgttgcccccyctttctcagcccatgtggggctcatggacacggctcccccctccacggcctgttgccccctcccctttctcagccccagccccagccacaccaaggctcagcccacacagcagctgtccccrtgtcaccagcccagcagaggggacgggcagccaccgtgggtcggggactcaccacagcccagcccctcccagatgggacgagactcagggccagccacatgtgtgcatgtgacatgtgcaccctggaacacacatgctaagacacagggaccaggacckggagcaccacacgcatgctccacatatggggggtgtaagtggcttagtaaggcctggagggcgagtctggccatgtggccatcccaagcttggccgggcacagggcgctccaggcccgcccttcaccttgtccagtttggcctcaatctccaccacgtccgtctccacctcgtcaatggtcgccctaaagcaagaacggggctggctggggtcacctgcagcctcagccccctcggggcttcacctccccccgcacctccctgaggggctccaccatgggaaggggctttcaggaaacaggctgggagacagacgcctgcctgctacgggggcaggactgggaccaggttcagtgcacttccccccgcccccccaaccccaggcaggcagaggcagccgctgctgtgccctcggggaagaaggctggaccagcctctcccaggacagccggccgctgggagtccctcagggacagtgcccaccaagggctgagccagcctcacccgcctctcctctaggagttcagagtcaaccctggacccatctggagcccctcaaccctgcggcacctcccctcaccccactgcactactgcagcccatccaggtctggcgcccatgcactgtgggacagggtgggggcagtagggcagctgctctcggtcctggcagcaccaggaggacccagaccagctggggagagacgcccccggctcccccaacctcacagctgcaagcggcatggtccgctggaaagacgggtaggccatcctcctcagagcccactcccaccaggacagcctgacagtggggctgcctggggagagaagagttaaggcatgacatcaccagagaagcctcggcgggagaatccccggaagacaggaggcagatggatcgggcacgtgaccaccccctccgggagcaggcaacagggaaacagggccaggatcccggcagccctccacacaatcggctcactggctgtccgggccatctggcctcctggggattgggcaccacagggcccgggctggggccaggactccaggtctagggcaggggtccaggagcagaggccatcagggcctacagtccctcgtaccttgctaccctgaccggtgtcccaggcctcgggggaggggcctgtggtttacatggggcgtgtcctcaattaggagctggagctgcaggcaccaggctgccccagccagggaccttgaagggtcccagccaccccagaaggacactaggtcctctctgagcagccctctcttgttcccaaggggctaagaggactctgaatcccgaagcagggggcgatggagggaatctcgctgtggtgtccgctgaccgccagtgcccagcctgcagcccctggaccctgacctctacctcagctggaggatcccagaacagagaagggaccatcctcccaggagaaggcagcagagagcgccacaccccaggagttgcagccacccctgagcagggccggatgcagagacagctgcacccagagctgccgccctcgggtttggggcgcccgtgtccctggagagccagcaaggggggatggctgcacccaggagctcacggacgtgctcatggggacagggtgggccctggcagaggccccgagagccgctcccactgctgggagcccctcagctctcccttcctcagtcctggggacctaggcctcctctgctgtgctcagcccaggatttcctcagcagcttggaggacggggaggagggtgaggctgccccccaaccaaagccatgactcagcgcctgaagccccacccaggggaggggcacactgaacagaggccaggcggttcccctacacgggctcccctggcctccggcccactgcacctgggctgccactaggccctccccagaccaggagggtgcgggcagggtccccctctcccgggctggggcgaccaggctccacgttacagaccacatcttcccgcccaccctgcctggccccccaacctggcggtaggccaggaaactcaagttacgcccttagggcctgcccccaggacagcctcagggagcccctcgaaccccagttaaatcacagcctaaccccaaaacccactgggccaggccattctcatctccccactccagtccatgccccacaggggtgaggcactttcccagggcagtcgctctacggcacctactgcagccccacagcccccataactggctcctgtaacaggctcccatgagagccggttaccagagagaaggcccagaggtgagtgggttccagcacccccacacgactggaagagggcagtacagggccgtctgcgtggaggaggaggtccattaggcttctgacggaggggccagggagaaggtgggtgcttcagccagggtccagcccccagcagggaggccatgcccacacctccccacagcccgggtcctcagtgcaggatcctagggtgctcaagttattcaaccccttttcccaggtcagcaacagaagatgggagagcagaggatggccccagttcctctgcccagggctgggggccactctcctggctggccctgagcctcccactccaaggctcctgagcctcctggtgagggctccagggatacagaggctccccgtgcctccacacacatgctgacttgccagcagatcccaagagacccagcgcgcgcgtgcacacccacacatacacaatcaagcacacatgtgcaaacatgttcatgcacaaacatgcctgcacacactggtaccacacatacatgtgtgttcaaggagacactgcacagacacgcatcaacatgtgtacctagtgatggaacacgcgtgtacaaggtgatgtgtctgttgctgacatggctaacacagtacgtgaacccacacagacaggtggtgtgtgcacacgcttgcgtgcactcatcggcaggctacatgcagaagcaagcacagccccgtggcacagctcatccacacgtcctgtgcaaggcctggtgtccggagggaggcacgcagaggggcaaagttcacaagagcgcaccccgcacgagctcgtgcagaggagggggcctcacgcaggtgcgcacttggggatgcagagaggtttctttgcctccattgtcgtttgccaaatgtccaccaagcaaagccgatgcacacttgtgcacacgtctgtgaacatgtagttcacgcaggtgtacacgcctgcacgccacgaatgatggaaaacatgcagactcggtgtgcacacaacccctaccccctacctgaccttccccgccgctcttctcggccgccacccctccaagcccctgggtcattcaaaccacttcacgtttccaagcaccctaccccaggccttaaacgcggctccagctgcctgttccccacgcgctgctctggacacaggatcaagtcagagaccaggggccgacgcccccacggacccagacgaccctggccagagctggactgcagggcccgggaggggctcagcccagtggaggtgcagacacagagcgggggcggacggtcccgaggtgcccacggctgcccacgcgcacgccctccacccggggcggccgcacagggcaggagcgtcttttgttccaacccccagggcatggcggggcggggccgccgctttgtccgaggccggtcctccagcccctccccggcggccgcggcccggcccggcgctgacctccccaccccgccgccgggcacaaaggcgacagcgacgcccccggcctgcgcccaccccggcggccccgggcggcgcacctgaagcgcggggagtccttgacgcactcctcgaactccacggtcatggctgcggcggccgcggcgctcactggcacgaggaccgcggcgccgagcggcagccgcgccggcccggaccgctcgtcccgcccgcgccgcctcggcgcccgcccgccccggaatgaggccgccgcgccgcgccccgccccgcctgtcaccgccggggagcgtcgccaaagtcagccgcccgcgcgcaccgcccgctgtcactgccggggagcgtcgccaaggtccgccgcccgcgcgcgccgcccgctgtcaccgccggggagcgtcgccaaacgcctctcgcagcgtccagggaccaccccggtccggaagtgaggcggggcctgccacggccgtctccggggacagtcggtggaaatgtggggcgcggggagggcgcggggagggcgcgggcccgcccgctccaaccatcccggccgttgcgcaactcagggcgtttgcaaaaaccacgtctgggaggacttggccgcaacgcggcgaacgggcgcgctcggggagtgtgggcggcggcgaatgaatgagcgagtgaacgaatgcacgcccgcgagagcgcggggtgaccgcgtggttggtgcgcgcctcccggggcgccgcgatagaggtagagcgcctgcgctcggcggcgggccggcactttgcagccgctccctaagcccggccccgcctccgctccccgactctggccgccgtggcgcggtgccaccgcgcaggcgcaagagcggccggggccgggggggagggggggggggcgtgaccaggccgcgtccgcgcgcgcgcaggattcctgcgctggaggccgcctctgacgccaccggctgggctccgccatgagttcggcgccggcctcaggctccgtgcgcgcgcgctatcttgtgtacttccagtacgtgggcaccgactttaagtaggtttcccaggcgcagcggcgggcgccacgtgggcccgggcggaggcgggaaggagggcgcgggcgggcaggcggatgtctctggacgcgggttccaaacgttcggggaaggaagcggccctggcctcagacggcggcggagaccccagggcagggcgcccccggtaacctccgcccgcttctgcccgcagcggggtcgcggccgtcaggggcactcagcgcgccgtcggggtccagaactacctggaggtgcgctcagccggtcacgggacgcccggtgaggggtaagggggaggctcccgcccgcgcgtccccggggtccggcctcgctcacccgcccgccccgcggctcggtcctgcaggaggccgccgagcggctgaattccgtggagccggtcaggttcaccatctccagccgcacggacgccggggtccacgccctgagcaacgcggcgcacctggacgtccagcgccgctcaggccggccgcccttcccgcccgaggtcctggccgaggccctcaacacacacctgcggcacccggccatcaggtgagcccgcgacctaagcagccctggggctgtgccttcccgactccatctgtcgcgggcggaggctggagatctggacagacttccttgtctggtcggagctcgagggggaaggagagccaatgtgacaccgcgggcgggcggggtcgttcctccggtgagctttacctgccgccatagggtcctgcgggccttccgagtgcccagcgacttccacgctcgtcacgcagccacgtcccggacctacctgtaccgcctggccactggctgtcaccggcgtgatgagctgccggtgtttgaacgcaacctatgctggactctcccggcagagtgagtgtggccctgacagcggggagggggcgggcaggccggccccaccctcctgacggtcaccctggtccctgaagctgcctggatatggtcgccatgcaggaagccgcccagcacctcctcggcacacacgacttcagcgccttccagtccgctggcagcccggtgccgagccccgtgcgaacgctgcgccgggtctccgtttccccaggccaagccagccccttggtcacccccgaggagagcaggtgaggaagggcccctgggctgtggccctgccctcaagtcacgtgctgattttagctccagcacctcccccagttttaaggcaaggtgaggcgggaggcaggcagccgggagtcctcaggacctggacagctggaggggattcgcccggacgccccccagcctccagctgtgccctccccccaggctggggagcggagaacagggaaggctgcttgtctctgaaaaacccctgccatgcctgatggaagaatgttggcagctactggaaaggtctcactggtgccagtggttctggtggggtggtttctgctgcccccagcactgtcccgagggccacccaccaggtgg

SEQ ID NO: 97021 - DNA, 40186 bp, Homo sapiens
gagaacttgtgcaggctagctcccatttttttttgttttgttttgttttggggtttttttgttgttgttgttggtttgttttttgtgtggtttttgttttgttttgtttttttttgagacagagtcttgctctcttgcccaggctagagtgcagtggcacaatctcagctcactgcaacctccgcttcccaggttcaagtgattttcctgcctcagcctcccgagtagctggggttacaggtgccctccactgcacccggccaatttttgtatttttagtagagatggggttttaccatcttggctaggctggtctcatactcctgacctcatcatccacccacctcagtctcccaaaatgctgggattaaacttccatttttaaagccaacagatgtcataagacttattcactaccacaagaacagcacagaaaagagcaacccccatgattcaattacctcctgtcgagtccctcccaccacacgtgggaattatgggagccacaagatgagatttgggtggggacacagagccaaaacatatcaagctcactataagtcattcatttagccaaaatgataactcaacaatttttaaaaggcaaaaacctctactcattgacagagggaatacttagtttcccaaactctgtctgttgtctttcccttccctttcctatagtttattcaaaagacaaacaaaaatatttcatagccagccatggtgtctcattcctgtaatcccagcaatttgggaggctgaggtgggtggattgcctgagctaaggagttcaagaccagcctaggcaacatggtgaaaccccatctctactaagatacaaaaattagctgaatgtgcacacacctgtaatcccagctactcgggaggctgaggcaggataattgcttgaacctgggaggcagagattgcagtgagccaagattgtgccactgcactccagcctgggtgacaaagaaagactccatctccaaaaaaaaaaaaaaaaaaaactttcattattctttcatatacataagtatcttactcaagagaaaagccaagtttcttttctttctttaattttttattttaaattctgggatacatgtgttgaacatgcagatttgttacataggtatacatgtgcattggtggtttgcttcacctatcaacccgtcatctaggttttaagccatgcatgccttaggtatttgtcctaatgttctccctcccctttttccccacccaccaacagacccagtgtgtgatgttcccctctctgtgtccatgtgttctcattgttcagctcccacttatgagtaagaacatgcagtgttttgttttctgttcctctgttagtttgctgaggatgatggtttccagcttcatccatgtccctgcaaaagatacaagctcattcttttttatggctgcatagtattccatggtgtatatgtgccacattttctttatccagtctatcattgatgggcatttgggttagttctaagtctttgctattgtaaacagtgctgcaataaacataagtgtgcatgtgtgagaaagccaaatttcacccttgcatttgtgtactattaatgtcaacatcaatttttaataaaaccttataggcaaatctatctaatcctaatcagtttcaccataaggtaagagtctcataagcctcttaaaaccctttacaaatttttgttaaagagcagatcagttctctaagaaaaccctgttgtgcttattccaatgttcaatttatggaaaaatcaaataatacccctttaaatttagctgatatgttcccacacagaatttcttttacaatattaatgttctataaaccttccacaacttgctcaaactttcagccttatcctatctaacttaaaacaatcctttaatcctttaatttaggcacaaacaaaaacccacattcccttgccttcttataatcttttgccaaaatcacattttgctttcctcacacaccttgcatttaaaactgttttttcagtagtctcaattacatggtacaatgttaactcttagcaatttttatttttgatgaaaaacctggtaagtgattttaattatgtactaggtgtggagcctaggacaccagaaagaaatgcagataaagtctgatttattccagcatagccaggaggcatggctaactccacatgtccccagggcttacctagaatgtaatggctccaaaacaagtaagttgaacaattttcaaaagacaaagcagtttattaccttaaagcatttagcaaacctaatatctgacgtgcctaatttagaccaaatagcttcattttaccaataatctttaaaactcttcatttctcaaagtcacattaactaaaaggcattaattacagtttttatttttgatatggttcagctgtgtccccacccaaatctcatcttgaattgtagctcccataattcccatgtgctgtgggagggactaggtgggaaataattgaatcacagaggtggtttcccccataatgttctcatggtagagaatatatctcatgagatctgatggttttatgagggaaaacccctttgattttgtccttgtccaccaccatgtaagacatgcctttcaccttctgccatgattatgaggcctccccagccatgcggaactgtgagtccattaaacctctttttctttacaaattacccagtcttgggtatgtctttatcagcaatgtaaaaacgaactaatacagtaaattggaccaggagtgggcactgctgtaaagatacccaaaaatatggaaacgactttggaactggatagcaggcagaggttggaacagtttggagggctcagaagaagacaggaaaatgtgagaaagtttggaacttcctagagacttgttgaatggctttgaccaaaatgctgataatgacatgcatgcacaatgaaacccaggctgaggtgatctcagatggagatgaggaacttgttggcaactagagtaaaggtgactcttgttatgtttagcaaagagactggcagcattttgtccctgccctacagatttgtggaactttgaacttgagggagatgatttagggtatctggtggaagaaatttctaagcagtgaagcattcaagaagtaacttgggtgctgttaaaagcattcaattttaaaagggaaacagagcctaaaagttcagaaaatttgcagcccaatgatgtaatggaaaagaaaaacctggccaggcatgatggctcatgcctgtaatcctaatactttgggaggctgaggtgggctgattgcctgagctcaggagtttgagaccagcctgggcaacacggtgaaacctcatctctactaaaatacaaaacaaattagccagttgtggtggcatgcacctgtagtcccagctacttggggggctgaggcaggagaattgcttgaatccaggaggcagaggttgcagtgagccaagattgtgccactgcactccagcctgggtgagaagagtgagaatccatctcaaaaaaaaaaggaaagaaaaacccattttctgaggagaaattcaagtcagctgcagaaattggcctaagtaatcaggagccaaatattaatcaccaagacaatggggaaaatgtctccagggcatgtcagaggccttgaagcagcccctcccatcacaggacctaaggcctaggaggaaacaatggtttgtgggcaggacacaggggccccatgctctgtgcagtctagggacttggtgccctgcatcccagccactctagccatggttaaaggtgccaaggtacagctcaggccatggtttcagagggtgcaagcctcaatccttggcaacttccatgtggtgttgagcctgcaggtgcacagaagtcaagaattgaggtttgggaacctccatctagatttcagaggatgtaaaaaaacacctggatgttcaggcaaaagtttgctgccagggtggggtccttatggagcatctctgctagggaagggaaatgtggggttgaagcccccacacagagtccccactgtggcactgcctcgtggagctgtgagaagatagccaccatcctccagaccccagaatggtagatccaccaacagctttcaccatccacctggaaaagccaaaggcactcaacaccagcctgtgaaaacagccaggaagtgggctgtaccctgtaaatccacaagggcatagctgcccaagaccataggaactcacctcttgcatcagtgtgacctggatttgagacacaaaatcaaaggagatcatttggcactttaagatttgactgccctgcgagattttggaattgcatggggccttcagccccttagttttagccaatttctcccatgtggaatgggtgtacttatccaatgcctgtacccccattgtagctaggaagtaactaacttggttttgattttactggctcataggtggaagggacatgccttgtctcagatgagactttgggctgtggacttttgagttaatgctgaaatgacttaagactttggggaactgttgggaaggcatgattggttttgaaatgtgatgacatgagatttgggaggggccagaggtggaatgatatggcttggctgtgtccctacccaaatctcatttgaattgtagctcccataattcacatgtattgtgggagggactcagtgggagataattgaattacgggggcagtttcccccacactgttctcatggtagtgaatatatctcacaagatctgatggttgtataacaggaaaccctatcacttcattctaattctctcttgcccactaccatgtaagatgtgcctttcaccttctgccacgattgtgaggcctccccagccatgtgaaactgtgagtccattaaacatctttttctttataatttttttttgagacaaagtctcatctctgtcacccaggctggaatgcagtggcacaattatggctcacctccacctcctggattcaagtaattctcctgtctcagcctcccgagtagctgggattacaggcatgcaccaccatgcccagctaatttttgtattttcagaagagacggagcttcaccatgttggccaggctggtttcaaactcctgacctcaggtaatccacctgcctcagcctcccaaagtgctaggattacagtcatgagccaccgtgtctggcctttctttataagttatccagtctcagatatgtctttatcagcagcatgaaaatgaactaaaacaatttttctgaaaaaatatttgatttaaatgcttattattattaagccaattaatcagaactttttcatataaacatcacacacaacacataaatatatagacagaagaagatccagtagttgtaagatttttcatttgccagtttttaagattcttaattggattactggattcagggtggagtcctttgaggaacagggctaggaaaacatgcagtttctagggcctaataagcaggcacagctggaaagcaaacagatctccaaaaattcagggtcccatttttatactggattctggatccccaaaagagaaatgctgtggaacaagacagtgcaatgattttaccgtacatttcattgcaaagcaacccaaactcaatcaacccagttttgatcagtccatcctccatgggaatcttatctctcagtgggcaggtaggaggacacccagctaggtgtggagcctaggacaccaagctcctaggctagtgtatcttgatatactaggatatccaaaagtacatttagccttagattttgagaagaatggtatgctttggctgtgtccccacccaaatatcatcttgaattcccacatgttgtgggagggacctggtgggaggtaattgaatcatggggacaggtctttcccatgctgttctcatgatagtgaataagtctcatgagatctgatggtttgataaggggaaagctgttttgcttggctctcattctgtctttgcctgctgccatccacacaagatgtgacttgtttctccttgccttccaccgtgattgtgaggcctccccagccatgtggaactgtaagtccaaaaacctctttcttttgtaaattgcccagtctcagttatgtctttatcagcagcaygaaaatggacaaatacaagggatttatctactctcagttcctggggtttcatgaggaaaaaaggtttttcccaaaatggggtctgtggcacttcttctgattttcccaaggagtctgggctgttagaaattatcttaggtattcacatctgtaatcccagcactttgggaggctgaggtgggcagatcacaaagccaggagttcaagttcaatgtggccaacatggtgaaacccctttctctactaaaaatacaaaaattagctgggtgtggtggtgcgtgcctatagtcccagctactcagggggctgaggcacgagaatcacttgaacccaggtggcaaaggttgtagtgaactgagattgtgccactgcactccagcctgggcgacagagtgagactccatctcaaaaaaaacaaaaaaaaaagaaaaaagtaattatcttaagtctggccagacatagtggtacatgcctgtaatcccagcactttgacagactgaggcaggtggatcacctgaggtcaggagttcaagaccagccttaccaacatagtgaaaccccatctctactaaatacaaaaattakccaggcacggtagcgcatgcatgtaatcccagctacttgggaggctgaggcataagaatcacttgaacctcagaggcggaggtggcagtgagccaagatcatgccattgcactctagcctgggcaacaagagtgaaactgcttctcmcaaaaaaaaaaaaaaaaaaaaattatcttaggtcctctcgtgtgtgcatcaagagtggcaagaagacaaaatgaagaaaatcaattcagttgactgaaaagataaaaatatttttttcctagaaaaacaagacccagaaagagaaaaaaaaaaaaacataaaggtcttgtcaatatacctatagcttgaatatctgcttttaattaagttgactttgaaccaaatatcttattacaagactctagccaaaacaagcagcaaatatttcttacctttgaactttaccaaaggcaacctcccaagtgctcagagaaaggaaaattcaagacaggaagtcagaagttgttcatggagggaaagagaatcaataaatggcaaaagtcacacagatatcaaaccagaaagtgttacaacagtgggtagctaattaggtatgagcagggcaggagagggctccccacacacagacacacacacacacamgcactaggagtgttgggcgccaatcaggtgatggtcaggcggttgttaactgtttccttaaagtartaatcattcacagctggtgccagggaacagcagtctcctaatagatacaaaacacctgaaactgatcagcagcttcccaataagatctcaggagttgggagaagtaacacaagatcctggaaggatgccaacgtataaaaccccgagtcaagaggtcaagttgtgcacttggtctcttgagtcacccacttggcttgtatttccaagtgtactttccttactgctctaaagctttttataaactttccctcgtgtgctaaaacttgcctcagtctctccttctgccttatgcccctcagttgatttttttcttcccaggaggcaagaactgaggttgctgcagacccatgtggataactaccactggtaaaaaaagtactcattccctaagtcgggaattgaaccctggccaccactgtgaaaagacagagtcttatccactaagccacagcatcrggcagtttctgctgctcttcccrgaagtagcctagagaggtcaattttgaacttcaaatggcttttaaatgttcaaaataattttcagagctgttacatgaactccgaaattcctgttccctggatgatggagaccaagacaaagtattgctctatggttacaagatcaatctcccaatgacattaaacaagaagatagagaaacctcatccagcttttttgtttcagggatcttcagcaaagtttgtaactaaccagtttgccagaatggcttgaacagtgagcttatgggggtcctaggcccacattctattttattgtacccctttttatgacagaacaatgcagaaggacacattcatagcacaaagtacaccagatttgctacagcttaagaccagcctcacgaatccttttactcattaattaaaactttgcggtcaggcatggtggctcatgcctgtaatcccagcactttgggagaccgaggtgggcggatcacctgaggtcaggagttcaagaccagcctgaccaacatggagaaaccccgtctctactaaaaattcaaaatcagccagccatggtggcgcacacctgtaatcccagctactcaggaaggctgaggcaggaaaatcacttgaacccgggagaattgcttgaagccaggagaatcacttgaacctgggaggcagaggttgcagtaagccaagatcacgccattgcactccagcctgggcaacaagagagaaactccatatcaaacaaamaaaaaaaaaaagtcttaaatgctgggcacggtggctcacacctgtaaccccagcactttgggaggctgaggcgggcagattacctgagatcaggagtttgagaccagcctggccaacatgatgaaaccccatctctactaaaaatacaaaaattagctgcgcatggtggcacgcgcctgtaatcccagctactcaagaagctgaggcaggagaatcccttgagtctgggaggtgggttcactgcaagccactggagtgcacgccactgcactccagcctggtgacagagccagacaagaaaagcaaaggggtggaacacaaaaatccatgcaaatttccaaaagccaaattttacaccccctgcaatattgccatttactacctgtttctttctgacccagtcagatgtaagaggcttctaactagatccaagccagttgatcagttaattactgaatccaatctggtcctggacccagtctggtttctgtcaggactttcaaaccaagtttggatcagaaatttgctcagagaaactcagagagctcaaaacacaaatctatggcgcttcggaatccgagagagaacttacccatgatccctgcttggtcactcagcactcctgggggttgtgagaagctctacttcagatcccacttctgacaccatctgaaaaacttcagccaaattaaatttaaaagagtttaattgagcagtgaatgattgatgaattgggcagcctcctgagccagggtagactcagagactccaacagggctatatggtggaaaatttatggacagaaaaaggaaagtgatgtatggaaaatgaaagtgagatgcagaaacagctgcattggttatagcttggtatttgcctaatttgaacatttagccacatttgactgaccaaaacttggtggtgattggcacaagagtagactacagtttgtttatacttccatttaggccatagttcgtgatgtacagagaaacctttaggccaaacttaaaatatgtaaggaggcagctgtaggctaaatktgatttaacaatggagaaaatttaagattacatcacccaaacagaaagaagggcctgggcacctgtagtcccaacactctggtaggccaaggcaggaggattgcttgagcccaggagtatgagaccagtctgggaaacacagggagaccccatctctacaaaaaaaattttttaaaataaaawtttaggccaggtgcggtgacactgaggtgggcagataacctcaggtcagaagtttgagacccacctggccaacatggtgaaaccccatctctactaaaaacacaaaaattagctgggtgtggtggcaggcacctgtaatcccagctacttgggaggccaaggcaggagaattgcttgaacccaggaggcagaggtttgcagtgagctgagatcatgccattgcactccagcctgggcaacagagggagactccgtcttaaaaataaataaataaggctgggcacagtggctcacacctgtaatccyagcagtttgggtggcagaggcaggcggctcacaaggtcaggagtttgagattagccggccaatatggtgaaaccctgtctctactaaaaatacaagccgggcgcggtggctcatgcctataatcccagcactttgggaggctgaggcaggcggatcacgaggtcaggagatcgagaccaacctggctaacatggtgaaaccccgtctctaccaaaaatacagaaaattagccaggtgtggtggcgggtgcctgtagtccccgctactcaggaggctgaggcaggagaatggcatgaacccaggaggcagagcttgcagtgagccgagatcgcgccactgcattccagcctgggcgacagagtgagactcygtctcaaaaaaaaaaaaatacaaaaattagctaggcacagtggcgggtgcctgtagtcccagctactcaggaggctgaggcaggagaatcgcttgaacctgggaggctgaggttgcagtgagccaagatcacgccactgcactccagcctggttgacagagcgaggctccatctcaaaataaataaataaattaattaattaaaataaattttaagaaaagagaaagaaagtttaataatgatttgaaaggttatatatcagatatcacttaaggccagtcacagtggctcacgcctgtaatcccagcactttgggaggccaaggcaggtggatcacctggggtcaggaactcgagaccagcctgaccaacatggtgaaaccccttctctactaaatacaaaaaattagccaggtgtggtggtgcatgcctgtaatcccagctactcaggaggctgaggcaggagaagcgcttgtacccaggaggtggaggttgcagtgaaccaagattgtgacactgcacttcagcctggatgacaggagtgaaactctctctcaaaaaaaaaaaagaaaaagaaaggtatcrgccaggcgcggtggctcacgcctgtaaycccaacactttgggagaccaaggcaggtggatcacgaggtcaggagatcgagaccatcctggctaacacggtgaaacctgtmtctactaaaaatacaaaaacttagccgggtgcrgtggcgggcacttgtagtcccagctactccttgggaggctgaggcaggagaatggcatgaacccgagaggcagagcttgcagtgagttgagtcgagatcacgccactgcactccagcctgggtgacagagcgagactctgtccaaaaaaaaaaaaagctatcacttaaaaatagcagcaagtgaatgagtaagtcagcctcaccttcaaaatagtctaacctgaccaccattcacaaycctactgctttcatcctcttctaagccactagcatcccctggctggctgcaagtctcctcattggtctctctgcttctgctcttggcagtcttcagtatatcctcaacacagccaaagtcatcctgttaaatcaggctaccctcctactcagacctctctgaaggcttctagtcttgcccagaaggcccacaatatcctacacaatctgctcccatcttacctttgtgctgtcatgacctgctgctttcctccatacttatgcagcttctgctagccaaatctccctgcagctccctgaacrcagtgaagatactcccatctcaataccttggcagttgctattccctctgcctggtactttatggctcaatccctcaccttcttcagatccttcctcaatgtcaccttctcactgaagtcttctttaaagatctattaaagttgtaaaccaccaccacccccaatatatctatgtcgctactcaactttctttttctccatagcacttttcaaacttaacattctagtctgggtgtggtggctcatgcctgtaatcccagcactttgggaggctgaagcggggggatcatttgagcccaggagttcaagaacagctgggcaacataaggagacctggtttaaaaaaataaaaataaataaataaatwaaaacttgacattctattatttatttttatagcatattgtatatttcctggtactagggtacaatctccagaaaggcagaaatgtgtacctgacttgttgctatatccccagcatctagaatatgttctggcacataataggctcgcaattaatgcttttaaaagaaataaacacacaaatttgtgattagaaaacattcatgaagcctgctgttagttctagagcagccactaaaaggatagaaaaaaagcttacaattttaaaactagtagagagaaaaaaacaatgacacaattgtgtcagtttcctagggttgccataacaaattgtcacaacctaggtggctttttaagaaattactctatttcagaggtgagaagtccaaaattaaggcatcagcaggactgtgctctgtccaaagactctgcaggaggatcttctcttgcctcatccagcttcaggtagaaagcaatccttgggttttttgtttgtttgcttttggttttgatagaaatggagtttcactgtattttttgcccaggctggtctcaaactcctgggctcaagcaatcatcccacctcagcctcccaaagtactgggattacaggtatgaggcaccatgcctggccaatccttggtatttattgatttgtggccacataactcccttctctgcctccgtcttcatacagctgccttccatctgtgtgtgtttctgcatctgtgtctcttctcttcttataaggatattagttatattggaattagggcccaccctaatccactataactgcattttaaatagttgcatctgcaaaaatctcatttccaaataaggtcacattcacaggtaccttggattaggactttaacataccactttagggaacacagttcaactcacaatagcaatcatcagtcttggtcttgaattatgtctatattcatacagaatgctcagcaatgctatgatctgaacatttatgtcctctcaaattcatatgtaggtttgttaatatcctgtttagaattgttgcatatacagtcatgagggtggttggcttataattatcttttcttgtgatactcttgtgagattttcatatcaaggttatgctggatacattgttagaggagcagcccacaagaccaccctcacttctgacaccgattgcaaggttggggtcccccaatatcctcctcctctctgacattaattgtcagcttggggggaccccaagaccacccgtgagtttaataattcacaagacaaactcacagtgctcatggaaagttacggtttattgcagctaagaatacaggttaaaatcagccaagggaaggggtacatagggcagagttcaggaaagctctaaacacagaactcccagttgtcctttccatgagttgtggacagtgttaatttcctgacatccagtgtgtgataatactcgcagaatattgtcaaccagggaagcttactcaggccagtttattaggctcaatcacataaatctggtcagctgccctcagtctcctagcccttgcaaagtttgagctgataccactgttctggtgtggggttttcatgaggttgcagtcacatggtggctggggttgggataatctttaagactctttctctaacatgtccgatccctgggtgggcagactgaaacagctacagaaagaagcatatatggcttcttgggcatctttctacttctatatgatcttttcacatggtctctccagcatagcagcttcaggatagtggacttctcacttaataaatcaggatccgaaggcacaagtcctaagaaagagaaagccaggaagaagctgtatcattttttaggatgcagtctcagaggtcacacttctgccatattcttttcatgaaaacttagtcactaagcccgcccaaatttggtggggtggggggaattaccaaagaattggcaggctatatgcagaatatgccatatcagtgaattttctatgtcagaatgatctttccaaggtgaaaaacaatactgggtcagggttggtctctggattttgaaagcaacacatataacatgtgagcctgctgctttcatctaggccaattttaagtggggcacaaagcaagaaaagcctccacggcaagtctaggctttgatgaaaattttccttccacgtggaccttatggttgagcataccatataagattgctagttggaaaaggtattttagctctccctttcccctccccctcccccctccctctcactctccttctcccgctttctgctcggtctccctctccctctgtccttctccggctttccacggtctccctctgttgccgaagctggactgtaccgccatgatctccgctcgctgcaacctccctgcctttttctcctgcctcagcctgcccagtgcctgggattgcgggcgcgcgccgccaggcctgactggtttttgtattttttggtggagatggggtttcgccctgttggacgggctggtctccagctcttgaccgtgagtgatctgcccgcctcagcctcccgaggtgctgggactgcagacggagtctcgctcactcagtgctcagtgttgcccaggctggagtgcagtggggtgatctcggctcgctacaacctccacctcccagccgcctgcctcggcctcccaaagtgccgagattgcagcctctgcccggccgccaccctgtctgagaggtgaggagcgtctctgcctggctgcccatcgtctgggatgtgaggagcccctctgcccagccgcccagtctgggaagtgaggagcctctctgcccggccgcccatcgtctgggatgtggggagcgcctctgcccggctgcgaccccgtctgggaactgaggagcctctctgcccggctgccaccctgtctgggaggtgaggagcgtctctgcccggccgccccatctgagaggtgaggagcccctctgcccggcagccgccccgtctggaaagtgagaagccccctccgcccggcagccactccgtccgggaggtggggggcagcccccgcccagccagccaccccatccgggaggtggggtcagcccccgccctgccagccgccccgtccgggaggtggggggcagcccctgcccggccagccgccccgtccgggaggtggggggtgcctccgcccagccgccgccctgtgtggaaggtgggggggcgcctctgcccggccgccccgtctaggaagtgaggagcccctctgccccgccgccaccccgtctgggaggtgtgcccaacagctcattgagagcgggccatgatgatgatgacggttttgtggaatagagagggggaaatgtggggaaaggagagagagatcagattgttactgcgtctgtgtggagggaggtggacgtgggagactccagtttgttctgtactaagaaaaattactctgccttgggatgctgttaatctataaccttacccccaaccccgtgctctctgaaacatgtgctgtgtccactcagggttaaatggattaagggcggtgcaagatgtgctttgttaaacagatgcttgaaggcagcatgctcgttaagagtcatcaccactccctaatctcaagtacccagggacacaaacactgtggaaggctgcagggtcctctgcctaggaaaaccagagacctttgttcacatgtttatctgctgaccttccctccactattgtcctatgaccctgccaaatcctcctctccgagaaacacccaagaatgataaataaatactaaaaaaaaaaattaaaaaaagaataccacagggaaaaggtattgtatggagtctctgacaagccccaataggagaaccacaccactcacctctagggttttagagtaagactgtttctgtttggtcttctgccaattattctccatttgaacagctcctgccttgctgctgggtgctggagaggctaaatgtatgactaaggagcatcaagtgactaccaaacccaaactccccatcaagcactgggtacgaactgtgagtaaaaacttcctggccaggggcagtggctcatgcctgtaatcccagcactttgggaggccaaggcgggtggatcacctgaggtcaggagttcgagaccagccatggtcaacatggtgaaaccccttctctactaaaaatacaaaaaattagccaggcgtggtggtggcgcatgcctataatcccagaatcccagctactcaggaggctgaggcaggagaatcacttgagcctgggaggcagaggttagagcaaagttccatttctaaacaaaaaaaaaacaaaaaacttccttcatgacagtcatttttgtgtctgtatgccttaccatacccaaaacaaattccaggtacccttaaaacacaatgtgaccaacagacttcctcccctcaaagaaggtgatcaaaacaagagctgcatttatatatgtatataatatatatatgcatttatatattatatatattatatatttatatttatatataatattatatgtatatataatataataatatataataatataaatatatatttacatatattatatatttatatatacatttatagaattatatgtaatatttatatataatatatatttatatatgtacatatatattgtatatatatgctatatatatatatatatatttattttttttttttttttttttttttttgtagagactggatttcgccatgtcgctggtgctggtcttgaacttcctggactcaagcaatccacctgcctcagcctcccaaagtgctaggattggccaggcgcaggggctaacacctgtaatcccagcactttgggaggccgaggctgggggataacttcaggtcaggagttcaagaccagtctggccaacatagcaaaatcctgtatctactaaaaatacaaaaactagtcaagcatggtggcaggcacctataatcccagctactcgggaggctgaggcaggaggatcgcttgaacccaggaggcagaggttgcagtgagccaagatggcaccactgcactctagcctggacaacagagtgagactccatatcaaaacaaaacaaaaaaaaaaatgattcttcctgcagcacgtatgtgctgtcgctacagagcagcgccatggcagactcagaagcactgagcttcgaacacatagggccttgatccctggctcctgcaggctgtcaacaacttgggctgctcgtgacctacggtgatccaggaaaaggctatcccattggccctagaggggaaggacctcctggctcaggctggcaggggctccaagaagacagctgcttatgctattctgatgctgcagctgttgctccacaggacggcgacaggtccagtagtagaacacgcagtgagaggccttgttcttgctcctaccaaagagctggcacagcaggcacagtccatgattcagtggctagctacctactgtgctcgggatgtccgagtggccaatgcctcagctgctgaagattcagcctttcagagagctgtgctgatggagaagccagatgtggtagtggggaccccatctcrcatattaagccacttgcagcaagacagcttgaaactccgtgactccctggagcttctggtggtggacaaggctgatcttttttccttggctttgaggaagaactcaagagtctcctctgtcacttgccccggatttaccaggcttttctcatgtcagctattgttttttagttccttcttcttcctcttcctcttcctcttttcttcttcttcttctttttttttttattattttttttttattgatcattcttgggtgtttctcagagagggggatttggcagggtcataggacaatagtggagggaaggtcagcaggtaaacaagtgaacaaaggtctctggctttcctaggcagaggaccctgcagccttccacagtgtttgtgtccctgggtacttgagattagggagtggtgatgactcttaatgagcatgccgccttcaagcatctgtttracaaagcacatcttgcaccgcccttaatccatttaaccctgagtggacacagcacatgtttcagagagcacagggttgggggtaaggtcatagatcaacagcatcccaaggcagaagaatttttcttagtacagaacaaaatkaagtctcccatgtctactcctttctacacagacacagcaacaatctgatttctctatcttttccccacctttcccccttttctattccacaaaactgccatcgtcatcatggcccgttctcaatgagctgttgggtacacctcccagacggggtggtggccaggcagaggggctcctcacttcccagaaggggcggccgggcrgaggcaccccccacctccctcccagagggggcggctggccgggcgggggctgaccccccacctccctcccggatggggaggctggccgggcgggggctgacccccacctccctcccggccggggaggctggccaggcgggtgctgccccccacctccctcccggatcgggcggctggccggcagggggctaacatttaagtctttaatccatcttaaattaatttttgtacaaggtgtyaggaagggatccagtttcagctttctacatatggttagccatatgtagaaatggccatctacaattggccagcaccatttattaaacagggaatcctttccccatttgttatttttgtcaggtttgtcaaagatcagatggttgtagatgtgtgatgttatttctgagggctctgttctgttccattggtctatatctctgttttgatacaagtaccatgctgttttggttactgtagccttgtagtatagtttgaagtcaggtagtgtgatacctccagctttgttctttttgtttaggattgtcttggcaatgcgggcttttttttggttccatatgaactttaaagtagtttttctaattctgtgaagaaagcctttggtagcttgatggggatggcactgaatctataaataaccttgggcagtatggccatgttcacgatattgattcttcctatccatgagcatggaatgttcttccatttgtttgtgtcctcttttatttcattgagcagtggtttgtagttctccttgaagaggtccttcacatcccttgtaagttggactcctaggtattttattctctttgtagcaattgtgaatggcgttcactcatgatttggctctctgtctttgtctgttattggtgtataggaatgcttgtgatttttgcacattgatgttgtatcctgagactttgctgaagttgcttatcagcttaaggagattttgggctgagatgatggggttttctaaatatacaatcatgtcatctgtaaacagggacaatttgacttcctcttttcctaattgaatgccctttatttctttctcctgcctgattgccctgcccagaacttccaacactgtgttgaataggagtggtgagagagggcatccctgtcttgtgccagttttcaaagggaatgcttccagtttttgcccattcagtatgatattggctgtgggtttgtcataagtagctcttactattttgagatatgtcccatcaatacctagttgattgagagtttttagcatgaaggctgttgaattttgtcaaaggccttttctgcatctattgagataatcatgtggtttttgtctttggttctgtttttgtgatggatttcgtttattgattcatgcatgttgaaccagccttgcatcccagggataatgccaacttaatcttgatggataaggtttttgatgtgctgctggattgggtttgccagtattttagtgaggatttttgcatcaatgttcatcagggatattggtctaaaattctgtttttttgttgtgtctctgtcaggctttggtatcaggatgatgctggcctcataaaatgagttagggaggattccctgcttttcatttattggaatagtttcagaaggaatggtaccagctcctctttgtacctctggtagaattcagctgtgaatttgcctggtcctggactttttttggttggtaggctattaattattgtctcagtttcagagcctgttattggtctattcagagattcaacttcttcctggtttagtcttgggagggtgtatgtgtccaggaatgtatccatttcttctagattttctagtttatttgcatagaggtgtttatagtattctctgatggtagtttgtatttctgtgggatcagtggtgatatcgcctttatcatgttttattgcatctatttggttcttctctcttttcttctttattagtcttgctagtggtctatcaattttgttgatcttttmaaaaaaccagctcctggattcattgatgttttcaagggtttttggtgtctccatctacttcagttctgctctgagcttagttatttcttgccttctgctagcttttgaatttgtttgctcttgcttctctagttcttttaattgtgatgttagggtgtcaaytttagatctttcctgctttcttttgtgggcatttagtgctatacatttccctccacacactgcctttaaatgtgtcccagagattctggtatgttgtgtctttgttctcattggtttcaaagaacatctttatttctgccttcgttgtgtacccagtagtctttcaggagcaggttattcagtttccatgtagttgtgcagttttcagtgagtttcttagtcctgagttctaatttgattgcactgtggtctgagagacagtttgttatgatttctgttcttttacatttgctgaggagtgctttacttccaactatgtggtcaattttggaataagtgcaatgtggaactgagaagaatgtatattctgttgatttgaggtggagagttctgtagatgtctattaagtcagcttggtgcagagctgacttcaagtcccagatatccttgttaaccttctgtctcgttgatctgtctaatattgacagtggggtgttaaagtctcccattattattgtgtgggagtctaagtctctttgtaggtctctgaggacttgctctgtgaatttgggtgctcctgtattgggtgcatgtatatttaggatagttagctcttcttgttgaattgatccctttacctttatgtaatggccttctttgtctcttttgatctttgttggtttaaagtctgttttatcagagactaggatagcaacccctgcttttttttgcttggtagatcttcctccatccctttattttgagcctatgtgcatctctgcatgtgagatgggtctcctgaatacagcacactgatgggtcttgactctttatccaatttgccagtctgtgtcttttaattggagcatttagcccatttaaatttaaggktaatattgttaatatttacatttaagtttaattatgtgtgaatttgatcctgtcattatgatgttagttggttattttgcttgttagttgatgcagtttcttcctagcatcgctggtctttacaatttggcatgtttttgcagtgcctggtaccggttgttcctgtccatgtttagtgcttccttcaggaactcttgtaaggcaggcctggtggtgacaaaatctctcagcatttgcttgtctgtaaaggattttatttctccttcacttatgaagcttagtttggctggatatgaaattctgggttgaaaattcttttctttaagaatgttgaatattggcccccactctcttctggcttatagagtttcttctgagagatatgctgttagtctgatgagcttccctttgtgggtaacctgacctctctctctggctgcccttaatattttttccttcatttcaactttggtgaatttgacaattatgtgtcagattcaccaagatactactcttctcgaggagtatctttgtggtgttctctatgtttcctgaatttgaatgttggcctgccttgctaggttggggaagttctcctggataatatcctgaagcatgttttccaacttggttccattctccccatcactttcagatacaccaatcaaacgtagatttggtcttttcacatagtcccatatttctcggaggtgttgttcatttctttttactcttttttctctaaacttctcttctcagttcatttcattaatttgatcttcaatcactgataccctttcttctgcttgattgaattggctactgaagcttgtactgaaacttgtacatgcgtcacatagttctcgtgccatggttttcagctccatcgggtgatttaaggtcttctctacactgttgattctagtttgccattcgcctaatcctttttcaaggtttttagcttccttgcgatatgtttgaacatcctcctttagctcagagaagtttgttattatgaccttctgaagcctacttctgtcaacttgtcaaaatcattctacatccagctttgttccattgctggcgaggaactgcaatcctttggaggagaacaggctgtctggtttttagaattttcagcttttctgctctgatttctccccatctttgtggttttatctacctttggtctttgatgatggtgaagtacagatagggttttggcatggatgtcytttttgttgatgttgatgctattcctttctgtttgttagttttcctcctaacagtcaagtccctcagctgcaggtctgttggagtttgctggaggtccactctagacctgtttgcctgggtatcgccagcagaggctgcagaatagcaaatatcgcagaacagcaaacattgctgcctgatccttcctctggaagcttcgtctcagaggggcacccagctgtatgaggtgtcagttggcccctactgggagatgtctcccagttagactacataggggtcagggacccacttgagggggcagtytgtccattctcagagctcaaacactgtgctgggagaaccactgctctcttcagagctgtcagacagggatgtttaagtctgcagaagtttctgctgccttttgttcagttatgccctgcccctagaggtggagtctacagaggcaggcaggcctccttgagctgcggtgggctccacccagttcaagcttccaggccactttgtttacctactcaagcctcagcaatggcagacgtcccctcccccagccaggctgccacctcgcagctcaatcttgtactgctgtgctagcagtgagcaaggctctgtgggcgtgagacccactgagccaggtgcaggatataatctcctggtgtgccatttgctaagaccattggaaaagcacagtatttgggtgacagtgtcctgattttccagctacagtctgtcacagcttcccttggctaggaaagggaaatcccccaaccccttgtgctttccaggtgaggtgatgccccaccctgcttcagctcaccctccgtgggctgcacccactgtccaaccagtcccaatgtgatgaaccaggtacctcagttggaaatgcagaaatcatccgtcttctgcattgatcacgttgggaactgcagaccagagctgttcctatttggccatcttggaacccttcccaatatttagtattttaaatatttagtttcttgttagctggtcttcagttgacttggttctctatccagttacagccatggtgcatgttgcatgcagtcgtctatacattatttaaaygggcttaaatattaaatgtgttacccaccaataataaaatagacccttatgaaaactataaaaacaaaacacacaaaaaaagccattgggtacatttgttcaaatctttttttttttcgagatggaatttcactatttgttgccctggctggagtgcagtggcacaatctcagctcactgcaacctccgcctctcaggttcaagcaattctcctgtctcagcctccccagtagctggaattacaggcacctgccatcacacccagctaatttttaatatttttagtagagatggggtttcaccagttggccaggctggtctcgaactcctgacctcaggtgatccgctccccttggcctcccaaagtactgggattacaggcgtgagccaccatgcctggccttaaatctctttttttaaatgctcttgggcttggcacggtggctcagccctgtaatcccagcactttgggaggctgaggcaggcaaatcacgaggtcaggagatcaagaccatcctggctaacacagtgaaaccctgtctctaccaaaaatacaaaaaattagccgggcatggtcgtgggtgcctgtagtcccagctacttgggaggctgaggcaggggaatggcatgaacctgggaggcagaggttgcagtgagccaagatcttgccactgtactccagcctgagcgacagagcaagactccatctcaaaaaaaaaaaaaaaaagttctttattgccttcagctgtcagggcttcatgacttccattctatagaatttaaacaaaatcctctgtttctcaatggcagcacagctggcatttgagatcagaccattctttgtcatggagcagggatgtcctgtgcagtgtaaggtgtttcacagcatctccagcctctattcactagatgtcagtagcgctcctgccaggccttccaccaccactcattgcggtgtctccagacattgccaaatgttccctagatgtagggttgccaggtaaaatattgcatgggacaaacatactaaaaatattatcgattgtttatctgaaatgcaaatttaagttggccttccatatctttatttgctaaatctggcaaccctatctgagaggtgaaaaaccctatctgagaggtaaaatcaccactacatctcctacctcccatcccatttgaaaaccaatgctctagtccacagggagcaatggagaaaaagtgtggkaatgggtttgggaaatgttatgattagatttgcatttggagcaaagcactttttgtttgtttgttttgtgttgtgttgttttgtttgagacgcagtctcactctgttgcccaggctggagtgcagtggcaygatctcagctcactgcaacctccgcctcyggggttcaagtgattctcctacctcagcctcccgagtagctgggatgacaggcacccaccaccacacccagctaatttttgtatttttagtacagacggggtttcaccatgttggccaggatgttctcgatctcttgacctcgtgatccacccgcctcgacctcccaaagtgctgggattacaggcatgagccaccgcacccagcctggagcaaaaaaactataagacgtccaagccctcttcaccagccaggactgctgtagtcaacatcctgtttgagacctgattggaatgcctggctctctttttttttttttttttttttgagatgtagtctcgctctgtcacccaggctggagtgcagtggtgcaatcttggctcactgcaacccccacctmctgggttcaagcgattctcctgcctcagcctcctgagtacctgggactacaggtgcacaccaccacacctggctaatttttgtatttgtagtagagatggagtttcaccatattggctagtctggtctcaaactcctgaccttgtgattcgcctgcctcggcctcccaaagtgctgggattacaggtgtgagccaccacacctggccatctctcctttttagtaagcaactagagttgggattccagatgtggccaggcacatgcacctctggagagactaccctgtctgctaaagctggaagaataaaagaaatgggtgattgtgctatctcctgtttctcttctttaatatgtttatattgaaggcttaatttaattagctaataaaggtgcattaggaagaactaacatgaaatattttctcttgtccttaaatccagttcagggatctcctaaaaacaggaacatacttgtgttctgggacagatgagacttgaaattccaaacccagaatgtctttgtctttatttttcttttcttttctttttttttttttttttttgggtaaagttttgctctgtcacccagggtggagtrcaatggcgagatcttggctcactgcaacctctgcctccctggctcaagccaaccttccacctcagcctcctgaggagctgggactacaggcacgcattacttcctagctaatttttgtacttcttgtaaagatgaagttttgccatgttgcccaagctggtctcaaactcctgacctcaggcaatccacctgcctcggcctcccaaagtgctgggattacaggcatgagccaccatccctggcccagaatgtctttttatttttcaatttttttatatctttttgctaatcttctctgtattgttccaattttagtatatgtgttgctgaagtgaacatttatttttattcaatgggttcttcctagccactgtgcaagcccagaatatgtgaggtggaattcaccagaaccataggtattcttttaaaatatccctcaacacatcagccaatttataaaaagaattcaaagaaacatagagttgcaaattgatgtgatttagtctcctctcctccttgttagaattccagtttttccgtctccaaatagccggggttggaagatgggttctcgccctgacaccgcagagctctgtctcatctatagaacaagagtacagccgcctccgttatctcccgactgcagctgctcttaacgtgagttccatatccatcccagtcaaaggcggagaagtccccacactgacggggtttgccctgtgggaagaaccctcctccaccgatgcagtgctgggaaacagaaagaagaaacactgtgaggaatttgatttgctgctgacaccagtgagcgcaaggctggtctcgaactccagacctcaagttatccgcctgcctcggcctcccaaagtgctaggattacaggtgtgagctaccacacctggccctmtgcatgtattttaaagtagtaatgcatgcaggaacatacacaaacacgcactaatggacagtctgaggagcacagagccagtagagaaacttgtcaaggaaaagggcataaagacatatactctagtccacccccactgcccacgtggtcgtcatcctccgaattctaatctgcgagtccctccatgagagaatagctgcctcatcttagctggaaaatgaaaaagctgaaagctggggcagggaagatggaaccgtgagttcagactgtcagttggggagggaagggggccctaagtgaatgcccttgttcttgatggctctgacgctctcttcctccaacccctaggcacaggatgtccctcaaatacaatctcccaccactacaactgtggtgctgtctcctacaagactggaaaaacaataaaaatataaagcttctaaaagttaagattaatattggagaatattttcacgacctcggtgtaaggaggtacatcttaaagaaaacattaaaagtactaaccataaatgaaaagtttgataaactgaattccattaaaataaattatactcagccgggcacggtgactcatgcctgtaatcccagcactttgggatgccaaagtgggcagattgcctgaggtcaggagtttgagaacatggagaaacccatctctactaaacccatctctactaaaaatacaaaaaaattagccgggtgtggcartgcattcctgtaatcccagctactcaggaggctgaggcaggagaaacacttgaacccgggaggcagaggttgcagtgagcagagatcctgccattgcactctagcccaggcaacaagagtgaaactccctctcaaaaaataaataaataaatacataagatttaaaagacaaataaattatactcaacttctggcatctactactccaaactttgtaccacttaatttttattaaaaatatggactcttcaggctgggcgtggtggctcacgccagtaatcccagcactttgggaggccgagacgggcggatcacgaggtcaggagatcaagaccatcctggctaacatagtgaaaccccgtctctactaaaaatacaaaaaaaattagtggggcgtggtggtgggcccctgtagtcccagcaactcgggaggctgaggcaggagaatggcatgaacccgggaggtggagcttgcagtaagctgagatcgcgccactgcactccagcctkggtgacagagcgagactctgtctcaaagaaaaaaaaaaagaaagaaaaggactcttcaaagaaaaaaaaagaaataaaaaataaattatattcataagacatcatcaggagagtaatgagagtaaacagaatgagagtaagcgagtaaccacagagacacacattgatacaccccacacaggtacacacatgtgcatacccatgcacacacatggtgaagggggccagcccctccacatctgtgggtatttctcgtcaggtgggatgagagactgagaaaagaaataagacacagagacaaagtatagagaaagaacagtgggaccaggggaccagcactcagtatacggaggacctgctccggtgccagcctctgagttccctcagtatttattgatcattatttttactatcttagtgaggggagtgtagcagggcaacaggtaaggagaaggtcagcagggaaacatgtgagcaaaggaatctgtatcatgaataagttcaaggaaaggtactgtgcccggatgtgcacataggctagatttatgtttctctttacccaaacatctcagtgtagcaaagagtatcagagcagtattgctgccagcatatctcgcctccagccacagggcggttttctcctatctcagaatagaatgaatgggagtggtcagctttacacccagacattccattcccagggatgagcaggagacagaagccttcctcttacctcaactgcaaagaagccttcctctttcactactcctcctcagcacagaccctttacgggtgtcaggctgggggatggtaaggtctttcctytcccatgaggccatatctcaggctgtctcagtgggggaaaaccttggacaatacccaggctttcttgggcagaggtccctgcggctttccgcagtgcattgtgtccctggtttatcaagaatggagaatggcgatgacttttaccaagcatactgcctgcaaacatattgttaacaaggcacatcctgcacagccctaaatccattaaactttgattcattacagcacatgtttctgtgagcacagagttggggctaaagttacaggttaacagcatctcaaagcagaaacaatttttcttagtacagattaaaatggagtttcttatgtcttccttttctacatagacacagtaacaatctgatctctctttcttttccccacacgtgggccattgatctccccaaaaactcacatgctcagtgttacagccagtaacttttatcccagcacaaagggcgttggctgctctctcgttattaaacacccggaactgaacgaatcctgcaacaaattcccctgaaaaagaagaggtgaagaaacagccaagtagtcaaaggatgaactagaagcagcatcccattggccagtccagggaytccctaagccaaaagctgaggctacagccaaacaccccaggctgtaggggtgcagcccagtacctttatggccagtggctggtgcacgtcagtcctaaacttgtccccaaggaaacctctgttcatagggggcaagaggacaaaggctgggactcacaaaaggacccaggtctgcttacagcttacaggagaaactagactctacaaaaagattaccaaaaagatctgagaaggcccagcaggaataagcaatgatcagatgtggctgcctattgctgtttacacacttctcatccaattaccatgggttagtttccctgaccatcacctgctttcatcaaaatatcaaaggcaaacagtgatgtctttgatttttttatccacaacttaacttctgtgctcttattatactgaaaactgtcttttgtaagataattaaagttatccttcataacaaaagtaaatctctctcaccactctgctagtggttctttcctgtgaacctcagtgtgcacttttttttttttttttttgacagggtttcgctcttgttgcccaggctggagtgcagtggtgtgaactcagctcaccgcaacctccgcctcccaggttcaagcgattctcctgcctcagcctcccgaggarctgggattacaggcatgcgccatcatgcccagctaatgttttgtatgcaccttttcttaactattattgaaggggtggcctgcccctccacacctgtgggtgttcctcgttgggtggaacgagagactgagaaaagaaagagacacagcgacaaagtatagagaaagaaaagtgggcccaggggactggcgctcagcataaggaggacccgcaccagcaccagtctctgagttccctcagtatttattgatcattatctctaccatctcagagagggggacgtggcaggacaatagggtaatagtggggagagggtcagcaggaaaacatgtgaacaaatgtctgtgtcataaacaaggttaagaaaaggtgctgtgcttttgacgtgcacatacataaacatctcggtgcattaaaaagcagtattgccgccagcatgtctcacctccagccctaaggtggttttctcctatctcagtaaatagaacatacaatcgggttttacaccaaaacattccattgcccagggataagcagaagacagatgccttcctcttatctcaactgcaaagaggccttcctcttttactaatcctcctcagcacagaccctttgtgggtgtcrggctgggggacagtcaggtctttcccttcccacgaggccatatctcaggctatcacatggggagaaaccttggacaatacctggctttcctagacagaggtccctgcggccttccgcagtgtattgtgtccctgggtacttgagattagagagtggtgatgacctttaacaagyatgctgccttcaagcacttgtttaacaaagcacatcctgcacagccctaaatccattaaaccgtgagtcaacacagcacatgtctctgtgagcacagggttgggggtagggttacagattaacagcatctcaaggcagaagaatttttctyagcacagaccaaaatggagtctcttatgtctacttctttctacatagacacagtaacagtctgatctctttttcttttccccacaattataagagtatacaaggtggtgatgaagaaacctgggattacgtgctgtgaaatggggataacagcaattctaacttcatagttttctcatggtaattaaatgacacaaaatcatgttaagttccaagacaagagtctggtgcattttaagtgctcagtaaatactagcaattattaattgttgttatttgccaccattctccaagagtacaagaaaatatttatgactggacttagggagcaaacactcacgttgaccatacggtgagtaataagatgcagtcttcttagcatcaccaaagtcatagaccacaggtatggctgggccattgtcattccaacatttccctgatctgtatttcactgggtatttctgcagagacccagaagaaaggttttgtgaggacagtagagatgctgccacagtgtggggggaggaggggtttcaaattaactgccattacccaaaaccaatcctcataatagtgactgcttttccccatagctgtgtctccccaacagccccaaaccccttgtccctgtctctttctccccatgctttcctgtcccacaggcctcttccttgcyggcttagagtttctgagagrccagacatgagttcacagtgaatcaaaggaaggagaaacagccaaccactcagtagtgatgtggaaccacaggacagatctgccccctaccctagacacttcgatctctgttcaccaaagaaagtgccccccagccagcagccctgtgtacctggtagatgccaaacagattatgtcccagtctctggaggaagccagtgttggtgcggtacctcagcagggcgctgtttctccaatgctgcatgggggacttgttgggcacatgccagatgcccaggtccttggcctggatgtcgtagtagccagggttctggaaagcaacagacactgagcctgactgggccaggaggtaccaggaggcagaaggtccacatgtgcagcctcagctgggctgagagctctgggatcagtaggcagatggccagccacgctcagacaccccactcccagctgatgatcccaccaccacccagggccctaacagccttgttgagaggaagttgtgattcaagtcctgtatttctctcttcttctccagcccttccccatatccccaccttccagccctccctcctgcaggctggtggccagccacactccacacctcaccctcacccragtrggagagaagtggcaccaaccttgtagtcatcgctcgtggccgcctctgcagatccaaaggtgttgtagttggcccagttgccatccccctctgggtagtctgctttgttgccctgctgactggaccagcgatcacccaccgtgcacttcccaygcatgtcattctcgtgcacgctggccaccagggtccagccgccacccccagaagtcatgtcacagaaggtctggtagacaacaccattcttggtgcggagaaaatacaggccatctgtagagagaaccagcccagagcctccctgtctgagagctcagggttcatctcagctccgtgaatagaaaagccctaggaagtcaaaagcacactcagaagactycaacacatacttgctggaagaygatgctccaygcatcttgtgtkctgctcacctatgagcagaggcactgactgtcttggcttcacactatcttttcaaagagtttgtagagcaaatagtcttagaagagacagagatggtatctccctctcgacagtgccaccctgtggccasgagaggccagaaatcagcacacgccacatctgattctacagcaggatagggcctctgtgcagctcagagcaaaggttgtgcccacttcataagattcagcttccctaagctcagagttcccctcctgttcacaagcttgcaggagactggctccacggtggcatcctggtgaccttgcacatttgcgcataggccacatagggacagctgacctaagtcttggcagaaagcctgtggtcttccccaaacatggaaagatgggaaccttgtgaggagctgcaacaaggtcacttctcaccccccttcccatctttcgtggaggctgtcatgagacagctgtcataactgtgtcatcatctcctgggttctgaagaggtatgaggctttttgcctcactcacccccaccccgtagggtacacaggctatgaaacagctatggcagcatggactggctcctcagccactgcccatgttgtgttgtcactcgccctcttttctgtgctgtcttgtggggcaagggatgggaaaagctgacacttttgccgatcttgaacttgctagctatgtgagtaataaactctctggctctaaaaagggtttgttgtttccttgccagccacatttgtcagccagcttgacaaacccactacttgggcagatgtcacctggcccagtacaagaaaatgctgatgctctggctactgctatttctgtgattaataaagctctttgtctctggctcgggagtttcaggttttctgccagcatctataaacctggggcaagtaggggcaaatctcagacgcatcacagttcttgccaccaccataagcgtcaccaggaacactgcattctctctgtgttcagaagactttgtgactggaatgggacacaaaagcctcaaaattcccactagaaacctccttgagtaggagctgggggcagaacaggctccatatggatatgtccctcctgatttccatgactgggctctgttgagctaaaaagtggcttcaaagagagaatgctgagttggttcattactcaccacctgcactatggcagcgttccttgatttctttgcagcttctaggcagggaagaaaaggagaaggcacaggtttcgaattccctcgagagcatctcaagagaagaggctgctgctagaaaatgtgagaatgagtctcattagaagtctgaccactgaggccatctttcctggccaatctctgcccctgtatcaactcatcactctgctctgaagtcccaggaggtcagggattccctatgctaagacggtctgatccaacagctggtataggttaaacacctggaatcttccactcgactaattttaattaaatacctactgtgtgaactacctagacaccggacaaagacaatttgacacatttcttcaagagactacattctacaaggaaggagcacatggaaagggacccaactgagatgggagggcaaacccactaacgggggtgaggcctgggaactgctggggaagggaccagctgtaactcagagcaggctgattttgatgggagaatgggagctggctacaggacaggaaggaaaggggagagtacaccccaggaagagaagaaagcacatgagatggcctgaagcaataacagagcccagcccagcccagcctgccaaaaactacaggtcagtcgcttattgtggctggaacatatgttgtaatacaaagaagtctggaaaccaaagctgaaaaattaacagaggccagtggatgaagggccatgtatataagtctaaaagcctagaaatcattccaaaagcctggcagagcgggaaaaagtgtaaaattacaggactcaggccaggcacagtggctcatgccggtaatcccagcactttcggaggccgaggagggtggatcacaagatcaggagttcaagaacagcctggtcaatatggtgaaaccccatctctactaaaaatacaaaaattagctggggtgtggtggtgcacacctgtaatcccagctactggggaggctgaggcaggagaagctctttaacccaggagacggaggttgcagtgagccgacatcacgccaccgcactccaacctgggcaacagagcaagactccgtctaaaaaaaaaaaaattacaggactcaaggtaaaatccagacaaaccctgatgacagtgcctccttgagcagacacttaacatctctgatcctttttcttcatctttaagatgtcattaataacttctttatacgcatggagatcaaatgagatgacatatgtaaatgtgctttttttaactgatggattgaaataaacaataaacccagtatcaatgaaaaaatatcactattgtgcctactggaagaatagaattgtgaggattctattctcacaatatcctcctctgcgactagaggagggtgtaccctggacacagcactgatcacccagctgcctctggagatcccaaggccaaggccacaagagcagctgagcagggacacagttcttactctctcaccccatgaacccctcacagccacagaagcagagaatcaagccctaggaaatacctgagctaacaccctgactgcttcagaccagaccccaggagaggccagaaatcagcacccagtccacacctcaagttggctgcctagcctgggttccctgcctctccagaacttcccctttgacccttgacttcagagccctgcccagctctactccctccaggccctgcacagcagaggggagcccaggaaactgcagctcctactctcagaagccatttacctgcactgcacccactggtggccacagagaagaataacaggaagcagagtctggtcattgtcctctaaggaaaaacaagatgcacaaggtcactggctggcccttcctttgtcatcctctcgttcttacttcctaacctttctgagtcaggaatcctcaaatggaaagtgatgggctcatgagcattctaaaacctcctggaatatgccccacggctgtccaacactacaaatacccaaggggccatgggctcatttccctgaaactctaaatctctaaaactgagacctgagctggcatcattgctcccacacacatggatcaaaaacatttttctcaccagcatggacagcatccttacagatgccaggagctgatagttcccttcctgtggacactcggagctcccctgcagaggatcctgatgaagggtgaagtgctggtccctttatgtggagagctgtggagagccaaaccacctgagccctgcccagcccaaccctgagcagcctaggctgctagcccctccctctgaagcccttccctctgagggtacctgagcctgggaccgtggaaatgagaaaggacgtgcgactggctggaggagcagggagctgtgttcctggccacacaggtgactgtcgccatctgaggaggggcatcctgctttgccaaggcaggccatacaatgtagcagtatctaatcagattcgtggataggtcacaatcctcccctgcgttctccctctcccacctcccccagatgccctggccccctagacacaactctgtcaagaaatcatccttttagactgaggtgacacctcatgaaaaataaattaattaattaagaataataattggccaggcacagtggctcacacctataatcatagcgctttgggaggccgaggtgggcggattacctgaggtcaggagttcaagaccagccaacatggtgcaaccctgtctctactaaaaatacaaaaatttagctgggtgcagtggcgtgcacccgtaatcccagctactctggaggctgagacaggagaactgcttgaacccaggaggtggaggttgcagtgagccaagactgctccactgcactccagcctgggcaacagagcaagacttcacctcaaaataataataataataataataataaataaatgggaaaagaagacatcatccttccaatctttcctccaatttctctatgaggccttccctgacacccccatcaccagacaaagctgatggatccttcctttgtcccactatacactgtccaaacactaattattgcatgtatcctgctgtaattttattgttttattaactctgtttagaaacaatttgaaatttattaaatgttgcaaaaataacaataatataaagccacatatatgccctttacctagattcaactattgttaatatttcaccccatttgctttatctttcgtgttctctctctctctctatatatatatagatatatgtatataaaatacacccacacacacaaaatttttttctgaaccatttgaaggtaaggtacatacatcatgggcttttacctttaaataaatgtgtatgggtttttttttattttgttttgttttttgacacagagcctcactctgtcacccaggttggagtgcaatggcatggtctcagcttactgcaacccccgcctcccaggttcaagtgattctcctgtctcagcctcccgagtaactgggattacaggcacccaccaccacgcccagctaatttttgtatttttagtagatacggggttttgccatcttggccaggctggtcttgaactcgtgacctcgtgatccacctgcctcggcctcccaagtgctgggattataggtgtaagccaccatgcctggccaactgtgtgttttctaataataggaatatgtcatgtataaccacagtacaattatcaacatcatattattaaaaactctttttttgggctgggcgcagtggctcacgcctgtaatcccagcactttgggaggccgaggtgggtggatcatctgaggtcaaaagatcgagaccagcctgaccaacatggagaaacccggtctctactaaaaatacaaaattagccggtcgtggtggtgcatgcctgtaatcccagctactcaggaggctgaggcaggagaatcacctgaatccaggaggcggaggttgcagtgagccgagatcacaccattgcactccagcctgggcaacaagagtgaaactccatctcaaaaaaaacaaaaaacaaaaaaaactcttttctgtagaaacggggtctccccatgttacccaggctactccagaactcctgaccttgatcctcctgcctcagcttgcccaagtgctaggattacgggcgtgaaccaccgagccagcctgttaactctttttaacataactgatacttccctagagtatcatcagcccaggggtcatggtgagttagcattaatgagacaggaatttctctggctttcatgccctcccattgtaaggagacttctggtccccttttaagtccataatcccaaggggcatcttgtgtgtgctaacaaacatttctccattccacacatactcccagcccaccctgacttctttcagcactgcctactgaaaccacagtaggcacacaccacagctgaacaccaaccgtatgatttggcatccctgctgcctctgatgctggatctggtgtcgggacaagctgctggtgtttaaggcactgcttcctctcactcccaggcctccggcacatctcttgctattcaaggcatggaagtcatccacctcatagggtgctggagaagggaaacgcctcactgctcccatgatgggcaccagaccaggacatgtctccaggtgtctcagtgacctcagtgacactgttctttcagtgtctcttgcagtctgtctctctcttggactcagacaggaatctaaggagacgaggatagaggacaaacctggaagatgtcatactactctgatggacctttgtctctgaatactaagatactattattggaaagattttgtaagctccttctcctgaaacttttgaatttttttatttgagtatttatataggtatttgcttaatacctgtctccttctttatagagacagaatctatgtctgtggttgtccaccagatgtccaggcctatgcacaatgcctggcacacagtgggccttcaatatgcattagttgaatgaaagaaattgactccaggtggtactaaaaaacacacatgaacgcttcctccaatccaaaaaaattttaggaatgaaaatggccaatgcaaaattttacagttttctcccctttgttgtaattactctaagccatgtttccaccatcaaatactcaataaaagttagaatgcatgcaacagcttggtgtttaccaatgctttggaggaaaaaaggaagagatgtggtgtcctgtttgggaaagaacaacaggacaaaggaaaccagacaaaaacaatggcagccccaaacagatggatgataaggaatagatgagagcccaggaactggctgaaatgcagaaacacacaggagaaaaataggtctccttggcactcttcagttgaattgggtaattttctacagtagatttttcccgcagtaccagaactactgggaatggcaatgaaaacgtagctggaagaaaggggacctgaggcttccattacatattcataaatgtttattatccacttagtacctttctttgtaaattctggattttttttttaagacaaagtctcactctgttgcccaagctggagtgcagtggcatgatcttggcttactgctacctccacctcccgagttcaaacgattctcctgcctcagcctcctgagt

SEQ ID NO: 97022 - DNA, 14583 bp, Homo sapiens
aatcgtacttctctgaagaaggtgaggaggaaggggacaagatgacatagagccattgaaacttttcatttttcttttctttttttaaaatttttttgaggcagaatctcactctgcccattctgtcggcgagacaggagtgcagtggtgtgatctcccctcacagcaacctctgcctcccaggctatagtgattctcctgcctcagcctcctgagtagctggaattataggcgtgcgccactaccacctggctaatttttgtatttttagtagagacagggtttcatcatgttgaccaggctagtcttaaactcctgacctcaaatgatatacctgccttggcctcccgaagtgctggaattacaagtgtgagccaccgagcccagcagacacttttcttttttctttttttttttttgagacagagtctcgcactgtcacccaggctggagtgcagtggcacaatctcagctcactgcaacctccacctcccgggttcaggtgattctcctgtctcagcctctcgagtacctgggattacaggtgcctgccaccacgcccggctaattttttgtatttttagtagagacagggtttcactatgttggccaggatgattgcgaactcctgacctcgtgatctgcccacatcggcctcccaaagtgctgggattacatgcgtgagccactgacacttttctttgccctttctttggaccctgacttctgcccatccctgacatttggttcctgttttaatgccctgtgaaataagatttcgccgcctatcatctgctaactgctacggactcaggctcagaaaggcctgcgcttcacccaggtgccagcctccacaggttccaacccaggagcccaagttccctttggccctgactcagacactattaggactggcaagtgataagcagagtcccatactctcctattgactcggactaccatatcttgatcatccttttctgtaggaatcggatataacatcatccgggtacccatggccagctgtgacttctccatccgcacctacacctatgcagacacccctgatgatttccagttgcacaacttcagcctcccagaggaagataccaagctcaaggtaggcattctagctttttcaggccctgagggccctgatgtctgggggttgagaaactgtagggtaggtctgcttgtacagacattttgtcccctgctgttttgtcctgggggtgggagggtgggggctaatggctgaaccggatgcactggttgggctagtatgtgttccaactctgggtgcttctctcttcactacctttgtctctagatacccctgattcaccgagccctgcagttggcccagcgtcccgtttcactccttgccagcccctggacatcacccacttggctcaagaccaatggagcggtgaatgggaaggggtcactcaagggacagcccggagacatctaccaccagacctgggccagatactttgtgaagtaagggatcagcaaggatgtgggatcaggactggcctcccatttagccatgctgatctgtgtcccaaccctcaacctagttccacttccagatctgcctgtcctcagctcacctttctaccttctgggcctttcagccttgggcctgtcaatcttgcccactccatcaggcttcctgttctctcggtctggcccactttctttttatttttcttcttttttttttttttgagaaggagtctctctctctgtcacccaggctggagtgctgtggcgccatcttcactcactgtaacctctgcctcctgagttcaagcaattctcctgcctcagccttccaagtagctgggattataggcgcctgccaccaggcccagctgatttttctatttttagtagagacggggtttcgccaggctgttctcgaactcctgaactcaagtgatccacctgcctcggcttcccaaagtgctgggattacaggtgtgagccaccacacccagctggtctggtccactttcttggccggatcattcatgacctttctcttgccaggttcctggatgcctatgctgagcacaagttacagttctgggcagtgacagctgaaaatgagccttctgctgggctgttgagtggataccccttccagtgcctgggcttcacccctgaacatcagcgagacttcattgcccgtgacctaggtcctaccctcgccaacagtactcaccacaatgtccgcctactcatgctggatgaccaacgcttgctgctgccccactgggcaaaggtggtaaggcctggacctccatggtgctccagtgaccttcaaatccagcatccaaatgactggctcccaaacttagagcgatttctctacccaactatggattcctagagcaccattcccctggacctccagggtgccatggatcccacagttgtcgcttgaaacctttctaggggctgggcgaggtggctcactcatgcaaacccagcactttgggaagccgaggcgggtgatcacctgaggtcaggagtttaagaccaccctggccaacgtgttgaaaccctgtgtctactaaaatacaaaaaaaaaaaattatctgggcatgatggtgggtgtctgtaatcccagctactcaggaggctgagaagggagaatcagttgaacccgggagatggtggttgcggtgagccgagatcgcgccactgcactccagcctgggaggctgagcgagactccatctcgaaacaaaacaaaacaaaactatctaggctgggggtggtggttcatgtatgtatgtgtatatacatatatatgtgtttatatgtatatatatatacacacacacacatacatacacacacatacacacacaaattagctgggtgtggcacccgtgtagtcccagctactcaggaggctaatgtgggaggatcagttgaccctaggaagtcaaggctgcagtgagtcgtgattgcgccactgtactccagcccgagtgacagagtgacatcctgtctcaaaaacaaaaaaaaatctccccaaacctctctagttgcattcttcccgtcacccaactccaggattcctacaacaggaactagaagttccagaagcctgtgtgcaaggtccaggatcagttgctcttcctttgcaggtactgacagacccagaagcagctaaatatgttcatggcattgctgtacattggtacctggactttctggctccagccaaagccaccctaggggagacacaccgcctgttccccaacaccatgctctttgcctcagaggcctgtgtgggctccaagttctgggagcagagtgtgcggctaggctcctgggatcgagggatgcagtacagccacagcatcatcacggtaagccaccccagtctcccttcctgcaaagcagacctcagacctcttactagtttcaccaaagactgacagaagcccttcctgtccagctttccccagctagcctgcccttttgagcaactctggggaaccatgattccctatcttccctttccttcacaggtctgcacacctcattgccccttttgcaactactgaggcacttgcagctgcctcagacttctcagctccccttgagatgcctggatcttcacacccccaactccttagctactaaggaatgtgcccctcacagggctgacctacccacagctgcctctcccacatgtgacccttacctacactctctggggacccccagtgttgagcctttgtctctttgcctttgtccttaccctagaacctcctgtaccatgtggtcggctggaccgactggaaccttgccctgaaccccgaaggaggacccaattgggtgcgtaactttgtcgacagtcccatcattgtagacatcaccaaggacacgttttacaaacagcccatgttctaccaccttggccacttcaggtgagtggagggcgggcacccccattccataccaggcctatcatctcctacatcggatggcttacatcactctacaccacgagggagcaggaaggtgttcagggtggaacctcggaagaggcacacccatccccttttgcaccatggaggcaggaagtgactaggtagcaacagaaaaccccaatgcctgaggctggactgcgatgcagaaaagcagggtcagtgcccagcagcatggctccaggcctagagagccagggcagagcctctgcaggagttatggggtgggtccgtgggtgggtgacttcttagatgagggtttcatgggaggtaccccgagggactctgaccatctgttcccacattcagcaagttcattcctgagggctcccagagagtggggctggttgccagtcagaagaacgacccggacgcagtggcactgatgcatcccgatggctctcctgttgtggtcgtcctaaaccggtgagggcaatggtgaggtctgggaagtgggctgaagacagcgttgggggccttggcaggatcacactctcagcttctcctccctgctccctagctcctctaaggatgtgcctcttaccatcaaggatcctgctgtgggcttcctggagacaatctcacctggctactccattcacacctacctgtggcgtcgccagtgatggagcagatactcaaggaggcactgggctcagcctgggcattaaagggacagagtcagctcacacgctgtctgtgactaaagagggcacaacagggccagtgtgagcttacagcgacgtaagcccaggggcaatggtttgggtgactcactttcccctctaggtggtgccaggggctggaggcccctagaaaaagatcagtaagccccagtgtccccccagcccccatgcttatgtgaacatgcgctgtgtgctgcttgctttggaaactgggcctgggtccaggcctagggtgagctcactgtccgtacaaacacaagatcagggctgagggtaaggaaaagaagagactaggaaagctgggcccaaaactggagactgtttgtctttcctggagatgcagaactgggcccgtggagcagcagtgtcagcatcagggcggaagccttaaagcagcagcgggtgtgcccaggcacccagatgattcctatggcaccagccaggaaaaatggcagctcttaaaggagaaaatgtttgagcccagtcagtgtgagtggctttattctgggtggcagcaccccgtgtccggctgtaccaacaacgaggaggcacgggggcctctggaatgcatgagagtagaaaaaccagtcttgggagcgtgaggacaaatcattcctcttcatcctcctcagccatgcccagggtccgggtgcctggggcccgagcaggcgttgcccgctggatggagacaatgccgctgagcaaggcgtagcccaccatggctgccagtcctgccagcacagataggatctggttccggcgccggtatggctcctcctcagtctctgggcctgctggtgtctggcgttgcggtggtacctcagctgagggtcaaggaaggaaggtgtgttaggagaactagttcttggatccctgcccactctccccagggctgcccctcccatctgccccttacctccatcccaggggaagtagagactgagaatgtgggtacaataggcacagaggttgtgcagcccacgcaggtggacctgcagcttcccactgggcagctttgcctgcagcagcagggccaagtagctgaagacgaaggcgtccaaggaggcagggctggagcagagagagaagggtgggatggaggagaaccactggggtagaaggggtaaagatggagctggaggaagagtcagccttgggaggtgggctctgggcagcaggcggccaccagggaaggacaggacacacagttctagacctggtatggggagagatccccaggtggcgccagcctggccctgaatagggctctatcccagggctgcataaagggcacattcagtgccccacagctcttcaggcccctcctgtgcctggctgccctcccaccctacccttttgtacctctgagaaggctctggccccacgcacagccccactgtcacyagggccagtwtctrtcycagggacctcctatccagagcctgagccagccccagccccagccccagctccagctgctccatctgaacctgtatcttcttccaagccacccattaccctcttggagtcagactcacgcatctccaaagaagaacttttgagagcccaggcgctgagagagcagggtcagacactcccgagcctctcggtacagctgtaggggcgacacaggtaggcttgcagctgygggaacagtgccacctcygcacctaagcactcccattcctggccagcatccttggggctcatctcatacaatagcccccggtctcagagctacctccttctccagctcttcctcgtcctcaggcctgtgctccccagtcagcagctgtagccgttccatgtactgccgctgcatgcggccaggcaggaagaagttgaggggaaagggcatagcctctgcataccacttccgggtcacttctacgtagttcttggtgtctatccaaaaagtatgtmcctggattgggtrggcaggaagaaacaggcaggtctgagccagtgcacctgtctgattcaaggtgggcttctgaccyccatgctytcctgagyctstgtgtgggtctgtgtgtkcccgtcccctccccggctggccatggatgctgggaggtctgggcacactcaccagcaccgggatcaacttctcctccaggagagacatgaaggccagggtgtctgccccttgctgagctgacagatcataatcagcattgtacttctgtggaggaaatatccatggcgtggacgctggggagctgcaagggcacttcaccagggaggaaggagtcctgtctggtacccccctcactggcctctgagtgcagtggaggtacagcaaggaacttttcctgccaaggcccccttgcctgggcccagccagtagcctgttgctgttggcaaaaagcctgggccttggagcccgctggccgtcaaggtcctgggcccattgagaagaaggaagaaaggttgggccgcaaactaggagcagctcccagaatttccatggaaagctggaacaatgcctgctgacagcaactttctaacagtaactttcccgacccagacaccacaaagctagcacaacggagctcagatgcaggctaggactcggtccatgcctcaggaaccagrgaaagccatcctcacactccctggatccagggaacccacgcccagggccccccagcttgttccctcagtgcccagctcttggctatttctttcacttcattccatcgcycagacaccattaccacatacacattccayccatacccccaggtctcagcctgccctaccttcccaggctccagtccctgttcctcagcatcccccaccacatcctgagtaagctttgtccccagataacctcttcagcatgatccttaaatctccctaagcctcagtttctcccctgtggaatgggggtaagaatctctttctctgaatgcccctgtgttaggaaataatttagaatacttyggaaacaaaaagctctgttcacacctaagcaatcagggcagtggccctggccttgccaggaacttaggcttttatctggatcctctttccaggcctctcaattaattccccaggtccttaacctttgggaaattagaaattaggaagagtgtcccacttctgacactgtgttccctcttggaacctgaccgtcaatgctagaagaacccttggaaaacatgctggcccagccctctagttttacaaataagggagtgcacagccctgagaggttacatggcctgcccaagatcacgcagtcaatggcagagtaaagagcatagcctaggcctccccactcctctagtaatgctctttcatcttctccaacctggctctaagccttgtccatcctgagccccatatctagcccaacctagtccctgaaaacaagaagtggcccttagaaatctctctccagtcccactatcagaggccaactgctgtcttccagtctccttcagcctgtgctcctctccctccctgactgacaggcagaaggtacygtgcctctggatatccccacagtgccctgagctgcatctcttgcygactgctttaatacatcacagtgacattgtgtgtgtctctgccaccagactattgctccttgatgctctgggtcacctgcatctagcatggcatatatctagtgctcaataaatgtgtattgtacrgaattgactgaacttctctcactggcagccccctctatccaaatcacccacctctttttgaaggtgggtgatgatcttgtgtggtactgaggtgacctctccatgactggtccaaagggcaggcagggttcctgatactgagagaaaagtataccaaccaggaccttagctgcctatccatacgtagttgcaacacattcctgcctatctcctgcttctcctcttgtacacacccttcctcacccccaagggatactgggtacctgaagggctctgccaggggttgctgatcttgtgctatatggtgcacaagaaacttttaagaaaaaagaaactttcaagacacactttccaaccacgaattctatctctgctccttttcatagcaataggttttctttttcttccctccacacttaaacatccattctcttatcacccacccccatcagactccttcccctgtgtttcttcagccactgctctgaccaaaatttgagtgaccaaaagtggtgtcagacccagtgaccatttctctgcctgcatttcacttgaccttgaagcagcaattaatctccataatcagcatcttcttgaatttttccctttgaggacattgctcttctactttgtgctctggttatcctttacaaacttttacacctctcctgaactggttaacagtagagggccccaagggtctcacgtaagccttctttgtttttgttttttttcttttcttttattttttatatatttttttgagacggagtcttgctctgttgcccgggctggagtgcagttgcacgatctcggctcactgcaagctctgcctcccaggttcatgctattctcctgcctcagcctcccgagtagctgggactacaggtgcctgccaccatgcctggctaattttctgtatttttaacagagacagggtatcaccatgttagccaggatggtctcgatctcctgacctcgtgatctgcccacctcagcctcccaaaatgctgggattacaggcgtgagccactgctcccagccgtcatttttattttattttatttatttttttgagatggagtcttgctcttttgccaggctggagtgcatggtgcgatctcggctcattgcaacccccgcctcccaggttcaagcgattctcctgcctcagcctcctgagtggctgggactacaggtgcctgtcaccatgcctggctaattttctgtatttttagttgagacaggttttcaccttgttagccaggatggtctcgatctgctgacctcgtgatctgcctgcgtcggcctcccaaagtgctgggattacaggcatgagccactgcacccggccatcaattttttttttttttaaatggagtcttgctctgtcacccaggttggagtgtaacagtgcaatcttggctcattgcaacctccgcctcttgggttcaagcgattctcctgcctcagcctcctgagtagctgggactacaggtgcatgccaccacacccggctagtttttgtatttttagtagagacggggtttcaccatgttgtccaggatggtctcaaactcctgacctcaaatgatgtgcctgccttgaccttccaaagtgctgggattagaggcgtgaaccacattgcccaccgtaagccctcttttctacttccactctttctgtaggtggccctactactaacgtccatggctttaagtaccatctttctatgtgttaatgcataagtccagccttgacctctcttgagcgccatccaactcagcatatctggttggatgtctaatgagtatttcaaattcaacatggccacaactgaactaactgaactcttttttttttttaggcagagttttgctcttgttgcccaggctggagtgcaatggcgagatcttggctcactgcaacctctgcctccagggttcaagcgattctcctgcctcagcctcccgagtagatgggattataggccccgctacccggctaatgtttttgtatttttagtagagacagggtgttgccatattgaccaggctggtctgcaaatcctgacctcaggtgatccccctgcctcggcctcccaaagtgctggaattacaggcgtgagtcactgcgcccggccacacaactgagctcttcattcccaccccagcaccggttatttttccactgttcccatctcaatggcacctccattacccatttgcacattccaaaagcccaggaaccatggtgacttcttttcccatatccaacacaaccaatcctatcttgaattcatccacgtcccaccacctccccagctacctagttccagccaccctctctccacaacctctgaatcaatctttcacttttcccagcaatccattctccactcagcaaaatgatgataaagcacgtcacatcaaggctctgcctcaatttaatggcttcccattgtatttagaatcatctccaagctctcagagactatggtcagctacaatctggcccaccttctgttccagccaaatttcctcacagcacaaggacgtttgcacctgctattttccaagcacgaaaccctcgggcagatatatctggtgctgtcacctaatttcaggttttaactccactctcaccatttcagtgaggacctaatccccatcgcagtcattctatcacatagctttattttattttattttatttttttttgagatacagtctggctctctcacccaggctggagtgcagtggtgtgatctgggctcactgcaaacttccatctcctgcgttcaagcgattctcctgcctcagcttcccgagtagctgggattacaggtgtctgccatcacgcctgactaagttttgtattttcagtagagacggggttttgccatgttagccaggctggtctcgaactccttgacctcaagtgatccacctgcctcagcctcccacaatgttggatttacaggcgtgagccactgctcccggccacatagccatgttttaagcatgtatcactatctaaaattattttttgtttatacgtttgtgtcgtcctgtagaatgtaaggtcacaagatcagggacttgctcattgcactgggtctaacacacagtgcttcctcaacaaacactcgttaagatactaacgtggcagagtggggccttgtaaacagtttcaggaccctgtgcttgtaagagcaacgtggtgccctcccaaggaagacagggaggatgcaggagcactgcccagagatggcgtcaggctgcaagacatcttgaataattcaccatcgtaacaacccagcctcaggaagagatggggcaaggccagaacgaaacattaggtaagaggcggtggacaatgggattcccacagggcagcttttgggcactggacgttccctaacctgaggctctctgaagaggaaggttaggaatcctctcagcttcggtgggctggactcactgtgggaattcaatcgccccccccacccactaagggtgtgctggcgggaaagcgctgagacgcatgcgtagttctcgcgtctggcacccgctccctttccaatacgcttgcgccccatctgtgctacggatggtcagggagagttgtccgtcttcaaatggaccaatgagacttgtggaggggctctgagtcccgcctctggatgagtgaccgtctcttttccaagtgaggccccgccccgcctccccagggctgcttttctcgcggcacgggtggtggggctgcttcttgacttccgcgcctagtgcgcggggccccattctccagtcccgcccacgcgcctttggaggctgcggtgggatttccttttgccttcggttggggctgctgtttctcttcgccgacggtaggcattataaatatttcgccctttgaattttagctctcccctcccggcgttcgcacttagcctttttcatcattatcattatttttaatggtaaggatggtcaaattttactaatgaagcgattataaaatcttcaagtctttgtatccacttgctttttgagggctggagtgggaagaaaggtatataattcattcattcttcggacatgtgacaaacgttcacggagcgcggcaacgagcgccggtgtcgcgatgcgcactggggctgcacatgggagccaggatggactggactggtccctgccctgcccgctgacgattggcaggccactgcctttgatgagctgggcgctataactgccattaagccatttgtacaattaatcacaacagtgataagagcgacaaaggagctattcgggtggctgaggcgggaggatcttttgagcccaggagttcgagaccagcctggggaatagagcgagatcctgtctcaaaaaaagggggagaaaaagtgacaaagaagttgtgagggctatgagtttgcgttagaggaggtgtgtgaggtggggaggcggcagggggcgcggttgttcttagagaaagtgacatccgggctaattttgaaagaataagtgttaactaggctaagcggtgggaaagagtagtgtgtgctgaaggaagggaagaggaacctggcaagttcatggcaggctgtaattggatgctggtctccctccacacttgactcctacagtctgatttctacacagcacccaaagtgatctcttaaaaatacacatgtgatcttgtcacttcccagcaccaaactctacagtgaatttccatcttagaacaaaattcagactccttaccatggccaccaagaccctacacaatctggcctcccaatttccttttccaaggtcaccttttaccactatccatctcactcacactgctccagcactctctatgcttttatttttctttcttcctctttctttctttctttctttttctttttctttctttctttccttccttctctctctctctctttcttttcttttctctttctttttttttttttgagatgcagtcttgctctgtcacccaggtggtgtgatcttggctcactgcaacccagagcagtgggggtgatcttggctcactgcagcctccgccttccaggttcaagcaattctgcctcagcctcctgagtagcagggattagcgccatcagtcccagctaatttttgtatttttagtagagatttcatcatgttgtccaggctggtctcgaactcctgacttcaagtgatctgcccatctcagcctcctaaagtgctgagattacaggcaggagccaccacacctggctcagtatttgttttatttttgttgtgtttatttatttagagacaaggtcttgctctgttgctcaggctggagtgctgtggcaggaacacagctcactgcagcctccactacctcaattcaggcgatcctcccacctcagctgagactacaggtgtgcatcaccatgcctggttaattttttcgttttaccatgttggccaggtttgtctcgaactcttgggctctgctgtcctcctaccttagcctcccaaagtgctaggattgtaggcgtgagccactgtgcccagctggtgttcagtatttgaatccatatttcctgtagccgcaaccaaagttccactgttaggtctcactttgactttaataattgtgttcaggctgggcacactggctcaagcctgtaatctcagcagtttgggaggccgaggtgggtggatcacatgaggtcaggtgtttgagaccagcctgtccaacatggcgaaaccctgtctctactaaaaatacaaaacattctccgatcgtagtggcgggcgcctgtaatcccagctacttgggaggctgaagcaggagaattgcttgaacctgggaggcagaggttgcagtgagcggagatcacgtcattgcactccagcctgggctacagagcgagactctgtctcaataagtaaataaataaataaataaataaataaataaataaataaataattgtgttcggagtcagcatcattcttcctgaagttcaccactcctttgccaagaacacttcctgaaacactgacaagcaggaccttgaatagtggggtatggttggtaacaactcactcattcaacaaacattgagcacctattttgtgcttgcctctaaatgaagagctggttgtattatttatttttttaggtgacagggctttccctatgttgcccaggttcgtctcaaa

SEQ ID NO: 97023 - DNA, 58800 bp, Homo sapiens
  misc_feature (1)...(58800): n = A,T,C or G
ctcggctcactgcaacctccacctcccgggttcaagcgattctcctgcctcagcttcctggtagctgggattacaggcactcgccaccacgcccagctaatttttgtacttttagtagagatggggtttcaccatgttggccaggctggtctcaaactcctgaccttgtgatctgcccacctcggcctcccgaagtgttgggattataggcgtgagccactgcacctggccaccccaactcttaaacaaaaaaaatttggccaggctgatctcgaactcctggcctcaggtgatgtgccctccttggcctctcaaattgctgggattacaggcatgagccaccatgcctggcccacacgtttaaaatttaaaaaagcggctgagccaggtggatcacctgaggtcaggagttcgagaccagcctgaccaacatggagaaaccccgtctctactaaaaatacaaaattagccgggcatggtggcgcatgcctgtaatcccagctactctggaggctgaggcaggagaatggcttgaacccgggaggcagaggttgctgtgagctgagatcacgccattgnnnnnnnnnnnnnnnnnnnnnnnnnnnnnnnnnnnnnnnnncctgggcaacaagagcgaaactccgtctcaaacaaacaaacaaaaaatttcaaaaagcaacctatgaaatatcagtaaacactttccagaatagctacaattcaaaagactgactaagtgttggcgagtacgtgtagtgactggaacgctcaggttttgctggacctagtgaaaatttggctaagtactgtagaggtcaaggggatactttcccttccccctctgaaggcacactgaaaatcaactgacagtaggacagattattattattattactattttgagacaaagtctcactctctcactcaggctgaagtgcattggcatgatctcagctcactgcaacctccacctcccgggttcaagcgattctcccacctcagcctctcaaatagctaggactacaggcgcccaccaccacactcagctaatttttgtatttttagtagagacaggatttctccatgttggtcaggctggtcttgaactcctgacctcaggtgatccacctgcctcagcctcccaaagtgttgggattacaggtgtgagccaccatgcctggcctgaatttatttatctgcttggttagcaggtattttgaccaacgtgatttagctgatgagctatcttgatgtagctgatctctcagggatggaagatatttctcaaaaaggcagcctaactatgaggaaacacaatgtcaattcaggtacagattgcatcacatccttaatactatgtgaagggttctcatcttaacctgtgcaactcaaattgatactcagaatatagattgcattgattagatgtttgaaatatcaatggaaaatcccacccactttttgatgaacagtatgaacagttttttgtaatcacatgcatttaaaacaagttgagtgtcatttattggtgaagcagcctgcgtagaaactgcatgatgaacagctgggcacagtgggtcatgcctgtaatccctgcactttgagaggctgaggtcaacagatcactttaggccaggtgtttgagaccagcttggtcaacatggcaaaaccccatctttacaaaaaacacaaaaattagctgggtgtggtggtgcacacctgtggtcccaggtacttgggaggctgaagtatgagaatcgtttgaacccaggaggccgaggttgcagtgagtggagatcatgtcactgtattccagactgggcaacacagcaagaccctgtttctactgcaaaatagaaaaatcagccaggtgtggtggtatgtacctgtagttccagctattctgtaggctgaggtgggaggatcaaccgagcccaggaggtggaggctgcaatgagctgagatcatgccactacactccagcctgggtgacagagtgagaccctgtctcaaaaaacaaacaaacaaaacaacttactttgggatgttatagagggcccctgtggcatccaaaagagagataataaacaagttttttggtatgttaaattacatatcaggtattgtcaaaaaagaaattactgagtaagaaatgatgtttaggccgggcgcagtggctcacgcctgtaatcccagcactttgagaggccgaggcaggcggatcttaaggtcaggagatcgagaccatcctggctaacacggtgaaaccccgtctctactaaaaatagaaaaatatagctgggtgcggtggcgggcgcctgtagtcccagctactcgggaggctgaggcaggagaatggcatgaacccgggaggcagagcttgcagtgagccgagatcacaccactgcactccagcctgggcaacagagcgagacttcatctcaaaaaaaaaaaaaaaaggaaaaagaaatgttgtttaaccaagttatatttttatggatatgttattaatatgtattccaaaactgtatgagattcctaaaattctgatatatcttggtatgttattagttatatttatggttattatgttaaattattgtagaacacagaaataaccaaattttcttgccaattttgacttttgattttaacttttgactttatgattttaagtgatttttttttttgagatagggtcttgctctgttgcccaggctggagagcagtgatgcaatctcagctcactgcagcctccatctcctgggttcaagtaattctggtgctcagcctcctgagtagctgggatgacaggcatgccccaccacccccggctaattttgtatttttagtagagtcggagtttctccatgttgctcaggctgttctcgaactcctgacctcaagtgatctgcctgcctcagcctcccaacgtgctgggattacaggcgtgagccactgcacctggcccaactgtcattttattaatacgtatataagaagaactatagtttatgccctgacaaatgtatatcctactaaagaagggtaattaagcttctctctctctctctctctctctatatatatatatatatatatgtatgtatatagatgtatgtgtgtatatatatatatacacgtgtgtgtgtgtatcagagacagggcctcactctgtcacctaggctggtgtgcagtggtgtgatcatagctcaccacagctttgaactcctaagctgaagtgatcctcctgactcagcctcctgagtagctgggactacaggtgcacgacacctcaccctgccaatgtttttattttttgtagagacaaggtctcactttgttgcccaggctagtctgaaacttctggcttcaagtgatcttcctgcctctgcctctcaaagtgcgggattacagtcttgagccactgcaccaggctcccagctcctactttaaaaaacccacaaacaaatggaagcataaagtacagtgttctaccctttactcttcttttttcacctatgtatttccaattacatatatatgtatttccaatgacacacagtaatgttattgtaataacttgagtttgcattcttttaaaaaaattttttttttgtagagacagggtcttgctatgttgcccaagctggtctccaactcctgggctcaagtgatccccctgccttgtcctcccaaagtgctgggattacaggcgtgagccactgcacccaaagagtttgcattcttcagcggctatgcaatgttttgcacctagaagaaatccaaggtattctcaatagaactatagactttcagtgctagaaagatatttagagatcagcaagtccacctcttattttacagataattaatgtacagaaagtcaaaatgacttccctaaggtcttacacctactaataaagaaaggaatgagtgagccaacttaaaggaacattcacatatagagttaaaatgttaagccattacaagtgtaaaagtaaataggattgcctgtagtggtaactagtatctgtacagtgtattccagtttaaaatgtgatctcacatccattaggtcacataatgttcccaaagctcacaggcaacctttgtctccattttactggaagtaaaacaagcaggaatgtggatttttttttaaaggctacccaagtgaagcagtgggagtggagaaggaacaaagaaatctgtaactggttgtgatcaatgagttgtaaacactactgcactaggacaagcctgtggatttttttttttttttaaagcaggctttaaacatagcgaaatttggccgggcgcagtggcttacgcctgtaatcccagcactttgggaatccccggacgggcgtatcacgaggtcaagagatcgagaccaccctggctaacacggtgaaacctcgtctctactaaaaatagaaaaaaattagccaggcgtggtggcaggtgcctgtagtcccagctattcgggaggctgaggcaggagaatagcatgatcccaggcggctgagcttgcagtgagctgagatcgcgccactgcactccagcatggtcgacagagcgagactccgtctcaaaaggaaaaacaaaacaaaacaaaacaaaattaaccgggcgtggtggtgggtgtctgtaatcccagctactcaggaggctgaggcaggagaatcgcttgaacccgggaggtggaggttgcagtgagccgagatcacgccattgcactccagcctgggcgaaaacagttgagactccgtctcaggaaaaataaaaaaaaaaaaagcgaaatttgatctgtctttgggcctgtgaaagataatcctaaagtgctcttgaaaaaaaaatgccactgagacacacagatggaaaaccaagaaatacaaatggacttacaaaacaatcaaggccacattgcattcgcaacgcatcacaacactgcattgggtgaaagtgacatgggtcagtcccagatactcaaaacaaaaatgaagttggttctatcatttggaacatttttgctggaggtagtgctggcacgattcgaacgacttgttttgcacaagtgggtcaatgcacatttttttttttttttttttgagacggagtttttgctcttgtcgcccaggctggagtgcagtggcgcgatctcggctcactgcaacctccgcctcccgggtgcaagcgattctcctgcctcagcctcccatgtagctgggactacaggcgcccgccaccacgcctggctaatttttgtatttttagtagagacggggtttcaccacgttggccaggatcgtctcaatctcctgacctcgtgatccgcctgcctcggcctcccaaagtgctgggattacaggcgtcagccatcggactcggcctaaggggcaatgcactttttttgcaaagtctgataattgcacttatgtgagtgcatacacgtgcctgtgtgatgcactcttagctctggaagctggcttcataccacccgacggcatttgctctgtgactgcctacgggttggggtacgttccctcccccgccctgccacttcgtggcaggcttcgtgtctctcaaagccacgcagggacattgcccaggttcctgcacccacccaaattctaggaggaacagggcggaggctgacatcgcgcatgcgcctcagcgcacgccggcgcagcctctctccttcctcatcgcctcgcgctcccaccccaccccgagagcaaaggagggaagcgattgggcacgctagttgtccatcagaccaggctctcttctccctcaacaccattggcagacggagaaaaggccagtccgccgaggtcttcctaccccttggagactcagcgccaccgcggaagcagctattggcggaggccaggggccgcgactgctcacttccggcgcgggcctagacgatttctccccctcccccgccctccgccttcccaccccccgcccttccactatggccgcttctgtgtggtgtggggagacgctggtcctccccgtcctcccatagcgcttattgcctcaccctcaccccctaggggccggatccaaaggcgctgcactccccaagccttggggcatcagccaggaaggtttcctacctcctaattcaggggcaggactcctcttttccccccacggggaaaagaggcagaaacttaggggtttccctcctttcttagggtcagacgctcttagggtccacttcttcaggggcggaagcctctcctacccttcccatagggrcacaggcctttaccccactgtacttcggagccaacgcctttccctcagcactgccaccccagagtcaggacccagaggactgtgccttcgcccccaacgcaggcgcggccttttggagaggagggaggagtggagaggacaggggcccttgctctcccctccccaacttgttcctcttgccccccagtccctggcaatccagagatcccgatatctaggactgtccatccatccactccctgaccttttcccggctcctggctgcagccatggagttgcagaagggaaaaggggcggcagcagcagcagctgcttcgggagcagcgggaggtggaggaggaggagcgggagcaggagccccaggaggggggaggctgctactttcaaccagtttggatgccaaggatgagttagaggaggtaggtgtggggggagggaagggagttaagaaattgggttttggagggatactggagcggataccgggtgggaggacggggggtgggggcgggggtggaggctttcaagttttttctgaagtaacacaaacactgctccagcttcctgctcctgagggaagaaatgtgggccaacttcctggacaggttgtcatagtaacagcagccactagtatgaaaatgggtggggggtgttggtgaaggaagggatacaacatccaggtttaccgaatttatttttgacattcctttcgacatacacaccccagctatttttactatcaaccctgtttcagacttaggtcaatatattgagttgagatgtaatgtatgtctgtgtagatgtttgggggctggtaagagctggcagtagaccttggaccctcctgttagatgctatcattgacttcgtgtagacacaaccaattgccagtgatgttaactgggcatctagaatgagtgaagacttaagaaaagtgagtagtgtttagtttggtggcatcagccactgtagtggggtgaatggtacctaggggattctccttcagaaccagatagcacacacacaggagagaacacatcgcttctgaaaaagaaggtggagcgaagaaatggaatggacctgaatgaggacttcaggggacctgatagttgcccctcctgtcctcttacccagctttctcattctgccatctcagagttgatcacgtatacctttccactcctacaaacgagaatatgtacttaagaatatgagatctaggctgggtgcggtggctcacgcctgtaatcccagcactttgagagaccgaggcaggcggatcacaaggtcaagagatcgagaccatcctggccaacatggtgaaaccccgtctctactaaaaatgcaaaaattagctgggcatggtggcttgtgcctgtaatcccagctgtttgggaggctgaggcaggagaatcgcttgaacccgtgggcagaagttgcagcgagccaagattgcgccactgcactccagcctgacgacagagcgagagaccccgtctcaaaaaaaaaaaaaaaaaagaatatgagatccagagctgagacgtgattgcttaactgtttgtaaggcctaatattcaactcggtggttatccagggacaggatgagtacattaacaggccttagctcttcactggctgtttcccagcttctaactttatcagctattagagggtgggcaggcagacaggtgaaattcagaatttagatttgaaaaaatgggtcagatacaagatggtagaacatacatgccaaaatgaactttgtgaatcaagaagtggctggatagtaactttgtggattttccaccagcaaatgtctacttgcagtctgccttcccgtcatgcttttccctcataattctgtgggcattcaggtaaatcagtttgttttctgctgtctgtagttatcagctaaggtagatataattatgaatgtgaacaatgtattcccaaaacaggtgagaatgactttaggactgcctggcaattggaattatttactttttaagaaatggccactgtcattgtcaaaacatttcttgatccctgtgtactaacactggagctctagaagtatagaaagtcaataatggactgcctttgatccctccatcagtttgagtggagggcaaaagacccaggggttgaaatccccaccctgattcttagaggygtcattgtgtctctgctttaattcaattcactgaatagtacagcatcctgttcttctgagcagtgacgtgtttgctactaaatgaaatgatgcagcaggaggggaccatcgaagaggggaagcatgcattttctggctttttttatactgagagtgaacttccaactgtttccagggaaaagggggagggagggtctttctttttttctgatctccataatgtggatgtttcccagtatgtctcaagctcccccttctttgccctttgtcctttgcatttgaattttctagcaagacttgccacactatttttttcccaatgtgtgtggttcggttatccccactagaccagagggtctctaagggcaagacttactggcttcttcctctgggtctccccacagatctctgcacacagaagttatgaaaacttggtgttgatcgactgacctctgcttgttctggcttggttattttcccatcacagacctacctattgcccaggaacacagaggtagtttcctgaccatatatgcttactgtgtgctgggtctgataggaaaacaggttggaggacatccaaggtctgcctttcgaagcttatcatctaatggcttcatttaacacgcccacaagaaggtaaaaaaacaaaaacaataaacaaaagaaactagttagagtagtgaagagacaggtcattataattgggtgtgattaggaaagacctttagagatttggagtaggaagcactggtcaagagcatcccaggcaggaactcttaactctactaccctagggaacatttggtatatcctttcttctctttggccctgtttttccctttgaaggcggaagtcttcttgcccattcccatcccaatttggggagggaatgagataaaaatagtgccagagattgaaggagtttagaacatgtagttcctaatctcatgagccttggtagcycctggtttttcttctgccaaagagggaccaatcacttttaaatcaggctgaaagcgggaggcccaagagcgtcctytttttttttttttttttttttgagatggagtctcactctgtcgcccaggctggagtggtgcagtggtgggatcttggctcactgcaagctctgcctcccgggttcacaccattctcctgcctcagcctcccgagtagctgagactacaggcgcctgccaccacgcccggctaattttttgcatttttagtagagacagggtttcaccatgttagccaggatggtctctatctcctgacctcatgatccgcccacctcggcctcccaaagtgctgggattacagacttgagccaccgcacctggccccgcgtctttttttaactttttttttttttttttttttttttgagacagagtctccctctgtcgcccaggctggagtgcagtggcgcgatcttggctcactgcaacctctgcctcccgggttcaagcgattctcctgcctcagcctccagagtagctgggattacaggcactaccactcctggctaatttttgtatttttagtagagatgggtttcaccatgttggccaggctggtctcgaactcctgacctcaggtgatccacctgccttggccttccaaattgctgggattacaggcatgagccaccgagcctggccagagcttcctcttaagcgctggataggtctcagggttgcatttggttagaggtatgtctctacctggttttccccaaggaataattcatatacatatgtgaggagtctccagggactgggctttgagtcacttctagtttttgtccccttacaaatcataatttcatataccagtgactcatggttgtggaatactttgaacgcagcttgttcaataactcctcacctacgtgagtccttggggattttttttttttttttaaacggagtttccctcttgttacccaggctgtagtgcaatggcgtgatctcagctaactgaaacctctgcctcctgtgttcaagcgattctcctgcgtcagcctcccaagtagctgggattacggaagcccaccaccacacccagctactttttttgcatttttagtagagacggggtttcaccacattggctaggctggtctcaaattcctgaactcaggtgatccacctgcctcggcctccgaaagtgctgggattacaggcgtgagtcactgtgcctggccatccttggggattttatgagttagattgtatattccttttctgaaaatgaggaatttagtctttttttttttttgagatggagtctcactgtgttgcccagactggagtgcagtggcatcatctcggctcactgcaacctgcacttcccagattcaagcgattttcctgcctcagcctcctgagtagctaggagtaaaggcacgcaccaccatgcccggctaatttttttgtatttttagtagagacagggtttcaccatgttggtcaggctggtcttgaactcctgacctcgtacaccatgttaggctggtctcgaactcctgacctcatgatccacctacctcggcctcctaaagtgctgggattacaggaatgagccaccgtgccgggccagaatttagtcttttaaggccactgacttcccatagggagcagtatttaccgaatgcttttttttttttttttttttttttttttgcagatgcagtcttgctctgtctcccaggctggagtgtagtggtgcgatctcggctcactgcaacctccgccccctgggttcaagcgattctcctgcctcagcctcccaagtagctgggactgcaggtgtgcaccaccacgcccagctaatttttgtatttttagtagagatggggtttcaccatgttgtccaggctgctctcgaagtcgtgacctcgtgatcttcctgcctcagcttcccaaagtgctgggattacaggcgtgagccaccgcacccagctgtccttggggattttatgagttagattgtatcttccttttctgaagatggggaatttggtgtttaaggccacttcccatagggagcagtatttactgtatgcttttttttgtggggagatggattctcgctccgtcacccaggctggagtgcagtggcgcgacagctccctgcaaccttcgcctcccgggttcaagcgattctcctgcctcagcctcccgagtagctgggactacaagtgtgcgccaccacacccggctgattcttgtatttttagtagagatggggtttcaccatgttggccaggctgctctcgatctcctaacctcgtgattcgcccccctcagcctcccagagtgttgggactacaggcgtgagccaccacacccagccactgtatgctttttaccagactctatatccacctggctgagggaggggaaatggaaaggttagaggggttcctccagcttgagtctccagctttgggtatatactgggaaagagaaaggccttccccccctttctcccccatttcatctgctgctgctctcatggaaaccatggtcaggtagtcttagtattagaaaaattagttcaggagctcctagagattgtaaatatttactcagctctctaaggtactgtcatggagggcttactctgaacagagccattctgccagcagttgttggcatctgaacctatgattctatctttactaagagactctggagactaggggaaaagcgttgctattacttgattgtagggatctggcttcctgtggctttctttgaagggacatggtcctttgtcaccctgaatgatttgtaatcaattttcccatccctgtttggaaaagtaatttctgtagtccaggaagagtaaagtatcctttatacttcttgttgcctgtgaacagaaaggactgggcctctcattttttcctcattgcagttatccacccatccaaattctggactctcactttctacaaccttagctgagcctctctgttccaagaggccactttgctccttcactgagcagtgacccatagaattgactcaggcctctgagcagagctcacgggagctagggaaggggcctagagaaactgttcaacccaaggtctctcagcaatagatcattgctggaggctcagctagccctttgtgtagccagctttgcaggatctggtagagggtacatcattcaggcccctccctctcccctaccttttcctcttgtctcctagaaggcaaaagtttacagagagtagataggagagaaagctttttagcctggtcaggaatttattcatgtcctgtggtaggagttttcaggaatctttaaggccatcccattagaatagaagtagtgtctgggagtggagaggttttagttctctaaatttagttgtgcaattgctgagcttcccgcaaattgaatagtttttgttttgttttgtttgagacaaggtcttgctctgtcactcaggctggagtgcagtggcgtgatcatggctcactgcatcctcaacctcctgggctcaaatgatgcacccacttcagcctcccaagtagctgggactataggcacgccaccacacccagctaatttttaacattttttttgtagagacagcggcttcactatgttgcctaggctggttttgaactcctgtcctcaagtgattcctccccaccttggcctcccaaagcgctgagattataggcatgagccaccatgcctggccacagattgaataggtctaatttaagtgaggctgtatgctaggtgctttcacatatgtcattttgtttaatccttacagcaaccttgtgatagaggcattatctctgttttgaggggttttgagtggctaaattacccaagattagcctaaggctggcaagtgtggagggttctttctatgttatgcttcctgtcagtttgcttattagctagctgctgtttgattttgcttgcctttcctctccattgattcagcagagatttttccctttggtaggaaggaatatctagaattttagaatgctgtgccactccttgttcaccatctccttctcctctgaaaccgttaacctaggctgtgtacagggcttcccccagatctcctagtaagagcaatctgaacctagcagctggatgtaattgattccccagtccgtgataattgtcttgggtagagagggatgatttttgagacagggccttgctttgtcacccaggctggagtacagtggtgcaatcacggtttattgcagcctacagctcttgggctcaagtgatcctcctgcctcagcctcccaagtacctgggactacaggtgcacacgaccatgcctggctgatttatttagtttttgtagagatggggttgggggggtctctttctgttccccaggctagtcttgaactcctggcctcaggtgatctacctgcctcgacctcccaaagtactgggattacaggcgtgagccactgtgcctggcaagtgggataagatttaaaaacagaggaagcccagctggagggttttccttccctccccttatcatataggaggtggactaggtaatactggatctcagagcttgtgggagaggtgggctgtgagaatcatagctcagccttcatgtgacctcacagctccttttcacaagtacacaggtgctttttattcaggctgagctgccaatctgacctaatttggagcatagttagacctgatattaagttgtaataagtggcttggggcttattttagcttgaagttttatagctatgggagctacaaacacttgccttgccttaacactcagttctactctgtgccaccttatgctcttacacaggatagacataggcaacctgaggataatggtaaaggagaagcatgattgtcttttatcctttttttttttttgagatggagtcttgctctgtcacccaggctggagtgcagtggcgcaatcttggctcactgcaacctctgcctcccagattcaagcaattctcctgcctcagcctcccgagtagctgggattacaggcgcatgccaccacacccagctaagttttgtatttttagtagagacggggtttcaccatgttggtcaggctggtctcgaactcctaacctcataatccaccctccctctgcctcccaaagtgctgagattacaggcgtgagccaccgcgcccagtccaattgtctttcattctttttttttttttttttttttgagacggggtctccctctgtcgcccaggctggagtgcagtggcacaatctcggctcactgcaagcttcgccgaccgggttcacaccattctcctgcctcagcttcctgagtagctgggactacaggcgcctgccaccatgcccggctaattttttgtattttttttaagtagaggcggggtttgaccttgttagccaggatggtctctatctcctgacctcataatcctcctacctcagcctcccaaagtgctgggattgcaggcgtgagccactgcacctggccgtctttcattcttaaacctctatcctattatccatatttgtcagttcttcaaaatgctgtgatagaaccacttctcaataagatgtgtggtgatgacctctaagatcaggtagaagtaaaccagccttcctttgtccttcttttgccagaatcattatcactggaaattggtttttcttaaacagtttttgggttaatcctcaagataaagttttaaaaggactcaggaaatagtttaggtggtgataatggagaggttcattgacttacgagtcgcattttgtcagtatcttaccaatattgcttcttctgaacagggaccagtgactaaggttcccttagaatgttgaacacatgacatggtggagttgaaaccagaatgactgttgggtaggctttaatgcagctattttcatccttgtttaactggagaccctggtactttttttttggacagagtctcattctgtagcccaggctggagtgcagaggtgcartcttggctcactgcaacctctgactcccaggttcaggcgattcctctgcctcagccttccaagaggctaggactacaggtgcgcgccaccacacctggctagtttttgtatttttagtagagacggggttttgccatgttggccaggctggtctcaaactcctgacctcaagtgatcctcccgcctcagcctccaaaagtgctgggattacagacgtgagccactgtgcccgacccctggtaggttttcatttggcttttggtgctctatttttctttcctcacactctcattgtttttaaagtttgttcttaacattttggggggacatttcaaatataaaaaagtagaatagtaaaatcttcatgtagccatcactctgcttcagtacttaacagtagatagcaatcttgttttatcttctttcagctacctctgtattactttgaagcaaatccaagatatacaattttatctgtaaacattttatataaagtctataagaaaaggacttttaaaaaacataatcataatatttatatcataactaaaaacattaacaataatgttctgttgcccaggctggagtgtagtggtaccatcatagctcactatagccttgccctcctgggctcaagtgatcctcccacctcagccycctgagtaactgggaccacaggcatgcacaaccatgctcagctaatttttttcttatttatagagatgggggtctccctatattgcccaggctggtctcgagctcctgggctcaagcagtcctcctgcctcccaaagtgctgggattacaggtgtgagctaccgtgcccagcccttaagcatttttgacaggccatttgttttgtagaatatccttcagtttgggttgtctgaaatttcttcataattggactgagtttatgcatttttggcaagaaaaccataaaagtgatgttatatcctttcagtgcatcctgttagaggcacatagtgttaacatgtctcattatttagtgatattaactttgatcacttggttaaggtagtgtcctccaggctctcctacagtgattattatattccttttgtaattaataagtattttgaatctatgtaattatcttctttctctgaaaagtttcacctactagttttaccatccattgatgatgatatttgcctgaatcagttattactttcaccatttcatctacatttattagttggcattgtactgtaaggaagagctttcctttcttgtttattatgtatgtatctatcaaaatggactgatggattctcattttattcgatagatgataatattaagtgtctttttttttttttttttgagacagtgtctcgctcttgtcatccagactggagtgcaatgatgccaactcagctcactgcaaactctgcctcccaggttcaagcgattctcctgcctcagcctcctgagaagctgggattataggcgcctgccaccacgcctggctaatttttttttcttgttttttttgagacggagtctcactctgtcgcccaggctggagtgaagtggcatgatctcggttcacggcaactgccacctgccgggttcaagtgattctcctgcctcaggctctcgagtagctgggactacaggcgtgtgccacaatgcccagctaatttttgtatttttagtagagacagggttttttcaccatgttggctaggatagtcttgatctcttgacctcgtgatccacccgcctcggcctcccaaagtgctgggattacaggcgtgagccaccgcgcccggccggagtttcactcttgttgcccaggctggagtgcaatgatgcaatctcggctcacctcgacctctgcctcctgggtttaagcaattctcctgcctcagcctcccgagtagctggaattacaggcatgtgccaccatgccaggctaatttttgtagagacggggtttctccatgttcgtcaggctggtctcgaactccccacctctggtgatccaaccccctcggcctcccaaagtgctgggattacaggtgtgaaccaccgcacccagctaatttttgtatttttagtagagacagggtttcaccatattggccaggctggtctcgaactcctgacctcgggtgatctgcccacctcagcctcccaaagtgctgggattacaggcgtgagccactgcatctggcctaagtcccttttattttattttctttattaaaatatatttttttgagacagagtctcgctctgtcgcccaggctggagtgcagtggcatgatgtctgctcactgcaacctctgcctcccgggttcaagcaattctcctgcctcagtctcctcctcctgagtagctgggattacaggcgcacaccaccatgcccggctaattttttgtatttttagtagagacggagtttcacatgttggtcaggctggtcttaaactcctgaccttgtgatccacctgcctcggcctcccaaagtgctgggattacaggtgtgagccaccgtgcccgccctattttattttatttttttgagacagggtctcgctctgtcacccaggctggagtgcaatggcgcgatctctgctcactgctgcctctgcctcccgggttccagagattctcctgcctcagcctcccaggtagctgggattacaggtatgtgccactgcgcctggctaatttttgcattttcagtagagacggggtttcaccgtgttggccaggctggtcttgaactcctgacctcaggtgatctgcccacctcggcctcctaaagtgctaggattagaggcatgagccaccacgcctggccctaagtctcttaatatatgggtttccctcactttttttcttgcgatttatgtgttaaagaaatcaggtcacctgtttatggtttccacattttagattttgctggttttatcctcatggtgactttataagtaaactggcagctagatcaatgggcatgatcaggtttgaattgttaaacttttaggggcccagaagtacttcctaagtggtgttatgacacactgttcattttttctcaccccttcccagagattggaaaggtgtatgagcattgtgacatcgatgactgctggtgtctcggagagagaagccaatgatgccctcaatgcgtatgtaagtagaatgctgtccctgcagccactgctgctgctgtgaaggtcttgaaacatggtcaaaaagatggaaagactaagtggttgggggtaggggactgaaattcatcaagtcttggctccctgaatcaaatttctcaattcttctcttttactgtgggagcctatctcttggagccttgggcatctttcagtacagctttttatttttatagcaatgtggtctcgctatgttgcccaggctggaatgcagtgattgttcacaggcatgattatagtgcactatagccttgaacttctgggctcaagcgatccttctgcttcagcctctggagtagttgggactacaggtgtgcaccaccacacctgtcgtccttatctctcttctttttttaaaaatctcttttaagagaaggaaatcatcagatttaaaagttgattattctcctttgcatcttccttaggagtcccatgttttctgggagaaactgagtttgagaacttactgcctgtgagtgacaactagtttgttttcctttctcacattccaggtgtgcaaaggcctcccccagcatgaagaaatctgcctgggcctgtttactctcatcctcactgaacctgcccaagcccagaaggtaaggcaccctgctctggacccataaaccctcctcatrtatgatctgggatatggtggaacttacagtttaactggggtagtatgaaactcttcgaccagagctggatcaccttgttctccaaatatagttacaagtccctttttactcagtgaattggtcatcctctgactaaagtcctttctctatctccagattctgaagctaaatggcagtcatgaaagtgaaaaaacagagttttaaattttaaatttatgaggcaaggctaaaagggttgggattaaatccagggaatagaagagaacaattgtaaccaagtccatgagagttcttatccagaagagcatggcctgtagtttgcagattctgccattggcaggtgaatagaaagcaggcttaaaattttartaggtaggatttagatgagacagcttaatgttacatgattgatgcagtaaataatgtagtgattaggagaacactggagtatactggagtcagacttcctgaggaatattgtatgaaaacttgtctggggttcttcacaaactgaagagtcccctttatgtggaayggttcaagtaggttccctccttgaggtgagggactaggcagggtgatctctttgaattctgtgagataacttggatgtcagagatggtgtcatttgttcaaggggaaccaaaggaaaatcatttccggggataagaacaggatgctcatggttccttggcatagctgcttgaattaacctcaagggaaggatttatgggcatgggaaactgatctgtttgtacttctgatgccagctggaatagggtctggggtgagggtgggcagtgaggcagcaagtattcacaaattcttggtttcccaggaaagccaagcccattctgggctgggaccttgtcgagttaaattgctgtttcatttttatactgaatttatcatcaagatccttgaagacaaatgaatgtttccagttgggtggttttaaagagtgatatgatccagtccagcacatccattttaaagaaattgttggcaaagatgagagtagatgggatggagttaaagtttaacttcctcttgtgtgggttttttaatctctgtgtgtgtgtgtgtgtgtgtgtgtgtgcgtgcgcatcattggctgtgtgtgggtttttataaataccattcaaattccatttagtcatctcagtgcaaattagtcttgcctgctggaaagttttgtttgtttgtttcaggtgatctgaaccaacctgggtaaatcagtaaacctaagtgaagggggcagagtatgtgtggtatttctagctctttgcctggcctatcagtaagaggccactgggttctgcagtgtaaatgcttattatgtcatgaatttggccatccagacacagcaagagactagagtatctcctcttctttttgccctataacagccccatgtgggaggcccaggccctctggggaagtgaagcatttgcctcgggtctcatagctggttgacacctttgctagcattcatgttcacatgctaaaagtttccaagtaaatcccctacctgtgagccttcctgggccaagcctccaggtcaggcctcttcagacaaaggcagtaaagacagaattaggaggacacagttttaggcgggtgaggaactatcaagtagtgactcattcagagaccttgagccaggtcagagcatgatggaagaattagtgacgtatctccctagagctttgctccttctccctaaaagggtgattattttgtaaaaatacttctgtcctacagaagttttaggtgggagttactgatgaggactgattgtaatgcatcattttaggcttcagcttaaagcaatgggactgttttctaaggatttgtatttggggttaattctgcctttggaacagaaacctcaggatgtatttgagatttagttgttcttgaatcttcatgggctgagatgggaagtggatatggtggagaagtgtggaaactgagtcttgaacaaatagaatactgctataaggaaggttgagctgaggagcctctgttagtactggcaggcaggttcaaggagttagggccaactctctgggacttagtgggtgggattaggatggattgaacaggtgaacaagagaattcagttaaggagaaagcaggtcagtattgggaaagagtagaggatgcatggggtggattttgtctcacttgtaccttcttgatttgcatcagccctcttggcagcccttaggaatgtttatatcctttgagtttatttattttctatttggtgtctgaactaaacagctgggagcaggcctggctggggaactgtggcaaggagggaggctaaggtagagtcctaagytgtgcaggtgctggcagtcaatagataaaggtaatgggaaagggtctaatgtcaaggtctgtcttcatcaaagggtcaaggactcaggcccaggcagctcttggtctaggtatttctcccagcaggcagctctagaaagaagcttgggggctctggggcctaggctgacacatcactgctcttgacacattcaggatagatgccatccagtcaccagtcacttttacttttctttgagactctccacttctcttttcctcactgagggtgtgcatgtgcgtgtgtgtgtgtgtgtgtgtgtgtgtgtgtgtgtgtgtgtgtttcatctgctgcttttccaagctggtcagcaaaccgacacagaggtcggtaacacaactggcagccttaggtgtatgaaactctcggttctcatttgttaccagcagttgtggttagtaaagatcccagatggaacatggaactaggcagacagtatctgctgtcttcatctgaccctgtatctcctgagagaacttgtcctgcttccctgtcctgagtctgttctgcattcatttgaacaacaaggttcttctctagttagtaatgtctgtctttggcctgacacagattttccctctgcctctacttcctttgtcctctgcccattctgtgacttacctccaggggagggtccaggacttaactatcaatatttgacagtaattcactgggacccttcatctctttcttgtttccttatttgtttttttggtctcccaaccatcaaccatcccccagagggagtcattctcttttggggatgaagtttatggcacatggaggatctctcactgtgggtattttcatcatcagttggtttgacttaacgacaatagaggcagaaggaagtggcaatagctaatctgttaggagtctctcaaggctagagagcagatggtactgaggggtacatttcttttgaatgcataggatgaaagagtttagaaatgttgctgcacggagtggctcatgcctgtaatcccagtgttttgggaggccaagacaggagaaaggtagagtctcaaaactattacaaactcataccgctattcccagcagcctcttctggttatttctaacgttgatacaagaggtggttaagcatgttatagaattggagtgcctggatttgaatcctggttcttcctctaatctcttatgtcatctggggcaaataacttttaagctctccatgcctatttcctcatctgtaaaaataattataataagtagtactattttaaaaggttgttatgtatatcaaatgcagtaatatatacatatatatatattattgttgttgatgccatccttgctgtattattgcttgctatagtataacaacatccttgctgtactttttttttttttttgagacagggtgtctctgtcacccaggctggagtgcagtggtacgatcttggctaactgcaacctccacctcctgggttcaagtgatcctcccgcctcagcctcccttgtagttgggactacaggcacgtgccaccacacgtagctaatttttgtatttttagtagagatggagtttcaccatgttggccagggtggtctcgaactcctgacctcagatgatccacacgcctcggcctcccaaatagtgctgggattacaagcatgagccaccatacccggcccttgctatactatatgattattatttttgatgccatccttgctactggtcttcagaggttgtgggaagctacctgcctagtttctactctttctgatgagatcctgacgggatagaactcagcaggctaaggaagttgctaatgaggccccctaaggtattcctccaggagtctggtctcacaatagagacagagtgaaaaaaaaaaaaaaactaaggggggaagggaagcaataatctcacagaagaaattagcatgccctcccttacctcccccaggatttggtatgctaaagcacctttcctttttcaataagtggcagaaggaaagggcatcacagagaaaagaataaagatatttagttcagctgggtatggttgctcatgcctgtaattccagctactgaggaggccgaggtgggagaatcacttgaggccaagagtttcagcctagggaacatagtgagaccttgtctctagaaaaaactgttttaaaaattatctgggcgtggtggtgcatgcctgtagtaccagctacgcagaagttcgaagctgcaatgagctatgatcatgccactgcactccagcccaggcaacaaagtaagaccccaagtataaaaaaactaaaaattcaaaaaaatatcagttttggttctgtccttaactgtctagggccctgccctggatcttcttcccttactactccctttgctgtatctgactgggtcagtactggtctaaaaacctctttgggatcctttttggcttgttcaaccaaacccattttgcagtgaccttttactgactggcagrtgaaaagcagatggcctccacctggttttgctcagcctgtggcatcaaacagtatgacacttcctaagatgggaagtgggggggacagggatagtactaggagccttgcccagcaggcttttctctcccctgcccccgagacagagtttcgctcygtcgcccaggctagacccaggctagagtgcagtggcgcgatctccgctcactgcaaactccgcctcccgggctcacaccattctcctgcctcagcctcccragcagcagggactacaggtgcccgccaccgtgcccggctaatttttttgtatttttagtagagacggggtttcaccgtgttagccaggatggtctcgatctcctgacctcgtgatccacccgccttggcctcccaaagtgctgggattacaggcgtgagccactgcacctggctgcccagcaggcttttctgcctcattaaaggataaccagtaccttttccccactctgtgtgacagaacaagggataggttgggaatgcaggacccctgtggaaagaaagtgtccagaatgaaaagtatttcattgctactcggtgtcttattggtgttatttaagtttaagggattagagggcaaggggtccactgtgggtggggtgaggaccttatcctcagcttgctggctgatcacaaactttacttctcacagtgttaccgggacttagctctggtgagtcgtgatggcatgaatattgtcctgaataaaatcaaccagatacttatggagaagtacctgaagctgcaggatacctgccgtactcaggtaaggccagaaagaaaagacaagatccagctcaaagagagaggatggatcttctctctgtcaggaacgggaaagaggaatcagggctaacacacccctatcattgtgtgtctaaattgtaatgtgctcctttcagttgtaattgaattagctcccttctcaaactcacagttcctgctcttcatctgtttttccctctttcctttagttggtgtggttggtacgggaactggtgaagagtggggttctgggagccgatggtgtttgtatgacgtttatgaagcagattgcaggtgagtttgatggcaggagcataaagaagaaaggaggagagcccagagactacatagagacaatggagaatgattaagtgccaaagggatggaattcttggattgcttagactgtttccttctgatacagacatcttctggccacatatgttgtagaaataaattgattgaaaaatcatggggggccttttaaagcagtaagtcttgcctcattttctttcctgctaaacccagggcttgacagaatatttggcctattttagccagtcttcactctgagattttatagcatttcagagcaggaagaaatggggagagaagtgagggcaattaatttgttctcaagtccctgtgctttcagaaacctagacatcttccctggctccacccccattatctgaacgcttgctccctaataattaagccctttactggggccagaatgagggacaaactatgtcacagaacagaccctgacatttaggttttattctcatcttggcatcggtgacatctgtctgagcyatcgcatattcaagcggctactcccaagattgcatgtgtttgtttaaaagtgacctgctactacctcaccattagcccactgggacttgcttcctctttaaaattttatgtaacactgatgctcctgttttgatgtgtatgaaccttaatctatgtgatatgtgactttgtgaacattgaattttttaattgagacctggggcaaggcatagttgtagctatttttatcctctttcctggcacttcttccctgtttggcacttccagcccctgcttcttatcccaagactggtatggcattgctgtgtgttaattctgccccacaragtttcatagcaagcactaaagactgttacctggaaataagaaactcttggcctgttgggggcctcagtgcaggactcaggacatccagttgctagactgcagctgttgtcagccacctgtacttctcaggctctatctgagatatcatcctttctttccaactgtgggcttcttatatctacttctcagacgttcattttcaagggccaaaatgttcccactccaactcacaatctgtgggaaagtagcagctctggtttctagaaaaattcagaaccttccctttccttctttctggaggcaaagggtgaaactttaaagcctgacagaacagaaggcagtttatctcagcagtgaagggatggcagtaatgggatggcagtcagggtggaccagcagaatgggtgaagagatgtattggattggctgacttgctaatcggagctattctttttttccccttttgaaatcaggtggagatgttacagccaaaaatatctggttggcagaaagtgttctggatatcctgacagagcaaaggtagcatccaccacgaagggtggggtacaggccagataatggccattaggagtgtgggtgtgggaaatggggatgaaaggattgtgtggcccaagaacaccttaagttagagagggggaggcaaggagagggagagacaagtgtattgttggcaagtgaagaaattaatgcccaaggaatgaaggaatgggaaagaggtctttgccaaaatatcgcatagcccagaaaaactggcttcatctgataagggtttatttttgatccagacctccttggaatgtttatcttagggggaagttggggaggaatgagctcagtagaattgggccagccaaacacccacgcctggcaggtatccttttctcccctgcaagcttctccatccaacccctgctctttttgaagtggcacagggggcagttggggtggagcaggtaatagagattagtgaatcctgctggagtttgcatatagggtttggaggttccagtggtagagggtgcatcagggggtacatattgggctttctggctgattctttcccttatccatcaaaataaagggccagaaattttatgagggctattccacatctgaacttgtttggaggtgaggctttccccttggtttcagtcttcctcttgcttgacttctaagtctcttttctgattgaggacaccatagtagtcaaatgattgagagggctaatagtgtccatactatctgtagttcagaagaatggacctcctcccaacgttcacacttgtgaaagagatggctgtgtgctgtgctctgcccaggtctgagagccctgccctgtctgctgtgcagtgccacctagtgctctgggcacggatgtgcagccacatctgggcctggagccacttctgttattggtgtcattgcactagcacgtgagatcctaacagtctcttcttaccagataggtctttgttcctttttactgtcctgggtcagggggcctttcaactctttctttctctttattatgccattccaggattcaggtaatttcgttacctttgctagcaatctttctaaaaagtgatttttcttattttattcgtggtaccaaatacgtcctgtccccataccttaaagctgaatttcctgtacaggcatcagataacagccagataactgccctgttttctaccctccaaaaaacttacatcttttggtgaaagtcaatacctagaaatttaaaactgtgtcctctcctacaccctccttctcactcccttccaaatgtttctagggctgtggagttaaaaggtagcaggtaggggaggaaacgttccccagtaaccttggctagtgtatccattctgtgaaaagaaaaggccacagagtcttttaattaggtggcttgagtagttttccggaatcaggatgtggcctgcttggactaattaaacaccatctcatcttcctgcagttccctgccttccaacaggggggccaaagccattacaaattgtttgctgggaggagacagcgtctcaattttgtcacttagagacaggattagagttttaggaatatccccactgtgtctttctctctactccttttaaagcaactgggaacaaatctttcattacccccttttccctcagggatattctgaaactcatgggaaaaggagtttgccacccaaaatcgggttctttttttcaggttgtgatttaggacaggtgactcattgtgtgggagtggggactcgttgtgtatcagtgactagatagagccagggaaaggtttgtggcatggtgagctgctaatgataagcagactgagctagcacagtatgttctcaaaactccaggtcctgaaagggtcttggcagtccccacatgttcttgcaccacacttaagaaccactgacttagggacacttacccagcttttccccatagtctgacctgggtagatactgtggttaattctgtccctagtacctcacatgttgcttggcacatgataggcactcagtaaatgtttgaatgaatgagtcaacaaagagagttattttcttggaagctaagtagttaggtggtaaaaagagattgctttcatttggcacttatctttataggcacttggaagagaaaattaggaagttgtccgtagcttagccagttgatagtccaagatagatactagcatgagtgagcaagcaaaaaatcaaagcatctactcccagtgtcaaatcatyaattatttctgaggcactgtagccaagcccaagaagcgtgaattgggagggtgaatagttctagacagagcataggagccagtgtgtttcctccctgcagggagtgggtcctgaagagcagcatcctcattgccatggctgtttacacgtacctccgcctcatcgtggaccaccatgggactgcccagctccaggccctgcgacagaaggaagtagacttctgcatctcactgcttcgggaacgggtgagggaacaggacaaaaataatgtggggaagtgagactcaggctaagatacctctggaggtttatgcagtggagtcagaaataccttgttagagatgaaggtgcatcaagatstggtgttttccatcattcatcaacagatgagggtagaaaggagggggagttagtgtaaaatagccctaattcctagaaatgctacctgttaagctggcatctttgggatttccctggtcagcttcaaggatactgttgtataccacagacataagctgtccttgtgtgcctaccatgacacagtcccccacctactctcctgggtaattcccatggtctagtgggattatgaattgtcctctatcagacctcccatgtggcaattaaaaattttttttactttttatttttgtagatactgggccttgctttgttgcccaggctgatctcaaactcctggcctcaagtgatcctcccacctcagtctcccaaagtgttgggattataggcgtgagccactctgcccagcctaaaattaatgttagataaaaagttaaaattcacttctctagttgcattagctacacgttgctaatgggtttcatttagactacacagatatagacatttctaccacagaatcggacccacagaattagatactgcagaattttgttagacaaaataagtttgaggttagggtttctggggctcaacttgccagtcccatccttttgaaactttaatcttccttgaactggattgaaacagttctgagtggagagggaggtagattaatgtgaaagccagcagggcttcagcacttcccactaacctctcatccttgatatcagtccccagcttccagctctcttcccctgaacagctaggagccaatcctttggttccagaagaaatcatagtttcttcaaccctctttccttccctccctagaacatgttgttcctttgtcctccctccagcaggtaaacaatccatgtttttattctctttcctrtcccccacttcctcttccctatcaagttcatggaatgtctgatgattggtcgggatctcgtaagactacttcagaatgttgctaggataccagaatttgaactgctttggaaagatattatccataatcctcaggccttgagtcctcagttcacaggtaagtagggtcttaggcatcctgtccttgagagctgggagttcaatgtstatgtcttgcttgaatcaagaaggtagaggttggtgggtaggagagtytttggtggtcagatttaggaagcctgggacagggcaagctttgccaagtacaactgcgaatggcagaggtacagaacaattcatgtagttcctagacagcccctacttggcagactccagctgccacattactactaagaaaaaagtgagacagataactgtagtcctcctcccctcttcctggcagctccttggctcaggaggtgagccagtggccagtgttcagcttcacggagtctagcaggggagtcagaggtcaactcgtgagactgagtcagtagagggctggaattagtcctgtaagagaaggcccctccctgggaacagtcttgcctcgaattccaaggatccagcttgggcaaaatccactttggaggagggagtctccgtgtgcctcctcccgacaaggtcctttttatatccctttccctttcccagggtcctgctatgttctgaacaataactgtacagctttgctccccaccccacctcaacacacacgtgcttgtgatcgtgcatgcacccgctcccctcctacacacacacacacacacacacacacactcactctgaaggcagttgtccaggacctgggaagtcaggaaagaagaaagtgctggaaattgtagtactcttatattgaacatctatttcattgctttaagtgcctccactgtgttagacaaacatgtgttacctcatttaatcttctggacagccctgtgagtattttagtttctacatttatacataaagaaactgaggtttgaggccgggcgcggtggctcacacctgtaatcccagcactttgggaggccgaggcgggcggatcacggggtcaagagttcaagaccatcctgggcaacatgatgaaaccctgtctatactaaaaatgcaaaaattagctgggcatggtggcacatgcctgtattcccagctactcgggaggctgaggcaagagaatcgcttgaacccaggaggtggagtttgcagtaagccgagatcgcgccactgcactccagcctggcgacagagtgagactctgtcccaaaaaaaagaaaagaaaagaaaagaaactgaggtttaaggagatgaagtaatttgcccaaggctgtacagctggtaggttaggtgacagaggcaggtctcttttttttttttttttttgagacggagtcttgctctgtccctcaggctggtgtgcaatggcgtgatctcagctcactgcaacctccgcctcctgggttcaagcgattctcccgcctcagcctcccaggtagctaggattacaggcacctgccatcatgcccaggtaaatgttgtatttttgtagagatggagtttcaccatgttggccaggctggtcttgaactcctgacctcaagcaatccacctgccttggcctcccaaagtgctgagattacaggcatgagccaccgcacctggcctctttttttttttttttttttctgttttttaagatggggtgtcaccatgttgccaaggctggtcttgaactcgtaggctcaagggagccacctgcctcggcctcccaaggtgctaggattacaggtgtgagccaccatgctggtcttttaaattatttttgttctctcatgtcaggcaggtaatgtggggacatggtaacaaggtttgagggaggcacatctcacgcatgagtgtgaaaaaccaataatcatgcttatgagctacaataggatctggatccacatgtttctgactccagggctcatgctcatgccacaaataacattgattccaggacccaaggatgggatcatcaggagcaggaagagcagccagggtttcccatatttttcccttaactttcccatctgttaccagtgggaatcatgtgggtaggagactctggaagaccagcagaagacaggaagtaatatagctgggtcctggggatagtggttgtttggagcagaacacgtaagtgctggttggaatccccacctgtgcttgacctcccttggtcttgtcttggaatttctccgtgagcaagactactggccatcagtacctggcccaggttcccaacatgcctttcattctttctggtccttaggcttcctcttttctcttcccttccacatttgattcaggtatcctacagcttcttcagtcaagaacatcccgaaaattcctagcatgtcgtctaaccccggacatggagactaaactcctcttcatgacatcccgggtaagctaaggtgttgcagcaagagaagaggtcacacgctggctgggcttcttgcttcggtctgtggagctgttaccattgtttactaaccagtagaatggtggctaaatgatcgtacctgatctacctggctactggcttctttgtcctttattcattctgtgcctacatattgagcatggtgctaaggattgggggtacactgtcgaataagagagatacagttccagctgttgtgaagcttttagtttatctaaagtagtcactaaaccaataattatatagaaatactagtatcatttacaagtgtgaaatattctataaaggggagagtgaaagtgttcacrctaagaaacccacgattgctccaggagaaccatgaggtctcaggaagaaagctatgtatgtttccagacytgactgaataatggcagaattacttgagcatgttaaagatgcagcttcctggatcccactctcctagataatttgattgaggaatttgtggggttttttttttggttttgtttgtttgtattttgagatggagtttcgttcttgttgcccaggctagagtgcagtggcgcgatctcggctctccgcagcctccgcctgttgggttcaagtgattctcctgcctcaatctcccaagtagctaggattacaggcatgcaccacacctggcaaattttgtatttttaatagagacgggatttttccatgttggtcaggctggtctcgaacttccgacctcaggtgatccacctgcctcagcctcccaaagtgctgggattacaggcgtgagccactgcacccagccagaatctgtttttagcagacttcccaggccattcctctgcggccagtctggctgtcgagaactgctttcctaatcagctttcccaagtcacccagaataattgtccaggtctgtgttctactgtgtggtagccaccagccatgtgttgccatttaaatgtaagttagtctgcaggactaggtatgataaaaattcttggccggacgcagtggcttatgcctgtaaacccagcactttgggaggccaaggtgggcagatcacttgagatcaggagtttgggaccaccctggccaacgtggtgaaaccccgtctctactaaaaatacaaacatttcgctgggcgtggtggcacacgcctgtaatcccagctacttgggaggctgaggcaggagaatcacttgaacccaggaggcagaggttgcgataagccaagattgcgccactgcactccagcctgggcaacagagtgaaacgctgtctcaaaaaatatatatatattaagttagttaaaatgagttaaaattaaaaattcacagctgggcgctgtggctcacatctacaatcccagcactttgggaggctgaggctggtgggaacacttgaggtcaggagttcaagactagccgggcaacatgatgaaaccgtgtctctacaaaaaatacaaaaattagctgggtgtggtggtagctactcaggaggctgaggcaggagaatcacttgaacccagacgcaggaggcagaggttacagtgagctgagatcgtgccactgcactccagcctgggcaacagaatgagattccatctcaaacaacaacaaaaaaattcagagcctggtgcagtggcatgtgcctgtaatcccagcttctcaggaggctgtggtgggaggattgcttgaacccaggagttagagaccagcctgggctcaagcaatcctccccatcaatgagaccctgtctcttaaaaaataataattggggccaagtgcggtggctcacgcctgtaatctcagtactttgggaggccaaggcgggtggatcacttgagagcaggagttcgagaccagcctgaccaacatggtgaaaccccgtctctactaaaaatacaaaaatcagccaggcatggtggcatgtgcctgtaatcccaactacttgggaggctgaggcaggagaatcgcttgaacctgggagacagaggtcgtagtgaactgagattgcaccattgcactccagcctgggcaacaagagtgaaactctgcctcaaaaaaaataaaataaataataattcgatatctcagttacaatagctgcatttcacatgcataatagcaaccatcattgccgaaagttctgttggatggtgttggtctggaagtatctttttgtttgtttttttacctttttgctttatcttggttgatttcttctgacagttgggggaatataagaagagggaaaccagatccttttccttatttagtgttactatttgtgatcacttagggtctgtttgaggaaaaactttccacaagaaggtttggagagtctaggctttggataatggtcctgctaggtcagcaccaggaaattctcagttgatgttgagtggtgaacagacccagctcttactcttgaagaacatttcttgctgttcaccagtggctcaagaaaatgagaaaaggttatacttctgactggagagtcagtgaccagtgcaaggagtaaagagccaaaaactggactgaagttgcagttgggggtaaatgtagcctgaggtcagtggcaagaatgactgtaacatcagaatgcagggcaagctagaaattttcagcattttttttttaatcaagaagttctcctaaaggaggggagacttacgagacagtatgagctaatgaatgaattgtggagaaatagaggtctagggcaaacctagagttaagtggtgctcgttttcctctggccaaggaccccacactgtcttctaaggtctttttcttgcttcccctttccccaggtgcgatttggtcaacaaaagcgataccaagattggttccagcgccagtacctgtcaactccagatagtcagtctctgcgctgtgacctcattcgctacatctgtggggtagtccacccttctaatgaagtactgagttcagatatcttgccccggtgggccatcattggttggctcctgacaacgtgcacggtgagrgcaaaagatactgggtggtgaagggtgcctcttccatggtgttcccatgtttccattcttcttcctgactccagggcsacttgacycctaagggcccttctttcactctggtcttccagagtgtctcagccttcacttccctttgtgtctctagaaatttacttacactcattattttccatctgggtttgagattgaacaggttcatctcccccattactgccaacccccaaaagcctgggtttctggagcgtccctgcctttttcatttttgcttccagaaaccatatacagctattcctcttaactgtttctttctcagattcagagcttgcattctttagaccctcaccaccatgcctttttggcatcagctttgtctacttcccttctgtaaatgcagcgaatctgcagtggaggcatttcctttcaaatgttttcctctctgtgcctagggtgggaaactatccattctctggcatctggctgccccctgacctcttccaacagggttcctcctcccccatttgactgggtccttggaatgtgctgattcagatatgacaacaggctattcctggaggggtgggggtctcttcttcaggaatgtgcctggagagcccagaaagggcagccaaggggtgctagtctgactgttgcctcagctcaggggtgatgagtggacttctgagtccaagcattgtcccctatgggaatcagagatatgaactgctggatgtatcaagaacccaggcctgccgagcatggtggctcacgcctgtaatcccagcactttgggaggttgaggtgggcagattgcttgagctcaggagtttgagaccagcctgggcaacatggcaagaccccatctctacaaaaaaatacaaaaattagccaagtgtgttggtgtgcggctgtagtcccaggctgaggtgagaggaccgcttgagcctgggaggtagaggttgcagtgagctgagatcctgccactgcactccagcctgggtgacagagtcagaccctgtctcaacaacaaaaagaaaagaacccaggcctggccaggcatggtggctctcacctataatcccaatactttgggaggctgaggtgggaggatcacttgagcccaggagttcaagaccagcctgggcaacatggcaaaacccatctctaccaaaacaaaacaaaacaaaacataaagccacgcatggtggtgtgctcctgtagtcccagctaccaaggaggctgaggctgggaggatcacccgagcctaagaggtcaaggctggagtaagccgtgatcatgccactgcgctccagcctgggtgacatggcaagaccctcatctctacaaaaaaatagaaaaatgagccaggtgaggtggtgcgtgcctgtagtcccaggctgaggtgagaggctctctcgagcctgggcggtggaggttgcagtgagctgagatcatgccactgcactacagcctgggcaacagagcaagaccctgtctggaaaaaaaaaaaaaaaggttcggggggtacctggcccaatccctgtcctctgtcctcttggttaagaccataagaccacagagtattcactcatacacaacacaaggggggttagcatttcaccgtgtttcactaggaactgaatttcatagatgaaacagccaagtggggcctggaatctgtcttgggactctgaaatggaggggggtgattgatgaaactagccctctgtttctcccctctcttttccagtcaaatgtcgctgcctccaatgccaagctggctttgttttatgactggctgttctttagtccagacaaggatagcattatgaacataggtatgtgaccaagaccaggcggctccacttccccatccccctaagcccccactgccttccttagtgatagcagtcataaatctcagggcaccgtggagtggaggcagtttatctgggagcagctctgttgttcctcatcagttttcccttgacctagaaagagaattgctttgataaggctaagccatcactgtacctcctccccacagtcttcaggatgcatggtcttcaggaggggagggcatgggcaaaggaaaaggctgtaccatgtcctgcttctcctcacctattacttcccttctcaaagctgaatgctgggaacaagaagggaaatgagggctacaagctgtttcggggcctgtctgctcttgggtctgctcagtggaaatggggggaatagacatagcacttcccagagccattcatgtatattgacatcccattttatggagatagaaacagactgactttagcctggcgtggtggcgcacacctgtaattccagctgctggggaggttgaggcatgagattcgcttgaacctgggaggcggaggcttcagtgagctgagatcgtaccatttgcactccagcctgggtgacagagcaagactctgtttcaaaaaaaaaaaaaaaaaaaaaaaaaagagagagagagactgactgatgtgaggggctctttaatttcacatcctccagaaccagccatcctggtcatgcaccactccatgaagccccacccagccatcactgccacactcctggacttcatgtgccgcgtaagtgttagagctctcttttctccccatgcctggatgagcagaattcagtgtatctcccctaatctcccagtgaacgggtcttctcggtatgccttgactgagagcagaaatggtcatgggtcctatcccccaagttaataaatgcttcccttccatattccactgtctgcacttggatcttcccattttctgtggggtttctcaatcacaaggatggtgactcaaggtagaatctggtttccttggggagcagccaggtccagtaagaatttctcatttgagtggcctggagtggtcaggaagtccagttctctctgcagccatactccccagtgtcccctgatcaaaaccaaagcagcttttcagatctaattcagcggaagcctctggatggagtcctgtgctcatttttcccctccttcttcgcttccagatcattcccaacttctatccaccattggagggccacgtgcggcagggtgtcttttcctccctcaaccacattgtggagaaacgggtcttggcgtaaggaatttggtgggggaaggaggttgttttcccatttttcattaggtccaggtgtatccaaatgttgccatagcactgctggcccttttctctgacaggtgtaaaaagtattggctctacctcagactgctgggcatatgtcttcttggctcttagaggaatttctctcctgccatcgtattacaaaggtcttcaaatgccttcatgttccctgttgacccccttcagggatctgagtatggtccagttagactgattgtgcttagacctatctcaactccatgttgagttagaaatgagaagctctggccagacacagtggctcatgcctgtaatcccagcactttgggaggccaaggtgggcagatcacctgaggttaggaatttgagacctgcctggccaacatggcaaaacccgtgtctactaaaaatacaaaaattagccaggtgtgatggtgcacacctgtaatcctagctacttgagaggctgaggcacaagaatcgcttgaatccgggaggtggaggttgcagtgagccgagattgtgccactgcactccagcctaggtgatgagagtgacactctgtctcaaaaaaaaataaaaataagagaagctctgatattgaccttcatcatgttccccatttagacacctagctcccctgtttgacaaccctaagttggataaggagctgcgggcaatgctgagagagaagtttcctgagttctgcagctcaccctccccacctgtggaaggtatgaggcccrcccattccatcacctgtgtcaaaagaggggcaagacaaccaggccttcaggccagagcccctttcaggatgtcccacacagttctccacttccgtgacactgtccatcacagtttttccttcctcagtttatcttttttattcatttttgtgttgtctgtcttgattctcttgctttatctaatcttatttgacttgctcatctttcttgttctcttaactcttttctcctagtaactcctgctcagtagttagaaggctttcatgtaatatttacaatatttatctcactttaacttgcccatctctcttcccagctctaggccctggcctctgatgacagtttgtcatgttgggcctcaaaccttactctcaatacaactgccatctccttaccacacatacacactttgttttgggataagggtctaagtcaagtagtattttccaacttggttttaaattaaagagcacttggaggctgggcatggtggctcatgcctgtaatcccagtactttgggaggctgaggcgggtggatcacttgaggtcaggagttcaagaccagcctggccaacatcatgaaactccgtctctactaaaatacaaaaaaatttgtatttggcgggcacctgtagtcccagctactcagaaggctgagacatgagaattacgtgaacctgggacggggaggttgcagtgagccgagatggcgccactgcactccagcccaggcgacaagagtgagactagcacttcggactgtccctgatcttactctagttaccaatcctaatgagctgagcatagaggagtcatgtccagtgttgctcttattcctggcaacatccctctgcaggtcatggagggttgtgaggacaagaggtttgtcaagaggtttgtcctcccagggtcagtattccatttagatgataaactccttattctctcacttgccctccattctcccttcctagaagcatggggcatgttagaggacccaggaggccattaaatgccttatctttttttactcccaagtcaaaattgaggagccagtttccatggagatggacaaccatatgtcggataaggatgagagttgctatgacaatgcagaggcagccttcagtgacgatgaagaggatctcaacagcaaaggtgaggccatcagcaagggctagttcagggttgtgtcagccctgagaggaccagttcccagaagcagcctctctgcactcttcctgtcacccttattcctgtgagttaaagttttgttcacagggtatctggatgagactccagaatgcagagccctgtacttaacactcaaggcaggaaggaaaaaagaagtggttcctgcccttgtttgcttgtaagagctagtacatgtgcacagtcagggagatgcttcaggcactcacacagcattgaggaaacaggtgcacacttagggcatgtgaggaaggggataagtcattgaggggactgtctytgttgctggcatctgggcaaactgacttctttcccaaatcactccctttaggaaagaagagggagtttcgcttccaccctatcaaggagacagttgtggaggagccagttgatatcaccccttaccttgaccagttggatgagtccctgagggacaaagtactccagctacagaaggggaggtgggtacagaccttgttctcaacttcaggaggttcagccccaggctctctacctggtgcttaatgggtatagcaggagatgggggttggaggcaaacatgataggagtgtgtggagaggtagctgaagcttcatgagggagttcttctgcactttacgttagggagtatgagctgggagtggggcagcctcattccgtaacaccttgagttcccactctgcagattcttgggagaagaacctctgagaaccaaggcaggattggtggggattttccttttctttgggcctctgcccagagagcagccaattctgccctaaagcctccccatccaagctgggattttacacagagctcctttgttttgtctctgtgcatgtgagtgtgcttgtgcactgttctgggtgtgtgtcctgccctctgctatcatttatgtccctgggatttcctctcatttctgtcctgcagtgatacggaggcccagtgtgaggtcatgcaggaaattgtggaccaggtcctggaggtgaggaggaacccaatcccttagggaggaagcagcctagcctgcttagcttacacgtctcccagggaagacaactcactttttccctcccctagatgagtccctcttatagtggggaggggagcttgctgatcctggaggtggaagcagatgagttccaagactgggatcgtgggggcaggagggcttgggtgtaggtagtgactctccctcccttgtctcatcacccaggaagactttgactcggagcagctgtctgtccttgcttcctgcctacaggagctcttcaaggcccactttcgaggggaggtcctgcctgaggagattactgaggagtaaggctgattttccctcactccagagcctcaggagccagagggtgctcttacagcctgagtccaagagaccccttactgtagacttgagaaaaatctgttcacttggtgtttttattctcacatgtaccaactcatttaaacaagagcttatttctacctgctgaacaccgtgcgtactggggaggttgacacctcctcatgcttccagcccttgctgctgggcccagtaactctaatctgctgaattaggtgtgattggaccttggcctggagcctgtctccaaagggcaagagcgtggtcccatgttaggaacctgttttctctgttaccaagcctgcggagcagcaggaagtttgccttttgggtagggaaggagcaggctggtgtctagcctccagctggtcctccrtatgtgccagcagcccccctcacatggattctcaaatataaccctcttcttgtaggtccctggaggagtctgtaggaaagcctctgtacctaatatttaggtaagcacgcagctataggagatactgttctaccctccatcctccctgacagcacacacatgtgctcctgtcctggggtaatgggactcgctttccagggaggaggacatatgctgtgggcacagacagcccatgccacctgagaaactccatgggagagtctgccctgggtaaagttctgttcctctcctcccatgccccacctccaggaacctatgtcagatgcaggaagacaacagcagcttctctctacttctagaccttctctccgagctatatcagaagcagcccaagattggctaccacctgctctactacctgagggccaggtgggtatggtccccatgtttcaaatggtgtcaggacacatcctggagagcctctcttccacacgctgactccccaaccctggactgtcatcaccagggccttctttgtgggtctgtttggttgagttggtttgtttttaagagacagcatctcactctgtcacctgatgacactgcggctcagtgcatgtcactcactgcagcttcagactcctgggctcaagccatcctcccccctcagcatcctgagtagctgggactacacaggcatgcactaccatgcccagataattttttaaaatttttttgtagagacagggtcttactttgttgcccaggatggtctcaaactcctgggctcaagtgatggtcctgcttcagcctcctgagtagctaggattacatacaggcatgcgccatcacgcccagttattggttttgggtttttttttcccctactctgagtaagccttgtgtactcctaaggcttttttttaatttaaatttttatttatttattttttgagacagggtctcactcagtcacccaggctggagtgcagtggtacaatctcagctcactgcaacttccacctcccgggttcaagcaattctcccacctcagcctcccaagtagctaggactacaggcacccaccaccacgcccagctaagttttgtatttttagtagagacagggtttctctgtgttggtcaggctggtctcgaactcccgacctcaggtgatccacccaccttggcctcccaaagtgctgggattacaggtgtgagccactgtgcccggcctcaataattttttagtatattcacaaagttatacaactatcactactatctgatttagaaagaacatttttatcaccccaaaaagaaatctcatactcattagcaatcactttgccattttctccccttcacccagctcttggcaaccactgatctgctttctgcctctatagattattttggacattttcagataaatggaatcaaaccgtatgtgatcttttgtgacttgcttttttctttctcttttttttttttttttttttttttgagacagagtctcgctgtgtcgcccaggctggagtacagtggtgcgatcttggctcactgcaacctccgcttcccaggttcaagcgattctcctgcctcagcctcccgagtagctgggattacaggcacagatcttcacgcccagctaatttttgttttgtttatttgtttgttttgagatggattcttgctctgtcacccaggctggagtacagtggtatgatcgcagctcattgcaacctccgcctcctgggttcaagcaattctcctgccttagcctcccgagtagctgggactacaggtgcacgccaccacatccagttaatttttgtatttttttgtagagatggggtttcactgtgttggccaggctggtctcgaactcctgacctcaggtgatctgcccacctcggcctctcaaagtactaggattatagacgtgagccaccgggcccagccatttgtatattttctttggagaaatatctattcaaaaatgttcctatttttaattgagttatttgtctttttattattgacttttaagattttttttttttttttttttgaggcagagtctcgctctgctgcccagactggagtgcagtggcgcgagctccactcactgcaacctccgcatgctaggttccagcaattctcctgcctcagcctgctgagtagctgaaattacaggcgcacaccaccacgcccggctaactttttgtgtgtgtatttttagtagagacagggtttcaccatgttggccaggctggttggccaggctggtcttgaacttctgacctcaggtgatccgcccttctctgcctcccaaagcgctgggattacaggcatgagccaccatacccggccaactttcaagaatgtttttaagattttgttgcataccaaaagtgttctttatatattctggatgcaagtctcagacataatgatttgcaaatattttttcttccattctgcgagttttaacttttttgatagcatcttttgaacaaaaagtgctaactttttatgaagctaaatttgtctatttttttcttttaccacttgtgtttttgttgtcatgaagatttactcctgttttctcttctacaagttgtgtggctttaattcttacatttaggcctacaagccattttgagctaagtttgtatatgctgtgaggtgtcactgccctcatggttagagcccagaaagcaagagagaaagccttctccagcctgacctgagccctccctcttctgttcctgactctcatccggcagtagcttcactcactgatcgtggttggagcccttttgagctctggggaaggatggacagaaagaagagtatcccctggttcccctgagttatcaagcccctgtgggaggcagttgggagggacatgaggcagattagcacagggcatctggagccagcaaagcagttttagagcgggagcctgcttcggggatgcttgaaggtgggcactggggtcaggctgctggctcaggcccagctggtcttgcagcaaagccgccgcagggaagatgaacctgtacgagtcatttgcccaggctacccagctgggcgatctgcacacctgcctgatgatggacatgaaggcctgccaggaggacgatgtgcggctcctgtgccacctcacrccctccatctacacagaggtcagtgcctgcatccgtatctgtgccggggggctcacaggaacacacctcagtgaacactctgagtacacacaaccctgaaccctcttttgttcatccccactaacctaggtgggccattgcttcccacactcacagctgtcccctccttccacttctctttattagtggttgaaacatttctaaaactccctgaattcctatactttggtgtaactgatgtgcgttggggtctgagcctatatacttggcttctcagattgggccccatcatctggacccaggacagatcccacaaaccagatccatgttcatatgtcccaggccctcttgtcctctgatggctcacccttgcttggattctctctgatagttcctgatgaccagggcttctgtagtggagactcactttcatttcccctggttcactcacactctaggaactgggacataacaggtatcggccctttctcctcttggtagaagttcccaggaagagggaaataaggacccagggcatgacaggaggaactgtgatctcagccgagtactggagggaggaggggtgcagatcctggacacagggtactttcctcccccttctctagatgaggccctgcctaccccacacacctccagacataaactctctacaccacctctttggccaaaggtcagcacaggttggacttctttgctgccagggatgcaaatatttattctaccactgctcccacacagaatcagccaccatggccagtcctctcagctctggctttatctctagtagttccccattcctttctgtacacacatgctttgggaagtatcagagaaaacccacacccctgatggtgtgcacacataaataacaaaacttgggggcttcaagttcttgaagtcttccagcatcatagctgttggatctctgtttaggggtttattttagggcctgtgtctggctgacccagtcaaaccttgagatgtaataaggaaggagagtgggctatgggataaaagctgaggagcccatccaggactcttcccctctctttttccatttagtttccagatgaaaccttgaggagcggagagctgctgaacatgatcgtggctgttattgactctgcacaggtgaacattgagctctgacctccccagaagatctgggaggcagcattagggacatagggcctctgctctccctcmaggcctgcagacagggagcccatgcctcccaggcaccctccctcctggctacagtggtgtgcgctttcagccatggggcctgggaaggaaaagtggaacacaagcaaggcaggctgaggttaggccaatcctgcctggagttccccttattctccatattctttgggcactcctgttccacagcaaaagctgagggggttgtgattttagctctcaactggcctttcctttggctcggaatgaaaatggtcagaccatttctacttgacctttttaccatgcataaggtccccaagaggctgtagctttgctcgggtccttctgaggcctgcactgggatcccatttctcctcctctccacttagttctcattcataaaagaggaagcttagcacccaagaatcctccttcctttgtctttaccctgcccaacctacatccagagcccagcctctcagggtcctttcctcctcaggcttagaccaaggctgtaactatttttgcccaaaatagtcctaaggttcccactcaggccttactttatcagccccttcatccttcagagatggcagcattcgttgtgtgccatctccttcccattcctttaaactgggccttcacttcctctaatttttttttttcccttacgagccctcctgcgtccccctccatactagcttcctggcccctttcagagctgatgggttctgcctccttcctccacctccttagctccaggagctggtctgccacgtgatgatgggtaacctggttatgtttcgaaaagactcagttctcaacatactcagtaagtgatcaaatctttaggtgcctgggagaggagaggagggcagggtgtcagtcctgtgtattttacactatcaggaaagctggttctggggctgggaagttaaggggagagaaytgtactccaccctggtgcggtctggggcagtrtctttctggatctgtcctacctctgtaacatccctgcttggggtgctggtagtcagtggattgggggtgtgtgtgtgtgtgtgtgtgtgtgtgtgtgtgtgtgtgtgctggtagtcagtggatgggggggtggggggtgtgtgtgtgtgtgtgtgttcgtttgttcattcttgagagagatgtttcttttgtctcttccagttcagagcctagactgggagacctttgagcagtattgtgcctggcagctctttctggcccacaatattcccctggagaccataatccccatcctgcagcacctcaaatacaagggtgagtaggcttttgggtagggagcacatcagatatgacacttcctatacagttagggcaaggctgaggcctctaggcttctaggatgagcccagatccattgtcctccttcccaccaaagtgcacaagggcaggctctctgtcagccacttttgttctttaggtgagtcctgtgggcccaccatgagccaggctctgggctggggctcaggtggctcagggactgataggagtggggtaggggattcttcctggctcctcatcaaagactgtccttattccctccagtggctgttgggggatgagagaggtccccagattccatcctggaatcataccttccccctgaacagcctctgcccttccctcacagagcacccagaggccctgtcctgcctactgcttcaactccgaagagaaaagtgagttccacttctggggctcttyagccctcaattttaacatcccaagagctgctgtggtctaaagggcttctgtcctsctccttattgccatattttttcctgtcrttaacatctgcttattctgcccttcccccaacgtgacttacaaatgagcagctcccctgggatctgggcttcctctcgactttasccccctgcccaccaggagctgccctcggaggtggggaggtggggaccggacatccctgtttcctgctgccacagcagttctaatccctggtggctcctgctccccgccgcgccccccccaccgccccatgctcctgctggccaccgcacagctaatccaagaggagggagggtcagggtagaggggtcacgcaccatcctctccctcaccctgtgcagagcagagccagctggacctactgtgccttgacagggtggggcagagagggagagggtggcagccccctcttcccgcaaagccctttagcaacatcccccgataaatggggcagcagctgtgtatcttatccttcctacctttctgccttccttccaccctttctgctctcttgcctgagagactataaatggtacagagtgtcctagaggaagtgggaagcttggaggctgtatggggctgtgacttcacaaccctctcctgcccccttcctccagctggaagccaggttggcccacagctttagcagggtaggggtaggggagcatctgcatgccacatgcttgtgcttctgcctcccaggcccactccctgactgttctaggggaggaggaggagaactgagggtcctccttcccaacacacacacgcacacgccttctcctaccacagcaagtgaagaatctcacttcttctctcctggcttccacagaggatgaaaccaggcattccttggcctaaggagaagagggagagggatgtgagagtagtgggtgggtggggaggccagggcttgggaaataagtgggagagacccagcatgccctgcggccactgtgcaagcagcacccagtgcccccttcctcccccaggcccagcgaggagatggtgaagatggtgctgagccggccctgccatcctgacgaccagttcaccaccagcatcctgcggcactggtgcatgaaacatgacgagctgctggccgagcacatcaagtccctgctcatcaagaacaacagcctgcctcgcaagagacagaggtgggacacggtccctgtctaccctccaggccatggcggtctgcagtgattgctgtcggtggtggtggtggtggtggtggtggtggtgatgggggtcagtgctgtcccagcctggtttgtgggcgacatctagtggtccgaagccacatggcatgcgagaccaccgtggccctttctccccatcttccagtgcccctgtggccaggatcccctgttctaggcacacctttctcacccaaccccagccctcccaggctgcctatcctgttccccatgtaggctgcctctgtcttaagggggccctggcrggtggagggtgtctcgcactctggaaccctcccacactcagactctggctctggtgattcctgcacagcctgaggagctctagcagcaagctggcccagctgactctggagcagatcctggagcacttggacaatctgcggctcaacctgaccaacaccaagcagaactgtatgccttccaccctcggcgtccagtgtagacggtgctgccctggcccagactatgcctggagccaggctgggggcaggggcaggacacccggggccacaacccacactcgggataaaacaacctgtgcgtgctgtttaataagctcccagacatctgattgtttttccttccctgctctcccttttcttcctctagtttttagccagacsccaattctccaggcgctgcagcatgtccaagcgagctgtgacgaagcccacaagatgaagtgaggctcctgccactttgggccttggaaagtagtaggggaaaagcctaagggagaggaagcctgctagggacataaacgtaatggccagcaagaccttagggtccagggttgaagaaaaagaaggcctaggcctgggggcagagaagaggatgggaggtgccgtaggagcagcaggctcccactcaaagarctaccgctccttttccttagattcagtgatctcttctccctggcggaggaatatgaggactcttccaccaagccacccaagagccggcgaaaagcagctctgtccagccctcgaagtcgaaagaatgccacacagccccccaatgccgaagaagagtcgggctccagcagtgcttcagtgagaacccagccagtgcacagggggaaaaggagcactgggtgcaggtggagtcggcgccagcagctgcccaggctgttaacttcccatttcccctcccatctcttccaggaagaggaagacacgaaaccgaagcctaccaagcggaaacgaaaagggtcctctgcagtgggctctgacagtgactgaggccctgcattccccatcccacccccggctggactgccctctccttcttggtgattcaaaggttaatagaggctgaggagattgcaggggaaacacccttgctgcatccccaagctcccccggtggaaggaggagctttctcctctggctgagtttgagaagctgccatgcagcccctagccccttccctcctcctggggcctccagcccctcacactgctgttcccagtgatatttgggatctgactgaagccagaggctctgtaaaatcagaccatagtggaagtcctcagccccctggccccttccgcaatctcctcccccagtctcccaaagagccatttcaacagagaagggaaatgacaaaggggcagctggccagataagctaggatgagagcagagactcagtgtgtgggtgtcccttcctgcttccccttcaggtcttggtttgttctgaagggacgttttatagtcactatccacatgccagtgtgaaatgggcatctatgacgtggtcagggtgtccattcctaatcatggggcagatgccacaagcattcagaaaggagtytgaaagggtggccacagccccacgtggtgtgccctggaggcttaggttggtctgaggttggcacctcaatctacaccagagcccagggagtcccagaggcaagtttcacagaattgtcaaatgatcccatttccttgagtctgtttttttttttgtttttttttgttttttttttggcagagataatcgtgtcttaaaagttgtttttaaatgacaataaaacaagccagaatgtcttttgtgctggagtgtctgctggcatttgccccgtgcatgtatagcttggtcttgatttgattggcacccctacttgtaaccgcagaacatccccctttcccttcctgttctgcccccacttttgtctagagcagaagggacttggctttggccactacccatccttcctgctgccactggaggtgggagccaggcactgatctgtctatgcagaaccatcccccrtaggatgaggcctgtccttactcatttctcaagaaacaagatgcttccaaaaggtctgtcatcctccagttgaagtctgtgtgcctaccaagaatggccggaggactcgctgcttgacgggagggatgctccagcttggtctccagggacaactgtacctggagataaagtctggataccagggagggacagagatgctcttccttccacagtgtggccacttgctgggccatgtgaaccagcagaggagagttccttggctatgctgttgttcccccgctgtccagggagaatggaggtggactgaggagtgaagtttgggcgaactgcacagagctgctcctcttcaccccgaaaatttgtctttttacagaatccaggttctcccctccctcatcactgctgttgcttcctttgaaagtctaaaccactggaggcttctttttccttcctctctccttccccagtttcctctgtcccaattaaaaccaggatggagagcatttgctggctggccccaattattgtacccttgcccaaagggaggggcctctgtcgtgacccctcagaaatctggcagtctgggtttccacctttcccctatttaactctcagcccccacccatcccctggggttgcggctggcaggccgggacttgcagaaccaaatgggccaggggccaagttcattcttttgggagagagcaatggtaccttcccttaacgggaaaacgagaaatattgaggggaagatggactgcgatccaaacgccctggctctcaggcctggactctagggcttagccagatgcctaaaccgcccaagccgagaaacaacttagaagacagacataaccctgggattcagggaaggcgcgagcaccgcccaggacctggtagggtgcgagccgcgagcagtccgggagggagcgcgcctagggcggagcgtaggctgtggggggagggctgggagtccggggccgccccacacccgcactcctcccgggtttctgctctccgcccgtgtggagtggtgggggcctgggtgggaatgggcgtgtgccagcgcacgcgcgctccctggaaggagaagtctcagctagaacgagcggccctaggttttcggaagggaggatcagggatgtttgcgagcggctggaaccagacggtgccgatagaggaagcgggctccatggctgccctcctgctgctgcccctgctgctgttgctaccgctgctgctgctgaagctacacctctggccgcagttgcgctggcttccggcggacttggcctttgcggtgcgagctctgtgctgcaaaagggctcttcgagctcgcgccctggccgcggctgccgccgacccggaaggtcccgaggggggctgcagcctggcctggcgcctcgcggaactggcccagcagcgcgccgcgcacacctttctcattcacggctcgcggcgctttagctactcagaggcggagcgcgagagtaacagggctgcacgcgccttcctacgtgcgctaggctgggactggggacccgacggcggcgacagcggcgaggggagcgctggagaaggcgagcgggcagcgccgggagccggagatgcagcggccggaagcggcgcggagtttgccggaggggacggtgccgccagaggtggaggagccgccgcccctctgtcacctggagcaactgtggcgctgctcctccccgctggcccagagtttctgtggctctggttcgggctggccaaggccggcctgcgcactgcctttgtgcccaccgccctgcgccggggccccctgctgcactgcctccgcagctgcggcgcgcgcgcgctggtgctggcgccaggtaaggctggagctccgaactgactaaggcggggccagccacagaagggggcgtgtcggagaccacagaaaggcttggtctcatccctgggcctgggaagaagccgactatcccttggggttcgaaagtgggtggagataggagtctccgggtttgagaagggatgaggctgaatctttggtgccccaaggatccccaaggagtcgagttccaggcctcagacccaagatggaatgtccatacccttcaccctcatccaagagcagtgtgggctgggatagggaggggacatgggtcataggctcttctaggtagagccagggccccggcgttgtgctttcccacccttctagagtttctggagtccctggagccggacctgcccgccctgagagccatggggctccacctgtgggctgcaggcccaggaacccaccctgctggaattagcgatttgctggctgaagtgtccgctgaagtggatgggccagtgccaggatacctctcttccccccagagcataacagacacgtgcctgtacatcttcacctctggcaccacgggtgagggccgggcaccatacttagctccccgaaaccaaggcagaggaaggcaggggtctgctcccagaccactccttcaaagcccccagagaggatgctgatttcattggcacatcctttttctccccatcatttcactccccagtctcctcacctcctactcatttctccacctcccccagaccacccatatttccaggacagcctggtctcggtcctcagcttctgtcctgcctccgcctctttctgtgggaaacccagcgggggtgcaaacagataggtagagcttggagtttgcccttcccctgatcgtcccataactgccaccccacaggcctccccaaggctgctcggatcagtcatctgaagatcctgcaatgccagggcttctatcagctgtgtggtgtccaccaggaagatgtgatctacctcgccctcccactctaccacatgtccggttccctgctgggcatcgtgggctgcatgggcattggtcagtctccccaaccccaccttcattaattcatccagtagacatttattaagcacgtactatggtgtgagtcctccagggtagataatctagaggacggatggggcagagccctactcaccaggagctctgtacaatagggcaatgtcacctgcctagacctacagactgaggaacggtgaggggggccatacagccacataactccaggctgcagggtcaaaggcagggaaggactgtgtcagtccaggaacaggcaagtaagagaagagggagagagagacaaggaagtgagagtgtggaggatgagatctttggggctgggaagtagggaaagggcattcacctcttctaaggctggggacaggggccgggggaggggaaagagggccagcacggcttcctgacggtgtgactcccacagtgggcccttcccagggaaagactacagtgatggctggggtctggaaagaggggcttgggctccccactctgctcctaatcttacctcccttcttcccccctgcccacttctggcaggggccacagtggtgctgaaatccaagttctcggctggtcagttctgggaagattgccagcagcacagggtgacggtgttccagtacattggggagctgtgccgataccttgtcaaccagcccccggtgcgtgggcacagatcctgggcagagctgctgacacagggctagctcacggggagcaggacagttgacaggagacagggagttggagggagaagcagcaagaagaaaatggcagtgtaagataaggagccagagatggcctaggccatctgatgcttacggcctctgaaggaggtcacagtaggagggggttctggggaatggggaacaggaattcacttccgggagcgggcatcttgatgctgaagctccggcccctctcccactcatctcagagcaaggcagaacgtggccataaggtccggctggcagtgggcagcgggctgcgcccagatacctgggagcgttttgtgcggcgcttcgggcccctgcaggtgctggagacatatggactgacagagggcaacgtggccaccatcaactacacaggacagcggggcgctgtggggcgtgcttcctggctttacaaggtgaggggcagagaggaaactgaaaacccgtggaacagcagagggctggcaggagagggggctcatgtgactgcaatgatccagtacccaggtctccctttccccagcatatcttccccttctccttgattcgctatgatgtcaccacaggagagccaattcgggacccccaggggcactgtatggccacatctccaggttggtggtgttctggtggggtgggcggggtgctgaagctggcacaggaggactggaattggagactggggtggatgggggcagaaggctctgggaaaggtgacaccactcctgaccctggtgactctgccaggtgagccagggctgctggtggccccggtaagccagcagtccccattcctgggctatgctggcgggccagagctggcccaggggaagttgctaaaggatgtcttccggcctggggatgttttcttcaacactggggacctgctggtctgcgatgaccaaggttttctccgcttccatgatcgtactggagacaccttcaggtatctgtccataactggtttttcatcctggacatctgatctctgtgatccaaagcttctgaacctcaactctctaatctgccacctcaacctgggtcctaagctaatctctcattctcagatctcaccatttcatccctgtgacactgacctctgacctcatctccccaccaagcccataaggccctgacccctgactcccagtttcagatctctgttctctgacaggtggaagggggagaatgtggccacaaccgaggtggcagaggtcttcgaggccctagattttcttcaggaggtgaacgtctatggagtcactgtgccaggtgcctaggcatggaaggtgggggaggcacccagccaccaccccgaattggtagtacttgggcgcagggagcacgaggccttcgtggtggtcagccatggaggggcttactctgtctcccacacccaccagggcatgaaggcagggctggaatggcagccctagttctgcgtcccccccacgctttggaccttatgcagctctacacccacgtgtctgagaacttgccaccttatgcccggccccgattcctcaggctccaggtaaccggccacttcccccgccggcccctcaccccatatatcctcaccccacatatccaccccgtgtatcaacttaggagtttgatggctcccaaactccacaaagggacccccaacgtaatacactccgtgaagagaaaaaacacggagacacaagctcttcaccccacttctttccttatccctgccttcttctggcctggctctttctcctccctgtcacctcctcccctaaaccttgacctcacactccctttcccaagacttgctccttaacaaaattcaggcaactcccctgaaccacgtgggcagagtccccttccctccaaatccctgaccctcctgtccccaggagtctttggccaccacagagaccttcaaacagcagaaagttcggatggcaaatgagggcttcgaccccagcaccctgtctgacccactgtacgttctggaccaggctgtaggtgcctacctgcccctcacaactgcccggtacagcgccctcctggcaggaaaccttcgaatctgagaacttccacacctgaggcacctgagagaggaactctgtggggtgggggccgttgcaggtgtactgggctgtcagggatcttttctataccagaactgcggtcactattttgtaataaatgtggctggagctgatccagctgtctctgacctacagtatctgtcattatctctctgtggaactgctttttccttgagagttttctcctggcgtggagccacaggccccacattcctgccctgactggctgtgggccagagccccgtatctggaccttggtgttttcctctcaggagaccctgtgtgaccttcgtccttggagaacctctggtgactgatgtttgtctgtgctcctgtgtagctcgccccagttttactctccgagtgccaggctcccactgctctgtcttgggaactggaggacccgaggggtcggctcaaagggcagaggtggacagaagcacacagaaatgccacctccggcagccagcccaaactgctcccccagaatcaggtgtggccgggcctggggaagagtcttaaccagcccaaacaagtgtttgactgtgggggaaaggatgctcaagatatccctctgcctcgcagctgtctctgagaagccaatctttgagggggaagagtggggtgcccctgcctccagatgttcctactcctacctggtgactgtcagacattcccagaaggagcagtccccaggggggaccctccggtactgcaggagagtttgacggaagcccctccatggagtgaggctcagagtgcatgtggtggcaggagggatggtgggaatcaaaaggacaaaggcctctcgatccccaaatgaggtgtccagaaagttcatcatctaaaagcttgaaatgatgaagctcctgc

SEQ ID NO: 97024 - DNA, 24506 bp, Homo sapiens
cttgcactctttgcatttcaaaccaagtgaatttattacccattcaaaactacctgaattaaataaatcaaaattttaaaaattggaaaaagtaaaaaacccgaagtagctcccctagtcattttctcaacacatcctcctgttttattttcttcgtgacacttgtcagtgtgcaagatgacttcatttttttagtattaattacagactgggcgggagaatggcatgaacccgggaggcggagcttgcagtgagccgagagagcacccttgcactccagcctgggtgacagagcgagactccgtctcaaaaaaaaaaaaaaaaaaaaaaattacagattgcatcttgctatgttgcccaggctggtctcgaactcttgggctcaagtgatcctcccacctcagactcccccaagtgctgagattacagatgtggaccactgcgcctggcgagatgactttatttattgattcccttgtttgctgcgtctcctgaccaagaggtcagccccacagtggcaaggatcttggtgggtcagcctggttcatgactgtgaggctaagacctggcacacagcaggtgccctgtaacgtatttgctaacagactaggcaaaacatgtcttcttgttttttacaagaaaatgtatttggaatcacttatgtaaataaagtttaataatcaaaactctacttcccctcaaaaacagatgagtaataagaaggaaagaggttattggactgggttatctctcagaatctgttcggctctgaatatttcaaaaacatttggttgggtttttttgttttttttttttttttttttttttttcgatttgggcttttttctttttggtctggatgttggtggaatttccccattcgtaagacttttctgtgagagggaagtaagagaagaagaaataagcattttgggttcctacattggccttccttccttccgctggtacatgtagttggggaaagggtcggttttcttctttagttctgttgaggccccagagaagcaaaggatccccaaaggacaacagctgtcaggcctccatgtccaaggctgagcccaaatgcgtggggttggacttcccagccccatcctgccccttctgtaacacaaaatgtgggagaaggtaatgagaaattctgtcttgtctcctggcacctcttccttttcctttgagggaccaccatatcccatctcacaatccattaaggtttgaatggagtggaccccaaccccaagtgcgaccccagcctggccaatcagacacagtgactggtcagcatgtgacctggtgtggccaatgagaaccagcccccaaagaccactgctgcaactccggggaaattggcaaactttctccactggggaggacaggctgctggggtgtaagcctggagctgcaagtctccgctaccttaggaggagaccctgaaaggtaatgaagccaactcggagaaaataaaaagagaccattcatgatgacatcatctgacaactagatgcagccatgccttaagactctaaactcttcaattacatggcccagtaaattccctgttttgttttcccagcttgaattgggcttccatctctcacgactcaaagaaaactgacaaatacctccttcagctactgagaaattgtcaacaatcctccctcatcaacatgataatcaccaaactcccacctctgccatgcaaaggccttggggctctaaacccagcttcctccctcccatttcttccctgatgccactccatgccttggtccaccactatacatctttggatatctccaaattctccttagctatctgggccccattacagcttctcttgtctaagacctggatcatactcatgtatgtcctgatggtatctgctgtgcgtctaggccttagaattggtcattagcattccctgaatgtttccatcttattcttggatgtgggaagcacttgggctgatggggcactgcagagcgttgccggctcacatttcttggaggggaatcacagtctcttctctgcatctgcgtctccctcctcatgccttgcacaatgcttcagggctgggagtaggaatgtattaatatagcaagctggctgggttgcagtggctcccgcctgtaatcccagcactttgggaggccaaagcaggaggatcccttgagcccaggagtttgagaccagcctgggcaacatagtgagacccagtctaaaaaaaaagagagagagaaaagaaaggaaggaagaaaagaaaaaaagagaaagaaagaagagaaaagaggaataaaatatatcaggcaaatcccttatcctcactggcttcaatttccctgtcactaagaggggtgggcgggggggcgtcccctcctaagagaaacactggagaacacaggatccttacctctccgcactcttctgagacctggcagatctgagaataaacttcagcaatgacagtggccctggagagcacaggaaggccctcaggaggggactctcctccttccaccccaccctcattccaccccacccttcctcaccccaactcacttgcagtccagccctcccccaggaggtaaatctgggatgtcctctgaggccagagtcctgaaaactgtgttcaggctggggggcttctgagcagaggcacacagttctgagaaagagtcaagagttaggctgggcacagtggcgcacgcctgtaatcccagcactttgggagaccaaggcgggcggatcacttgaggccaggggttcgagaccagcctggacaacatcgtgaaaccccgtctatactaacaatacaaaaattagctgggtgtgattgtgcatgcctgtaatcccagctactcaggaggctgaggcaggagaatcgcttgaacccggaaggcagaggttgcagtgagccaagatcacgccactgcactccagcctaggagacagagcaagactccatctcaaaaaaaaaaagaaaaaaagaaaaagttatggcacagccttcactggccaaccacccctccagctgggcccccagagtctgctcaccagcgattctgcagcccagggctgcgtccagtgctagctccctcctgatcgcctcctcagaaggcctaggggccccagggaagcagaccaggatgcaggtcatgttgtccaggctgccctgaagccggtggagaaaaaggagcccggtgggggagagtccaaggcagagcttcccaacaatccccaggttcaagtcccccacttcattctacttatgcccatttctttcgcgtcccacccacctgccaatcctctcttactgggaccaaacccggtcctaggcgctcccaattgagagaacaatgccttttccctaaagctccgcccgctctgatgtttacctgctcttccaccttccagcactaatcaatacttccggcccggctcctacgacccagaatcgcccctttccaaaagaccacgccctttctcttaagtcccttccactaactctcccgtgcctcaaagcatccctcaggctccgcccctgtattttggccctgcccacttcaggccacgcccttcgcttgagtcctatcccctcctttgctagctttactcttgcctctctatcaaagccctcctccccaaaaccccgaggctctctccctctgctgcaccaagccccaaaggtaccacgccacgcccccaggaccttgcacagacacgtgtccaacagctgcgcgcagagaagctctggggccaggcccaagcggaggcgtgaagccaccagtcccgccagggcagcaccagacacagtgtcccagacgccatcagaggccaggagcatgaactcgtcctcagcctggcgtgccagtgcggccacctctggctccgcagaaacgagctgtagctcggggggcctccccggagcctccttgtaggtaaagtcgcccaacgctcgcgacacggccagagagccctcgacgcggcggcggcggatggtgccgccagcggcgtggatgcgctcgcgttcccggggtcgaaggggccggtggtcctctgtgctgaaggccacggcgccagcgcggctcagcaccgcgcgggagtcaccgcagtgcgccaggtacagaaaccgcggggagaccagcaacaccacggccgtgcagccgcccgtttccacgcggggccagagggagcgcaggcgctcgtcggcgctcaagaaggctcggcgcagcgcctcgcgcacgccctcgggctcgctaggctccgggcccagctcctggagcacatggcctggcaaatggcgtgcaccgaagcgggcagctcgagccccaccgtggccgtcgaggacggcaaacaaggcccagcccgggggcagaccaggtaacgaaagccaagtgcagtgagcatcctccatgcgcgcgcgccagccttgcgctgcgctcgccccgaagcgcaggcccccagacgcctcggcacccccgtgcggccgctgggcgcggcgcggcgctgtcaacagagaccgaggcccttcgggggccctgcgccccgcctcctcctcctcctcttcctccctcccctccttctccctctcctttttcttgcaagcggtccagaggagacgctgcagctggcgggccaggaccgccatccttcagccctgggatcaggaaggctccaccctgtacacctgcccgccccctccattaatcccctccgctgtgagattttaaaccatctaaatctccttcctgtcctttgacctgctctttaggcgggtcactagaaggaattacacttctgggtctcctgtttcctgcacctacaaagcggggtttgggatctgaatcaggaaaaaaaaagaaaaaagataatactgtaccagtggcaaactattacatagtactaatgtgtcacacactgttatacatcatcatctccagtttacatatggaagaagaaacagagtcacagaagtaaccggtgttccagggaaactaattctagaatctgtgttctcaacacaacactcagtccaagctcctcccacctcagtggtacagcccccagcctcaaaacctgtaaataccatacttggccgggcgcggtggctcacgcctataaccccagcacttagggaggccgaggcaggcggatcgcttaagcccaggagtttgagaccagcctgggaaacatagcgagaccccgtctctacaaaaattaacatttagccaggcgcggtggaacacacctgtgatcccagctactcaggaggcttaggtgggaggatcacctgagcccgggaggtcgaggctgcagtgagccgtgatcgtatcactgcactccagcctgggcaacagagcgagaccctgtctcaaaaagatatatatatatatatatatatatatatatatatatatatatacatattttttttttctttactgtttttagttcgacccctcccctctggggcttcgcttattttctcttccaggccccgcccatccaggattcaggcacacagctccagacccttctaattttcgcagacctggaatcgcctggaatccgaccccacccagttatatttgaataattccctgttgctttagccctgcccacgtttgagctcctccgcgtgccccaaaagtttctgaatcgtttcattcggccccctttctcgctccctctgcaaatctaggctcggaccctacctcagagcattagaatctttccaccccctcctcaatggcaccccgagcaccaccccaacccacccagggatccacgctctcatcctctctgccgtggctcgttcaccatcctctcccaagtccctcgccagactccaggcctccttccctcttcccctaaaggctgcgccctctgcgatctaggccccgcccttcaggccgctttcccctccttcctggctccgtagcccaccctcttggttccgcccctttagtaagaaggccacgcccctccgcctgatcctcggcgtttccccgcccctcaccctccctctggtaccgccccgcccgtcttctggccccgcccccggccgcgcgctgcagtgccttccccacctcggccccgcccgcccccgccgagccgagcaccagggcggcggcggcggcggcggcggcggcggcggctggagcagcccgggaggaggaggcggcgagaatggcagcggcgtcgtgggcgcggcggagatgagcgcccgcgaccccgggcccagggcggcacagccggagtgggcgggggtcccgatgcaggcccgaggggggccatggggcaggtcctgccggtcttcgcccactgcagtgagtagaggaagactggggcctggtgtgggccccagaggttcaggtggggtactccccggtgtcccctcggcgcttgcccgcaggagagccgggatggggggaggaggcataggagacaaaggaagctctcccctcccccgcgctctggcggcgacgggggtagcctgacccggaggacctggacgaaacagggcggaggtgagggggcactgagacagcaggcggggggcgcgctgcgctctgggacgtaccgcccggccccgcccgggagcgaggacgcgcgcggggagctgtcccctggctctggtgctggccgcagctggcggggagggggttgaacggagggtagagccaggatggaaaacaggggtctggctcccaatcacttgccttcgcatcccatccccgttttctgtccaagaggcagccccgacctcgcccaaactgtccaaccctgtcccgggaaaacagccatccgtggtttgggggcaaggactcatgggttcttagcggtctttaccactggttaatggtaatcctggggaagacccacaccattccaggcctcctattccccagctgaggaaacgaggtgagggcacagggcgtcagatttcaatttccaaaccgcattgagcatcatctatgtgcaaagctctgaactagctctaaggggctggattcccagctgaaaacgcctagcctcacaatctctgagctcacagctataacagtccatgtctaccgttctctgtcccacacatgggggttctgacagctggggatttcaacacccttagatctagccatttccatgtctcgcgtgtccagatgccaaaattctaagaattggtgatttcagcattttcgagtatcatcccaacattctatgatcttgtcgttaacttcagattacaaagggaggaccacctcgtctgtctctccccaccgcccttacctctctgttctcacctcccactcctctcctcctcagtcactcttctccagtcatatcttcgcacctctcagttcctcagatgccaagcatggtgcctggctcagggcctttgcactggctttcttctctacctggaagacgtccctgaacatctgcatggcttcctcacttccttcagatctctgctcaaacgtcatcttatcagagaagccttcttgaccaccctatgagaaacagcaccccttcactttctcttcccctacccttctttactttgctccctatgctcatctgcacccgacgtcatatattcacttgtttattgtttgtctatcccaaagagtgtcagctctaggagggcagggattttgtctgttttcttcacagctgtatccccaggacctagaacagtgcctggcacatagtaggtgctcaatmagtggttgttgaacgaatgaatgaattgaaacctcctaagattcctactttgaagactctaagattaagattcctggatttggacttcaaagactctgagcttcatcaggcagtgatgctaggttttagagtctgtgtgcagaatgttctaaaaatcccgtgattcaaatattctaagattccaggactgggacacttctgtgattcggacagtctaagcttctaagagtcttcgattctttccctctcgcagaagaagctccgtctacagcctcctcaactcctgattccacagaaggtaagtkgtggggagcatgtgaaggggctcagggctgggcagctcagggacctgctgagggaaacaaggctctccttcacccactgcaggagggaacgacgactcygattttcgagagctgcacacagcccgggaattctcagaggaggacgaggaggagaccacgtcgcaggactggggcaccccccgggagctgaccttctcctacatcgcctttgatggtgtagtgggctccgggggccgcagggattcaactgcccgccgcccccgcccccagggccgctcagtctcggaaccacgagaccagcaccctcagcccagcctgggcgacagcttggagagcatccccagcctgagccaatccccggagcctggacgacggggtgatcctgacaccgcgcctccatccgagcgccctctggaagacctgaggcttcggttggaccatctgggctgggtggcccggggaacgggatccggggaggactcttccaccagcagctccaccccgctggaagacgaagaaccccaagaacccaacagattggagacaggagaagctggggaaggtgagatgtccgaggtgctgggaccaaagccaagaggggtgggtggtttctccttggggcacctccaagaagaaagctcacggcctcctctctctaccgtatcagaactggacctacgactccgacttgctcagccctcatcgcccgaggtcttgactccccagctcagtccgggctctgggacaccccaggccggtactccgtccccatcccgatcgcgagattcgaactctgggcccgaagagccattgctggaagaggaagaaaagcagtgggggccactggagcgagagccagtaaggggacagtgcctcgatagcacggaccaattagaattmacggtggagccacgccttctaggtaagcaacgtgtatgaagatgctgcattggcccacagaaggcaaaaggtgagaggattttgaattaaagggaccarcctcgcaaaggaacagtacatagtggaaaagggaagagatagacgtgatatcacatctggctagacgtgataaactccgctttttaaaaaaatttccccggccgggcgcggtggctcatgcctgtaatcccagccctttgggaggccgaggcgggcggatcacttgaggtgaggagttcgagatcagcctggccaacatggtgaaaccccgtctgtactcgggaggctgaggcaggagaatcgcttgaacctggaaggcagaggttgcagtgagccaagatcgcgccactgcactccagcctgggcgacagagcgagactccgtctcaaaaaataaaaataaaataaaataatcctccctcttctggagtgctcctcctagtggctgattttggacaggccaaatccctgaaaaaatacagttctctccttatttagatgtggccgtagaatatttataagtaaactctgtgccttttaaaaactcttctttttggccgggcgcagtggctcatgcctgtaatcctaaacactttgggaggccgaggcgggaggatcctttgaagccaagagtgcaagaccagcctgggcaacatagggagactcgatctctatttgaaaaaacaaacaaaaaccctctttttcctgaccacatctattggccagttgtaaaatgacccagccttactttaaaatatgctccgcctccaggaacagctatggaatggttaaagacatcattgcttttggctgtttacaagacggttccaattttggaattgtccccacctctgtggacagccattggctgggtccaaaggggccccaccccccctactcctgtcctccgggttctactgaagtgggcaaaatccccgagaagcagcggtgtccccagcctctcactcggagccgatatggggagtaaaggtgggcttgcggaacgggctggacgggggctgaggtcggcggaacggggtccaaactcgcccttatctcctgcacatccggagcatttttattactgatctgcttccgcagcgctgcmggctggggctagggggccgaggggcagtatagggaggacccagagggagcatggggtcccttctccttcgagccagcactttggggcccaggagcagggaggaccccctcccccagcctcggccccaggcagcgctgtcactcaggggccagacgggccagaacagctgcggggaggccccctccccccagcgtgcctaaacttagcccccgcctcaggcgacctggcccctcccccatccacyggcgccggccactaggagcctgcctgggagggccctgctatggggagggaggggctgccctatttggaggtaaatgagaggagatgcattggaaggagacggaagtgaggggtgagcctctaagagggaccggtcggaggggtcagttggagggagtgtgggaggatagagaggatctggaaagaaatagaaaggtactgagttcctggttttcaggactcaaaggaaagcagattactaaagtttctttttctttttaagccacagagtctccctctgtcgccctttctggagtgcagtggtgggatcatagctcactgcagcctccaacacctgggcacaagtgatcctcccacctcagcctcccaagtagttgggactagagccacaggccaccacgccctgctaattttcttattttgtttgtagagacagggtctcactatgttgtccaggcctcaggtgatcctcccgcctcggcctcccaaagtgttgtgattacaggagtgagcctaaagtttagacagatgagatgaaggttggggtacaaaggtcactggtcagggctgaggttgggtttaggaggtgtgttttagggtctcagaaaggggtcagaaatttgagttaggccctggaaaggagtatggcgtgattaatacatttaggacttagaaacatgtgttgctaagggtatcaaggggatatcactttacacctgacagattggcaaaagttaaaaagaactgcaacccactgcagggcaggatgctgggaaaagatctttctcttgcttcttgtggaaataagaactgttatggtcttactagtaagcagtgtttcaaaatttatgacattaaaaaaatatatatgaccgrgcgcggtggctcatgcctgtaatcccaacactttgggaggccgaggtgggaggatcacttgaagccaggaattcaacctgggcaacatagcgagaccctatctctacaaaacatttaaaaattagccaggtttaggaggtcgaggtgggcagatcacaaggtcaggagatcgagaccatcctggctaacatggtgaaaccccgtctctactaaaatacaaaaaattagccgggcatggtgacgggcgcctgtagtcccagctactcgggaggctgaggcaggagaatggcgtgaacccgggaggcagagcttgcagtgagctgagatcgcgccactgcactccagcttgggcaacagagcgagattctgcctcaaaaaaaaaaaaaaaaattagccaggccaggcatggcagctcatgcctgtgatcccagctagttgggaggctgaggcacaagaatctcttgaactcgggaggcagaggctgcagtgagctgagatcatgccactgtactccagcctgggtgacagaggaagactttgtccaaaaaaaaaaaaaaaaaaattagcacgatatcgtggtgccacctgtagtcccagctgctaggaggccgaggtaggaggtttgcttgactctgggaggtagaggctgtagtgagccatgatcacgccactgcactccagccagggtgacagagtgagactctgcctctaaaaataaaaaaaaaaaaaatgtggccgggcgtggtggctcacgcctgtaatcccagcacttttggaggccaaggtgggtggatcacctgaggtcaggagatcaagaccatcctggctaacacggtgaaaccccatctctaactaaaaataacaaaaaattagccaggcatgatggcacatgcctgtaatcccagctactcgggaggctgaggcaggagaatcgcttgaacccgggaggtggaggttgcagtgagccgagattgcacaattgcactccagcctgggcaacaagagcgaaactctgtctcaaaaaaaaaaacaaacaaacaaaccaaggtcaggcgtggtgtctcacgcttgtaatcccaacactttgggaggccgaggtgggaggattacttgaggtcaggagttcgagaccagcctggccaacatggtgaaaccccatctctaccaaaatataaaaaattagccgggtgtggtggagccctcctgtaatctcagctactcaggaggctgaggcaggagaattgcttgaacccaggaagcggaggttgcagtgagccaagattgtgccattgcactccagcctaggcaatagagcgagaatccgtctcaaaaaaaataaaaacaaaaacacacacacacacacacacacacacacacacacacacacacacacagacacacaaccagtccacccagcaattccaccctgggaatctgtctcagaaatagtcactccaggaggtgagaatatctgttggaggatgttgcttgcagccctgcttgcggtgaaggggttaggaaacaaactgaatgacccagcaataggtacatggttaaataaaatgaatgagagcacaggagcacagccacaacacagaatactatgcagctctttaaaakaatgaattaaggccaggcgcggtagcacatgcctgtaatcccagcactttgggaggccaaggcgggtggaccacgaggtcaggagttcgagaccagcctgaccaacatggtgaaaccccgtctctactaaaaatacaaaaattagccgggaatggtggcacatgcctgtaatcccagctacttagaaggctgaggcaggagaatcgcttgaaccagggaggcggaggttgcagtgagtcgtgattgcgccactgcactccagcctgggcaatagagaaaaaaataaaaataaaataaaataatttttaaaaaattgcaaatcgggctgtgtgctgtgcctcacacgtataatcccagcactttggagggctgatgcrggaggataacttgaggccaggagttcgagactagcctgggcaacacagtgagagccaccyacctctaaaaacagaaacaaaaacaaaaattagctgagtggtggtgcacacctgtagtcccagctactgaggaggctgacgtgggaggatcacttgagcccaggagatcgaggctgcagtgagctatgattgcaycactgcctccagcctgggtgacagagtgagaccctgtctctcaaaaaaaaaaaaaaaaaaaggaaatcaggttatgctcaaacaggtgtgtcgagaagtcattttcagctgtaggacagggaaagggaggtgaggagaccagccaggtcaggtacaagccctgatgccccccacccctccacagtggcggacctgctgtactggaaggacacgaggacgtcaggagtggtcttcacaggcctgatggtctccctcctctgcctcctgcactttagcatcgtgtccgtggccgcgcacttggctctgttgctgctctgcggcaccatctctctcagggtttaccgcaaagtgctgcaggccgtgcaccggggggatggagccaaccctttcmagtgagaacccccggcccctgacctgagcccctgtcctgaccctaaagcatgacccacgacctcaaatcaggcaccgactcccacccggaccccgactcatcttgatcatttttcatcccgatcccctaacctacccttcaatcctaatctctgatcctaacctggtacccttcatcctcgatcccttcccctgaccctgaccctgaccccagccctctacatgtgattcctctgagctgcccctcagtcctaactctggtcttctcccaaccgccattcctctcccttgtttcagctgcccctgcaccagtctgagctggtcacccactgagtcgccccacactcctttgtccccgcagggcctacctggatgtggacctcaccctgactcrggagcagacggaacgtttgtcccaccagatcacctcccgcgtggtctcggcggccacgcagctgcggcacttcttcctggtagaagacctcgtggattccctcaaggtggcctggagctctcagcccctcctgggtycccccattcacctctgcatggctagggggtgggagggcsactgttgggtaaattcacagcatgagagggaattcccggtgggctctgctgaccctgaccttcacccccagctggccctcctcttctacatcttgaccttcgtgggtgccatcttcaatggtttgactcttctcattctgggtgagctgggaaggccgtaaggggcaaatggggacttggagtctggtgggggacagggctccagatggaactgttcatctcttgggaacaccctgacgcccccatctctgtacccacaggagtgattggtctattcaccatccccctgctgtaccggcagcaccaggtgagtgtgacaccctcagttgtcagcaccccagctaaacatgggggtctgaccatctccttccagaaccggggtcccattgacagatgtccsggscagacacaggtgtcctggctgcagcaccttcccaatacaaccagagtctaagtaacatgtcttatcagcatcagccagggacaggctttttgtttgtttttgttttgttttgggttttctttgagacagagtcttgctctgttgcccaggctggagtgcagtggtgtgatctcggctcactgcaacctccgtttcctgggctcaagcaagtctcctgcctcaatctctgagtagctgggattacaggcatatggccaccgtgcccggctaatttttgtatttttagcagagacggagttttgccatgctggccaggctggtctcaaactcctaacctcaagtgatctgcccaccttggcctcccaaagtgctgggattacaggcgtgagccactgtgcctagcctttgctgcctttttttttttttttttttgagatggagtctcgctctgttgcccagactggagtgcagtggcacgatcttggctcactgcagcctctgcctcccaggttcaagcgattctcctgcctcagcttcccgagtagctgggatcacaggtgcctgccaccatgcctggctaattttttgtatttttagtagagaccgggtttcaccatgctggccaggctggtctccaactcccgacctcaggtgatctgcccgcgttggcctcccaaagtgctgagattggccttcactcttgattttaactgacatgtcagttaaatgctactgcattccagcctgggtgacagagcaagagtctgtctcaaaaaaaaaaaaaaaaaaaaccaaaaaataaaaaataaaaacataaaaataaaatcaagagtgggatggctgttgcccacaagactgacattagcaggactgctgacatccatcctatccagagacaggcggatggactgacagccccttctccagcacagctgggagccacatgataatatgccctgccagttagtcctaactctgtccttcacaggctggaatcaccaagactcacaattaaactgtatttaaatcaggccaggcacagtggctcacaactgtaatcccggcactttgggaggttgagacaggagaattgcttgaggccagaagttcaagaccagcctcggcaacatagtaagacccccatctctacaaaaaggttaaaaactagccaggtgtggtggcacacacctatagtcccagttactctgaaagctgaagcaagaggatgagttgaaccctaggaggtagaggctgcagtgagctgtgatcatgccactgcactccagcctgggcaacagagcaagaccctatctaaaaaaaaaaaaaaaaaaaaaaaaaaaaaggctgggcatggtggctcacgcttgtgatcccagctttgggaggctgaggcaggcggatcacttgaggtcaggagttcgagaccagcctggccaacatggtaaaaccctgtctgtattaaaaatccaaaaattagcaaggcttggtggtgtccacctgtaatcccagctactcgggaggctgaggcaggagaatcgcttgaacccgggaggcagtggtggcagtgagctgagattgcaccactgcagtccagcctgggccacagarcaagactccgtctcaggaaaaaaaaaaaaagaaagaaagaaaaagaaaaaaaaaagaacaagaaaaaaataaataaataatccaaaaattagccgggcatgttggtgcacacctgtaatcccagctattcgggaggctgaggcaggagaatcgcttgaactcaggaggctgaggttgcagagaaccgagatcatgccactgcactccaggctgggtgacagagcgagaccctgtctcaaaaaaataaatacaaataaataaataattttttaaaaaacacgagtatataaatcaatccactcagggactcggtgaccaatgccagtgccttctgttctcaccctaccccacaacacacacgtatgcaaactcactcaaagatyaaccatcgtgcccaggacacggcctcactgccagatacttgtgcgttccacctgacatcactctccatacagagtatggcccaactcactgaccctataactggcatctctggcatctaatgtattctatgaagtttagagccgggggtggcgtggtgggccactcttmacaactcctaatttggaggttggggaggaagcagcctcctatgtgactaaagagaagaaacccctccaatcccttctttcacctttctttggtctccccaggctcagatcgaccaatatgtggggttggtgaccaatcagttgagccacatcaaagctaagtaagagcatggggcggaggtcgatgggagggggaagtgggggagcttgggaacctttcctttctactctcgctgtccgcaaatctcctggggtaatgtccccttgaaaaggctgaggaggcaattccaatgtaggccactaggtggagggcaggagctggcttcgggctcttggtcagtttcccacccagctttccccgttgtccccagatgcccaccccgcgtctcttgccccacctcgtgatcccacctgtttctccttcaggatccgagctaaaatcccagggaccggagccctggcctctgcagcagccgcagtctccggatccaaagccaaagccgaatgagaacggtgtctctgcccgcaggacgcctgcccccagcccccgcagccctctggccccctccatctcttgtccgttcccacccacccccctcctcggcccgagccttttcccggtgggtgtcaggatcactcccactagggactctgcgctaattacctgagcgaccaggactacatttcccaagaggctctgctccargagtccaggaaagacgaggcaccttggccgcggggcctgctgggacttgtagttgcctagacagggcaccaccctgcacttccggacccgccgctggaggcgccgtgaggcgttggtgtctcctggatgctactagcccmaacgccggggctttgcatgggkcccaggggaggcctgagcttggatttacactgtaataaagactcctgtggaaaacccgaggcctcttgtgcttccagaaccctccagttgttcacctttctgcactgaaaggcacttaagtgacactccaggagaaccttccccatctctggagaaggagctccctctgccatctgtgtaggttatgaaatgattgaggggaggccgggcgcagtggctcacgcctgtaatcccagcactttgggaggccgaggagggcggatcacttgagaccagaagttcaagaccagcctggccaacatggtgaaacctcatctctactaaaaatacaaaatttagccgggtgtggtggtgcatgcctgtaatcacagctactcgggaggctgaggcatgagagtcgcttgaatctgggagatggaggttgtagtgagccaagattgcgccactgcactccagcctcggcgacagagcgagattctgtctcaaaaaaaaaaaaaagaaagaaatgattgaggggaagatgctgacagaccacccattccagggttagccaagccttggcagccacttcccatgcctgtgctcaaggcagacatcactaatggatcccacaccctgcctactgtgcagccacctcaactgagcccaaacccacgtgtccaacggcctctggatgccccttccaccctaaatctaaccaaacgtcttcttcatcctacctgatttccaactcagagatgttttcactgcccacggtgtcaccaggccagacacccaggtatggctctggacttctacacactcacctcccacaaacaatcagtcacaatgctgtgtctatcctgcctcacaaacttctctcatccacccacgtctccccaccctgattgcctcgggaacaaatacagggcctccctggacttccagtttcaacactaatctgaggcctggcatgatgactcacatctgtgatcccaacacttcgggaggccaatgtgggaagatcacttgaggccaaaagttcgagaccaccctgagcaacataacaagacccccgtctctaaaaaaaaaaaaaatttatccgggcgtggtggtgcatgcctgtagtcccaggtacttgggaggctaagacaggaaaattgcttgaggccaggagttcgaggttacagagagctatgatcacaccactgcacttcagcctgagttacagagggagaccctgtctctaaacaaaaacaaaaacaaaacacaaaaaaactacatactgggcgtagtggctcacgcctgtaatcccagcactttgggaggccaaggtgggcagatcactgaggtcaggagttccagaccagcctgaccaacatgatgaaactccatctctactaaaaatacaaaaattagctgggtgtggcggcgcatacctgtaatcccagctactcgggagcctgaggcaggagaatcacttgaacccaggaggcagaggttgcagtgagccaggatcatgccgctgcactccagcctgggcaacagggcgagactctatcaaaaaacagcaacaacaagaacaacaacaaaaaagacaactaaactcggaaaggatgaagcaaagggacccgtggggagactgggagaacactgaggtctaaagatccacagacttgggtttgaatcctggctctactaccccttcgctgtatgaccttgagcatatgacttcatctctcaaagcctcagtttcctcaaatggaaaacttattaggccgggcacgatggctcacgtctgcaatcccagcactttggaaggccaaggagggaggatcacttaaggccaggagttcgagacaagtttgggcaacatagacctcatctctacaaaaaaattaagtaagaaaaaaagaggccaggtgcagtggctcacacctgtaatcccagcctttgggaggccaaggaaggtggatcacctgaggtcaggagttcaagacaagcctcgccaacatggtaaaacctcgtccctactaaaaataccggatgtggtggtgggcacctgtaagaccagctacacgggaggctgaggcaggagaatcacttgaactaaggaggtggaggttgtagtgagctgagattgcgtcactgcactccagacagggcgacagagcaagaccctgtttcaaaaaaaaagaaaagaaaaagaagaaaactgtcaaccataactatacctacatgtaaagcccttggcattgggcctggcatataataaatgcacagtaaggagttataatattgtttcccaaacctcagtcattccccacatgaccttcatctttctacaacctgttctgctatttatctaatatttttcttgaaaattggtttaatatttaataatataataacaaatgtattttaagaagaaaggttaccttgccaccagaaaccagtattgcttgccagaaatagaagacaatagtaaaaataaacacaaaaatattgacgtttaaaatgtttgtgcagccaggcgcagtggctcacgcctgtaatctcagcactttaggaggccaaggcaggtggatcacctgaggtcgggagttggagaccagcctgaccaacatggagaaaccatgtctctactaaaaatacaaaattggccgggcgtggtggtgcatgcctgtaatcccagctacttgggaggctgaggcaggaaaatcgcttgaacccgggaggcggaagttgcagtgagccgagatcacaccactgcactccagcctgagcaacaagagggaaactccatctcaaaaaaaagccgggctcggtggcttacgcctgtaatcccagcactttgggaggccgaggcgggcagatcatgaggtcaggagatcgagaccatcctggctaacacggtgaaaccccgtctctactaaaaatacaaaaaaattagccgggagtggtggcgggcgcctgtagttccagctactagggaggctgaggcaggagaatggcgtgaacctgggaggcagagcttgcagtgagccaagatcgcgccactacactccagcctgggcgacagagcgagactgcgtctcaaaacaaaaaaccaaaaaaaagaaacaaaaaaaaaaaaaactcacttgttcgtcatacacacgtcacatattaggagacagataacggtgttccaaggagtccttacatcctcagaatttgtatacagaggtgcctagcagcaactatctaattaaaacaaagagggtttaggggatatatcttgaatctggatttgccaagcagagggaatactttttttttctttttttcttttctttctttcttttttttttttttgagacagagtctcactatgttgcccaggcttgtctctaactcctgggctcaagctatccgctcatctcggcctcccaaagtgctgggattacagcgcctgtccaaaactttctaaagatactcttagttaaacttcccataagacaaaatgtttattgatctatcacaaaaagtggtggaagagggtctgattgagattttgggtctgggaatgactaaagcctccaagctcaaaacagattgaagactgaaacggcctttattggccaggtgtagtggctcccgcctgtaatctcagcactttgggaagctgaggcagttggattacctgaggtcaggagttcaagaccagtctggtgaacatggtgaaaccccgtctctcctaaaaaaacaaaaaacaaaaattagccaggtgtgggggcaggcgcctgtaattccagccaaaaaaaaaaaacttttttttttttttttgacagagtcttgctctgtcgcccaggatggagtgcagtggcacaatcttggctcactgcaacctcagcctcctgggttcaagggattctcctgccttagcctcccgagtagctgggatcacaggtgtgagccaccatgcctggctactttttgaattgttagtagagatggggttttaccatgcttgccagatggtctggaacttctaatctcctgtgatccacccaccttggcctcccaaagtgctgggattacatgtgtgagccaccgtgcccagcagaaacagcctttactgagctcctcccagttgcctcagccagtgtcagaattttatatcatgatttctccagtgagatcagttgtactagtctggttatacaaatgagaaaactgaggctgaaagaaggatagtgaggccaggtgctgtggctcacgcgtgaaattccagcactttaggagcccaaggcagaagcatcacttgaggccaggagttcgaggccagtctgggcaacaaagtgaggcccctgtttctacaaaaaaaattaaaattagctgggcgtgatggtatatgcctgtcatcccagggaggctgaggcaagaggatcacttgagcttgggaggtcgaggctgcagtgagccgtttttgcgccactgcattccagcctgggtgacaaagtaagatcctgtctggaagaagaatgaaaaaaagacagtgatgatattcttttattcattccacaaacatttactgaacatctgctatgttctcaagcactttttaggcactagagatacagcaatgatcaaaaataaagtgcatagtttcatggtgctgatattctacagaagcagacagacggtaagcaaatagacacagaaaatggcaggtggtgatcagagtggtggggaaatgtctagcagggtaaggggatagagtgacagagctcgctttttaaaaatttttattttatttattattattattacttttatttggagatggagttttgctcttttcaccaaggctggagtacaatggcaccatctcagctcactgcaacctctgcctccccggttcaagcggttctcctgcctcaaactcccgagtagctgggattacaggcgtgagccactatgcctgactaatttttgtatcattcgtggagacggggtttcaccatgttggccaggctggcctcgaactcctgacctcaggtgatccacccgcctcggcctcccaaagttctgggattacaggccctgagccaccgatcccagccactagctattttatttatttattatttattgagacggagcctcgctctgtcccccaggctggagtgcagtggagcaatctcagctcactgcaagctccgcctcccgggttcactccattctcctgcctcaggctcccgagtagctgggactacaggcgcccgccaccacgcccagctaatgttttgtatttttagtagagacaaggtttcaccgtgttagccaggatggtctccatctcctgatctcgtgatccacccgctttggcatcccaaagtgctggggttacaggcgtgagctaccgcgcccggccgccactcgctattttaaactgggatcagggaaggccccactgagtgctggtcactcagtgagtttttggtattgacatttgatcagatgacagagtgaagggaggcgatgagccatgggaacatgtgaagaggagatccaggctaggggatcggcaagcacaaagtccctgtggtggtagcatgatccatgtgtgcagcaagacatctgtgtgcctaaatccaataatatccaagggaagaggagtatgtgagacagggtcagagggaccaaaggggctggattacagggatttgtaaagcagggtgagtactttgacttttactctgaaatggaagtcatgggagagtttcatgcaggagaatggtattgtcaaagaatcactgacttagaatattgaataatttttcgtgatgagtacacctaaaagcccagatttcaccacgatgcaatcaacatatgcatgtagaaatcggcacctgtacctcctaaatatgtaaaaatttaagaaaaaagaatcaccttttttgtaataaaaattgtaacacaagttcgatttccctaagtggatgggctgttttaaccggaatatggtactatccgtttctgagtctgtctcagtttctccaaccataaaacgcaagtgcagaaattggttatgtctagtgtttaaactcaatcgggacaggatgtctgtcgtcaccagcaccgagacagttcctgggactcagtagacgctcaataaacgtttgaatgaacgcggagctccatcggcctacgcaattccataaaagaacagcaggtgtcgcaccagccctatagccgcctgctcagcgcctttggggccagggtgaatcagactctaacaggaacccactcaccactcctccgcagaaagagaattcggaattttccgagaaggcgcttctgaatgccgaatcatgaatctctcctcttaaaaagctgacttttcattttggaaaaagggggtcctgggccctttaacagcttgccaggtgctcaaacgctgcttcccagaatgcgtggcgctatgtaaatgagacggtttggggagcgaggatgattcatactatatgaagtgaaggcaacgttttacaaggacatctctcacgataaatgagtggggagaacttatagcccttgaagtcaaccatctcacacctttccaaaggacgcgaccataactctaaaaggtaagcttttgcgatccttatatagctgcgcgggaagaaggttgtcctgcccggatgatcctcagtggtctggggtgcaggcttcaaacctgtagct

SEQ ID NO: 97025 - DNA, 44523 bp, Homo sapiens
gacttgaactcctgggctcaagccatcctcctgagtagttgggactacaggtgcacactacctatccagctagcactcattattctcaaagatgcggcacaattgtggaagatatgatgggctttaaaatagaggaaatgcatcaaaatactcactgagaaaaattcccagctagagttaaaaatgctcccagtattgaaatattagcataatgaaattttctgagagaagtccaagtgattaacataagaccttgacccagcttctgcctctgaggcttcccctcatctccacttcggtccttgataaactcacatttccatctggcccagagactaccccctattatccctgggcccactcctggcccctggtgattttccactgctgatacatacctgcgtgagcagacccttagcccagccataatagggatgcttgcagccgctttctggagtcctgcctcaaaccccaaacctcagctcaaacgttaaaactcaaacctcagcttctgcttgaagttgaggatgtgactgtgaatgaaacctatgttttctaaggcttacaaaactctttctctcggtttctctctctctttctttttctctctctctcacacacatgcacacactattatcactaatttaattaatatctagtgaattaggaattgtttcaaataatgacattttgtccttaattcccctacatctcatataatgtttatgtctgattatgacatttcttccttgaattttgtccttaaaatgcattccctttttgaccaaaaccccttgtaaggatactgttggcactagaaggaaagccagaatctacagtttttaaagtcactttcagtccatttttctttgcttagcccaaaaccttaaaaaggctattcactctttctgaacttttctttgatcatcatattttatactttgatttttatttaaataaaaatttttaaaaacctggtgcaccacatgtttaatacccatcctcccgaacattgaaatatctattttcttgtcttattcttctcttcacctaattcctcctacttactataataataataatactttttttttttgagactcgagtctccctctgtcgccaggctggagtgcatgacctcagctcactgcaacctctgcctcccaggttcaagcaattctcctgcctcagcctccctagtagctgggactacaggcatgtgccacgactcccagctaatttttgtatttttagtagagacggggtttcaccatgttggccaggatggtctcgctctcttgaccttgtgatccacccacctcggcctcccaaagtgctgggattctataattattttaatgttatagagaatcctgttttaaaagtttgccagttcagaggagcaagtctacaacagtatatgtaaatcttaaacaaatctgctactgtaagttttatcatctttttctataacagtatattttctctctttttttgccataacagtttttatctcacaaaaaaaactctcagttgtgtgtgtggggggggtgtcatcataaaataacgtgatatagacagaacgcagctgtttttatagatatactcaagacagtggcaacacccagtttctcagtgatttccccaaatcatacaagtcatcaactgactaatcagaaaaggaaagcataccatttgcaactgaagaaagacaaaatctgtaactgaaatctgtcctctcatggttttagtcaaacaaattcacaattactaattttgacaaatgcacattcatcagataagtatttccagggagaagagatactgcagctaactcctgcaataagaaatttaacttgacattttaatacaaggaggtggatgggtatgttgataagaggagactccaagccagaataaaacatacaacttgttcaaagaatcaaatccagccatttaggggattaggactgtatgtgaagaaactatattaaaatctacaaatgggaaggcgggctcagagttgggagctctgagtaagaataaatagttcaagagaaaagaaatgtagtactttgggaggtaacttggggtaggagaacagcatgtaagagaaagatggagagagacagagaagagagagagaagacagagagagagaggagagagaagacagagagagagagagaataattttcaaatataaacataaaacaggatatagtcagaatggggcagagtatcccggtgtttactgatgttcttataaattgaatatctgataaatatttcccataccttgcttgatatcttattattcagaaagcagataaaactagagtaatacctgccatttattaattactcagttccaagcactatactaagcactttgtgtatgtgatcctattgaattatttcaaacatcatgacaagtattaccctcattttattaataaagaaatcaaagctcagacattaattgtacatgttaaaacagctgggaggtagaagagaagaatttgaacccaaagcccatgttcataaccatcccccaaaagtagaaaaataaatgtcttaagaaaaaggtaagcctgttgatttaaatattagaatcagacttgctgctagaaatgaggaaaagagaattgtttttattcaaatacagatgaaaaatatatggttccatgaacaaaaactctaaaagctaatgtaatataagagagacaagaagtggcaatgcatattcacctggccatagtttgaagctgggattgatttaaactgaaatttaatatgaacgacaacgtcttcaccatgcaacatggttgtgtgattcttaacctgacaggagacttttcccacatgattagttttgaggtcatttagcagctgatacaccgaaattattttgaagtgaagaattaaattgttcactggcagaaatctaatttctgttgcaaggagtttaattgttaatgagcttgtattttttttttttttgagatgatgcaacaactgccactgttgagtttgcttaaagccacaccagcaggaaggatttaagtgctttgagcatctaatctatattggtcgagggaaagcatgcttaaaatgttaaaagtgcttgtactccttcactccccagcttgggattttaacaactatccttaatgccaatttcttaaagtctccattaaaaacaaaccaaaagaacataaaatatttggctaactacaacagaaattcacttgataaagctttgagctgtggccagtatggccacttagctaatggactccagccagtgagacgaaccttgccccaacccaaaaacagtggacccacagtgagtggagcacaagactgtccactttcttatccatctcctatatcagcataagaagggtaaaagtgaggtgttctgtgtgtcattaaaatcctggaagtgtccagaagtagtggttgctgacaatgaggagtatatggacttaaatgtctgcttttcctgtgtgttttactttaaaatgaaaatacattcagaaactggacacaaaatttctttttaaaatacgtttttattattatggattcataatagttgtacacaattataaggtacgtctgacatttcaatacaagcatacaatgtgtaacaaaccatggtaattggggtatccatcacctcaagtatttatcatttctttgtgttagaaacattccaattccactcttttagttattttgaaatatatagtaagttattaactatagtttccctattgtgctaccaaacactagactttattccttctttctaattgtatttttgtaccaaatctgagggggcagattttgtactcatctgccccctccccactacctttcccaggctctggtaaccatcattctaccttctatctcaatgagttcttttttttttttttaagctcccacatattagtgtgaacattcacactaatgtctttctgtgcctggtttatttcacttaatgtcttccagttctatccatgttgcagcaaatgaaaggactttttttcttttttatggctgaaaaatattatcttgtgtatgtgtaccacattttctttacccatctatccactgatggacacttacgttgataccatatcttgacaattgtgaatcttgctgcaataaatgtgagagggcagataccactctgatgtactgatttcctttttttttgggggggggtatttactcaggagtgggattgctggctcatatggtggctctatatttaggtttttaaggaatctctatactgttcttcacagtgctgtactaacatacattcctaccaacagtgtacgagtgtttctctttctccacatctttatcagcattcattattgcctgtattttggataaaagccatttcaactgggatgagattatacctcatcctagttttgatatgcatttctctgatgattagtgatgttaagcattttttcatatccctgttggccatttgtatgtcttttttgagaaataaccattcaggtcttttgctcaattttaattggattattttcctattatattgtttgagctccttatatattatggctattaattctgtgatagatgagtagtttgcaagtattttcccccacttgatgggttgtctcttcactttgttgtttgctttgcagaaggttcttagcttggcatgatcccatttgtccatttttgctttgcttgcctatgcttttaaggtcttactaagaaatatttggttctggagcatttccctaacgttttcttctagtagtttcaatagtttcaaatcttagattccagtcttcaagccattttgttttgatttttttaatatggcaaaagatagtgatctgtttcattcttctacatatagttatctagtttttccagaacaatttttggaagagaccatccttttcccaacgtatgttcttggcagctttgtcagaaattagttgactgtatatgtattgatttatttataggtcctctattctgttccgttagtctatgtgtctgtttttatgccagcaccatgctgttttgtttactatcactttgtagtataatttgaagtcaggtaatgtgatgcctccagctttattcttttgctcaggattgctttggctattcttggtcttattgtggttccatataaattttaggatttttttcctctttctgtgaagaatgtcattgatattttgatagggattacattgaatctgtagattgctctgggtagtatggaaattttaacaatattgattcttccaatccatgaacatggaatatatttccatttttgtgtgtcctcttcaatttctttcatcactggaaagatctctacaataaaaacaaaagtaaatttcttcgtggtacaagtaagtcttttaagataagaaattttaagattcctcccaagcaatactgaaaatttccaaaaggcagttattatctctgttatattaatcattatatccagagcccaacgtgtagcaaacagaagaccctctataatataggttgactgaataaatgaacctctatattttatggaattagtttgaggtttttatgttactttcatccctatagagccataaaatgaattttttggtgggggcacacaaaattgcaccacgacagcttttttctttaaaacaagcacaagaataaagctaaacgcaaatattcaccgcactggaaagcactgcgcgtgcgctatcttacgctattggctaacaccgcaactctcaaagaccctcgcaagagaatcacctttgcgcttgctcagttgtggactccacaaacagagggcgggttccaaagaaaaggaaatagtcattgcgcctgcgccgctccttctggggggaggggggggcttgggctggctgcgcaggcgcacaggtaccattttgaccgtaaacatcctgccgatttgaaccgaggatttgggcggcaggaagagccgcggcgtaacggcagccatcttgtttgtttgagtgaatcggaaaggaggcgccggctgtggcggcggcgggagctgctcggaagctacacctcgcaagggctcccccctttccccaccccctcccccgacccttttcccctccccgggccacccagcccgcccaactcccagcggagagcaaggtaagagactcggccgaccccttcttttcctccagctccctccccccaccctttccccgccgctctgccgtcggggagccggactcctgggggcgggagggcgagggagaaggcagccctcgccgcgcccacgcgtgctgccaccctcccggcgcccaagcggcggcgccacccgcccagcccccttcgccccgggcccgccctcggcccggacccatgcagcttgggcccgcatcatcgcttgttcggtaacaaatgattctgatccattctgagatctacaaaggctgttaccctgcaggtccatctcacgtcccccaggaggccggggaaaccctgggctgcggagggaggggaggaggtttgaacgagcccgctctggggaccgggccgcctactccgcgggtaaaaatggctgtctgggaggaggcggtggcgggcccggcgcccgcggtgccagccccgggagcagcaaccttccgccgaactcgggtgcggggctcaagaaagtgcggagctggtggggctgggcggggtggggcggggggtcggcgggtgcccctcggccagtgactgctgctgccctcccgttttaaaaagataatttttacgttgggaatgctgaatatttcacagacgcgtggaaaaagagacggagggaagttgcttctttttccaaggatatttgcataattggttttcccctgaacttttctgatcattctttaaagtgattaaggatatcgggtgttgtagagacgctctgggggaggtgtgtgtttctgataaatgcttgatgcccttttcgtcgctgaaaaaggctttttgcgaatgatccgctttgatagtgtggggtgacactgtcgggttgtgctgccagacttagcggccttcttcaaatttgtaagagggaaaccctgggggatttacttggtcactctgatttgttagtgtcttcagcgtgaaaaaaaaaacagcgtttgtgcgaagagtttctgggaaaggcttgtgtttatcggcttctttttgcaagggaaagttaatctttgttgtcattatactggttagaagagtaattggttttcaggcaaaaatttctrttttcttaaattgggtgtaaatgccagcgggcwgtgcgagtctatagaattttggagacaggcaggagaaggtttctcaaatcgtgaagtcattaaatacctttgttaatgtcggaggcaactaattatttttggaaaggcattgatgaggacatacgccatatctgatcttcaaataagttaacagtttgtatagttgaggtgacagcagtgcataactaatagacatagtgcttttttttatacacaagtcagaattacaaaagaatttctggtgaattattttgtgaaacatacaaattctaagaaacgcttttacagtttggtacagaatggaaattttctaattcttgagaaataaggttgtgtttttagtttaaatgtcaaaccagagttgttaggcatgattatactggctggttaatgttttgctgcaagattgtcttcagagttacttttcgcatcagcagtggcactatgttaggtgtgcccttgtatttaattttcataatcttttttgatgaatattatcccagtttatagttgagaagtaacttattcaccgttacaaaacaactgagcaaagagggagcttaatttgaacctacgactgtctgattgtaaaactcttggtcaaaggatgttagaaccaaaacagaggagatttctagtgtgcagggttagaaatatcttcagagatccttccccctactcccctgaagaggtagctccgttctgatctgagttaggtattgacgttttcaaaggttaggtaaaccaccagatttcaacctttcaggttttcatagtagggaaactgaactgcataaaggttaggcagcttaactgctagttaatgacaatagcaggattatgtctttacttctgagatagtagtttttactttgaataggtggtgtacatttatgtcccgagttaaaatatgtgtrtgtgtgtgtgtgtgtgtgtgtatgtatatatatatatcaaacagtacaaaaaggtaggcctcacttgccctgcatacctactttccagaggtaaccagtatcascagtttcatgtgtacgccacaggtattttaagcttattcaagaactcgtaaatatatagagaaagagcattcttttttaaaactccaacttttttgcacttaacctggagattttccatgttagkacaaatgttgtattcttgtttaaagttgtactgtacaattgtcccttgatattaaaggggaattggttccagraccaaaaccacgaatgctcaagtcgcttatatgaaatagtgtagtatttgcatataacctactaacatcccatatacttcaaatcatctccatttatgatattacaatgtaaatgctatgttaatagttaatatagttgttatagttttttattagtagtattttttattattgtgtttttttgtccccccctccaacaatttttgatcctgggttggtttagtccayggatgcaagaagccatggataaggaggaccgactatattccgttgtttgggtttattaatttttcatatcacttattgatggccaagtaggttatttcgaatgttctgttctgctctggcaaggcagcatagtgttgtagttagaagtgtggattctgaagttcaagttccacttccattaaatactagtgacatttacttatcttcatctgttttctccatctctaaaatgggccagtaatttacttctgtaggacagtcatgaagaggttggatacataaaacacgtagtgcttagtaagttttcttaggattttttcgtgtttggttttttggttttgtctttagtaatatgcatctccaagtatatcttttgtattgattactgaaagtgcaagttctggctagaaagtgtaagtgaaatttttataaaatgttgtcatattgtccttcagagaggacagtaccaatttacacaaccgcagtcctgccatgctttctaatgagtgaaatattggtaatgactgatactatcctagaagcatgagcctcagtttgattctttgaaacagtcttaaattgccattttttgtattcttgaatatgttctaaaatagcaatctttctgctgtttcacatcasactttaattttttagggtcaattgaaaaaaactgcttgccgctttagaaaaaaatgattctcaaatcatgaaatgctaagttgtgctctggtatcaaatgcagattttctgcacagggttttcataaaggatttagcagaatatagaatcttcaaaatctaaacagattaatcgacttttttaaagattggatgaagtttggtattatcaaggaaaaaaaaataggcttaaaaggcaattataattacactttctccttattcrgatatacaccaggagtcgatccaccactgctcctttggcttcctttagttattagagtgatttcctcttgctaattgtttcccacattaattttagcatcactctgccttccttagccccatcctatgccaaacaggcttctgtttaggaatctctgcctctgcatagctgggatattttaggcacggtgctctgaccagcagctgaagtgctggccaggagctactgacacctgttgaaaaatgccagtagttttaatttttaaaacgtctaaaattttttacatatgccaattatgagatcacttggtggatcttacttacttattcattaagcacatatttagtaattgtcatgcsacagatagtattctagaagcttaatattaaggagttttttgtttaggatacagttgcttgcttccatagtggaacttggggcttgtcctgtacaacagcgattatatttctcagaacatgctgctatgttggatttctgtaaagttctctagattttatttataacatagtaggagcagcttaagttttgtgataacattttaaggcttgaagtaggcactgatttgaaacataggaggctctcttccggtatgggaagcatgttttaatctataaaataacaaatggcaaataaagcacctttgaggtgttatttaatgctcgtaccttaagaatattttgtctgagttcttagtatagaatatagtatttcttcattctttaatttcttttttttaaaaaataaacacggggtcttgctatattgaccagggtggtctggaactcctgccctcaagcattcctcttaccttggcctcccaaagggctgggatggcaggcgtgagccaccaccgctagccaatttcttccttccttaactccaaatttgggaggaagagtttacaacattagacagttgacaaagcctggttttttttcttttgwgraaaagtttttttagtatgaattaataatcctttgggaacattagattcagagaatgagaatttcaagactctttactcttaagtgatggaaatggagataaagcaaacctgactgcagtagtcttgcaccacagccccccaccctccaaaatatttttgacatgtaagaaatctgttgcttgtgatacgcgtaactaaaatatattttctctacatcatgggaaagaattggcacatttttaattgaaagtacagtaagcaaaattctttaagatttacagactgtgaaaaaatgaaaaataattactctgtatcttttagagaaaagctaattcaagagattttagtcccacctgcagtgtaagagatccagcttctctgtgtctttcagcatttgatgttgccactattttttaatttagctcttatattaagtgtgtggtgataatgtttttggccttaatttgtatttctcaaatgcctaggataattgaacatctcatgttcttatttgtcatcagtaaacctcttctgtgaaatttctcttctttggctcacttttttttttctttttatacagagtcttgctgtgtcacccaggctagaatgcagtgtcgcgatctcagctcgctgcaacctccacagcctgggttcaagcaatcctcctgcctcagccacctgagtagctgggattacgggcacatgccaccacacgtagcagtttctgtgttttttagtagagacagggttttgccaaattgtcctgactggtcttgaactcctggcctcaagtgatctgcctgtcttggcctgccaaagtgctgggtttacaggcatgagccagcctgcctggcctcttttgcttactttctaattggagtttttttttcttcttacccctgaagttttaagaattctttacatattctatatctgagttctagtcagatgtgtggtttacaaatattttttccccagtctatagcttgtctttgcatttctttcgtagagcaaaagtttaatttgataaaggcgagtttattgagcaagaacttttccttcatgggttgtgtttttgatgtgtcaaaatttttaccaagctttaggtactgaaggttcccctctgccattttttaaaagttttgtctattttgaatttttatataatgtgtgagatttaggtggagggttttttccttgccttttttgttttgtggggggtgtgtgcgtgcgtgcgtgcatgttttctggtcttcagatcgtatttaatcactccagcaccatttgttgaaaaatgtatcatttctccattagatagcttttgcatctttgtaaaaaaaaaaaaaaattagttgaacttagttgtgcgggctatttctgggttctcagttctgttacattgactgtgtttcctctgctaataccaatcttgagtattatagctatatagtaagtcttgaaatcaaatagactaatttttctcactatttttcaaaatagttttagcttttttagtttatttgcttttctatataaatttgataatcttgcctataaatataaaaaaactcattttgataattgtattaaagwttctttaaaaactaaacatatacttaacaatacttgtcagcagtcacattcgggacagttgtcctagagaaatgaaaacttaatgttcaccaaaagtctgtacatgaatatttatagcaggtttatttgtaatagccaaaaactggaarcaactaaatgtccttctataggtgaatgtccaagcatatggtggtatatgaatctcacggaatgctgtccaacagtaaaagggaatatactattgataaacgtaacaacttggatcacagaagcattgtgctagatccaaaaagccatttcaagaagtcacataccatatgattcatttatataattttctcaaaacaacaaaattaagtccagtgtggtgactcaatgcctgtagttccaactacttgagaggctgagggaggaggattgcttgagcctaggagttcaaggctgcagtgagctgtgatcacatcactgcacttcagcctgggagacagaatgagaccccatctcttaaaagaaaaaaagtgacaaaattagaaatgtagaacaggtggtgtttgtcaagacttagaaatggcagagagagagggatgaatgtgatgagttttgtagtgatggaatagctgtgtatctttttgcagtggtgattatacacatctgcatatgtgacaaaatggtataaaagtctgtagacacattgaatcaatgtcagtgccctggttttgatactatattgtagttattkaagatgtcaccattgggagaaactaggtttaaaaaagtacatgggacctgctatctatgactccctgtgactctatttcaaattaaaattttatgtattgtacatgcacttgattttatttctgtaaagcaaggcatatatcattttctagtcgtggacattttagaaaaaaatcagaacaatagatttgttttaaatctggaaattcattctctgaagtagatttcttttaaatccgtgaaagaggggaattaaatgatataaaggaaatatcctgcagttaatgtactcttctgaactggggttttcaagcggcctttcttaatacattagagtgctgaaggaaagtagaatgtcagtaacatatttgtgattccaagactttcagtcataagataaatctgctgtaccattgtccctgatttaatatttaaattataagtagataaatgctttgtaagttcttaagttaagaaaactatatatataattctttaccttttttgaacttcgatttttctaaactacccacctgtaaaatggggccagcccatctgcttagctttgcttggtggaatatgaaatgcttagtacagtacttttcgtgtagtagcaattttacagataatttatcccagaatcgcgatttttaatggcattctaaaaatggaaatttccacagatttttatctgtgcctgagtatctttcttcatagattttcttttcttgcyatgaaaaatatattctctagctcttggccagtaaacagactatttctactgtcaatcaagatagaaatgaaacaaggcatgaaagcaatttgactcttgtcccttttactttcagctcttagtattttggggtctatttttttttcctctctcaaaattaaaacaatagatttgttttaaatctgttgtttttaaaatacatattaaacatttactcaagcattttatagttttcatattaaagagagaagaaaaattttaaatttcttatgtcttgataagtatttaaattgtcagatgatgtttacattaacttttttttcccctcttaggttttcttctgttttcatagccagccagaacaatgttctacgcacattttgttctcagtaaaagagggcctctggccaaaatttggctagcggcccattrggataagaagctaaccaaagcccatgtgttcgagtgtaatttagagagcagcgtggagagtatcatctcaccaaaggtatgtttgatgttgacatttttattcactttgttgattgtttattgatatgtgaaatagaacttctaaaacagtttttttaggtaggggcattggagtgcaaggaaaatccttagaaatgtttctttattatgtgaagtccttatcacctctagatagacttgatatgattacagattagattttaaaaaaaatctctaagtgcatatattttgatttgcctatttttaatggcaaataagcatcagtcagggcaatgcccaaatattgtttactgatctgttcctcagaggagcttttatttgagaccctgtctcaaaaaaaaaaaaaaccgacgtggaagtgctgtaaatgcgtattacttagtataataagccaatctaaaaaggctacatattatatgattgcagctataggacactctggaaaagccaaaactatacaaatgagacagtaaaaagatggtaggttggggagagaatggagggttgagtaggcagagcacagactattctttttagagcagtaaaactgttttgcatgatartataatagttaaatgccatttacatttgtacaaactaataaaatgtataacaccacgtgtgaaccctgatgtaaactacggacttttggtaatgatgtgttaatataagtttatcgattttaataaatgaaacacygatgggaggtgtcaattgtggggaagattatctgtgtgtgaggaagggggtgtttataagaaatctgtgccttttcgtaagttttgctctatttcctggatgcagccttctaacaatcattgtgttagtttttatgtatatacacaaagaaaacttgtgtacatgtacacaggaaagcctagaaggcataccaaaagattattacagatttctgtagatggtaggattacaggttgttttattttctttttaaagactagccatttagtaaacatttcttgttaaatgtttgttcacgcccttaagtgtttcttaagatttatttttaggattataattgataggccaagtgatggacatgtttttgagatttgtgatatgcactaacagtttgttctggtgagatcataccagtttgcactgcyggtcaaattgtatgagaacattggtattttcaattttttttataggtatgcttactgggataagttaatggaaaacgtagaaatcgtactcctttctggaaagtatatgtgtggctaatctttaacatccgtaagcaaatattgagtggcttaaaaggataacagatttttttcatgatatgtaccgagtactttgtgccactttagggacactacaaacgagtatgagacaatctgatarttgaacatatacacgaacagccacaaaggaaagcagacagttcaggaataatgtaaaagattgtaatgtgtttatgagagaaagtgatttctcttcaaattttttaaaccatttctaactgagcttttatctatttggtaacaggatgtaaagatatttccacagagtgaacgggcctgaaatttctaatgtttgctttggtgtgcagttcttgttgtgaaaatgtcagtttagttgtttagcataagtgtcacacgtggctcatttgcaactgcaagcttgcatactttttctcttctctcttccactcccccactggaagaaccactggccctatttgcagagctttcccagaatatgtagcctggaatctttattatatttatgtttacactttaacacacactagctcaaaaacatatgccatacctcattttacctactcctaggctaaactctgaaccagactaatccagaaagaaagcttttgcccaaacaccactttttgaaagttgctagttctagataagataatagcagaggttttttttccctcctttgttcttaggtgaaggttcaatcaatattaattttaaattttataacaccacataaaaatagattctgtttttccattaggagcaacattttactttgaatttttttaaaattagggattcattgtctgataaattctgaatttgatcacaaatttggtataattttggatgtctaaaaatgtatggccatatacatcatcatttatgctgtaagtcacataaaatgctcataaatacagaacctgagagtcataagtagggtcctagagtgctgtagaaaatacacataaaatttaaaatacaacattttcttttacaaataacaatatactaatcataatttaaacattaagcaaatgtttaaaagctttttttgttaccttagaacttgttgtgctttatggcgtggtttgggaaagtatctggggatgtttgagttcwtattgccttgttctttcagtaaattttccttatggctagaggaattttgaatacttgtgtttagatggagtcttatctcattgttttatcaactactgcttttccacatactgtatcccatgttaatgttgatcaagatctgcctcgaaaaaaggttgggagtatattttctggtgaaaaaaagctatggatactattgttctttatcaattagtatgctttccaaacttttttttttaaatcggtatgctttccaattaatggaaacttagttaaaaagtagcttaaacaataagggaaataacaggcttaattaactaaaattttggaaacagggagatctgagattggtccagcagcttgattatgtcatccaagaactctccatccttagtgtgttagcttcctgtcctcatactttagcattgtggtttacagggtgactgcatgaagcaccaagcaagccctacctattcacaaagcaggaaagagggaaggaagagaggcgttgttcttttgggggggaaatctttctcagaaactctctggcatacttcacctattactcaattggctgaactgtgtttcatgcccactgaagaacaggtattagcagagaggaatgagacatctgtcaatgtgggggacatttgcttctcaaacaaaatcagaattgacttagcaagaaacaatggccctggattggcaaccaaaagtgttacgtgctccttaatgtgctaatgacacaattcatggaatggtttagtgcttgcttcctagcttccttcatgtttgtgttaattcgtgaatttccagtcactctgtcttttcaggatattcgatattcagggaatttataggtaaggacasagaaatgtatgtgattataaggcaactttaaaggaaaaagataaaaaraagactatgaatggcacgaratgcaggttttggaatatgattaatgttttattcataggtgaaaatggcattacggacatcaggacatctcttactgggagtagttcgaatctatcacaggaaagccaaataccttcttgcagactgtaatgaagcattcattaagataaagatggcttttcggccaggtattgttaaacttgtttggtttttgttgttgttgtttactttgragtttctcatgttttttgtgttactgtagctaaacacattttctaaatctacatgctttgttwtaattgaaatacgaggaacccttcaaagatagagcaaggcytggggaggcagtgcttcaagggaggaaacctacttgcgtctgttctccctgtgaagtaatggagctcacccccatttgttcttcctttggagctgcctttttaatacttttttcagcagcttacatagacttgagtcatcaagaggttaaaatgttggaaactaattgttatgtgatgattttttaaaatatagctcagaaaagacaattttaggattttaaactttttttcctaagtaaatattcttcgtagttttttgttattttgttttaggtaatgattggttataaaactggagtctgccaaccacaccaccatctaagwagataattaatatttaaattcacrtatctttctataatttttaaaagcattgatgaaatttttattctaattaaaataatgtgtattttattaagaaatgccttaaacagtttctactgaggatacattctagtacttcagtttatgtcagtatgtgaacagtaaaatgtctgagatctaagattttatttaaaagtaaaatatttagaaaaagactacaatacttaaattaacatgtgaccaataagcacattttatctaaataacatgcttttttttgtctttcaaagtaaggcatatttattatagacaacttgaaaaatataggaaaaagataaagaaaattaaaattgtgtaattctttctccaaaataaccagctccttttaacatttaaggtactcttctgcagttattctttttccccctcataaatatcatgtttaattaggaaactattactagttatttgttgatatgtccgtttaaacatttatgagcttaatgcataattagtgctttgactttttcctaaagcaaggaatacaatttatgagcatggaaaaagagaagtacttgtgcttcaaggtattttgcatatgttatcaacctttctatgagaatataaacttagraagttatacctacttatctccctctgatccctagataatttatgggtagctagatatttaagcttagcatttcttttctaggtgtggttgacctgcctgaggaaaatcgggaagcagcttataatgccattactttacctgaagaatttcatgactttgatcagccactgcctgacttagagtatgtgtcttcttttaaaaaaaattgttgacttggtctgcaataagcagtagtattagcttccaaatgtatagttttccttggaatgttttacattaacagctaaaatgcatatatatatttatataggatagtatataaatatggaacataaaacctagaaagttgttcttctgtaagaaaatcatgtggatgtcagctttaacacagctaagatgtgagagttttgacaagcttaggccaaagcttacgtaaactgaaacagataygcttgttatataatgatagcagggaatgtaaactgttgcttcatgatatttttcagagttatatattaaagtcagctactggattggccaggctatactcagagccataattctgttctggtttgtttttatttttgttttaaatgaacatacgagataactttttatgaagagcaacaaagggtcattgtcatgacacacatttgagaggagagagttacacagagatggctgttatagcagagtactgtagttatgtttcccttttctcaagcccttacgatccagctatcatgccatgatgttggaacgtgactgtagctttccaagtgacttattagcataactgacaaccaagaaactctacaccattacagatttctctgctttttgaaatgatctgtggcttctaattagagtaagttatgacctattttgttactgcatgtgtgttgattagttctaggctctatctagctattttacttttttctctctttttgacattttatttgaaaattttttattatggaaatttttaaacatagctaataactagagaaattaggattatgaaccttatatgtcagttattcagctttttaagttacaagtatattgccagtcttattacatctgtttccccagcttacctcacaacccccaccagattattttaaatcaagtaacaataatcttatttcatctgtaatagttcgatatttgtctcttagaggtaaagaatttttaaagcctccatgacccatcacacctttaaaaaaattatcagttattccttaatatagacataccttggagatactgtgggtttggttccaccasagtaaagcaagttacacaaatttttgggtttcacagtgcctataaaagttatgttcacactgtactgtagtctattaagtgtgcagtaatagcattatgtttaaaaaagcagtgagcttatcttaaaaatactgcaaaaaaatgctagtgatcatctgagccttcagcaagttgcagtttttttgctggtggaggatttgcctccatgttgatggctgctgactgatacaggtggtggttgctgaagtttgaggtaactgcggcaatttcttaaaataagacaacagtgaagtttgctgcatcaattgactctttcatgggagatttctttgtagcgtacaatgctacccgatagcgttttacccgcrgtagaacttctttcaaaattagagctaatcgtctgaaaccctaccactgctttatcaaccaagtttatggaatattctaaaccctttgtagttgtttcagcaatattcacagtatcttcactaggagtagattccatctcaagaaaccactttctttgctcatccataagaagtaactcctcatttgttaaagttttattccaagattgcatcaatttagttacaccttcaggctccacttctaattctagttctcttgctttttccaccatatctgcagttactgcctccactgaagtcttgaacccctcaaagtcatgcatcagggttaatgttaatttcttccaaactttctgtctataccactgaaactttctccatatgaacaataaggtagttttgttttcttattcatgttcactagagtagcatttttcatttccttcaagaacttttcctttgcattcaaaacttggctgtttggtgcaagaggcctagcttttagcctaaatcagcttaggcatgccttcttcaccaagcttattcatttctagcttttgatttaaagtgagatacatgtgactcttcattttacttgaacaaatagtagccattgtagggttattaattggccttatttcaatgtagttgtgtctcaaggaacagggaggcccaagaagagggagaaacattgygggggtsggggagggcaggagcagtcagaacacacagaacatttcttgattaagtttgcccatattatttgggcatcctttgtggcactccaaaataattaaaatactagcatcaaagatcactgggccaggtatagtggttcacacctatgatcccrgtgctttgggaggcttaggtgggagaatcacttgaggccaggggtttgagactagcctgggcaatatagtaagatcccgcccccccatgtctactaaaaaataaggaaaaaaattttaaagatcactaatcaagatcaccataacaaatataataatgaaaaatttttaaatagcatgagaattaccaaaatgtgacacagaggcatgaagtaagcttgtgctgttggaaaatggcaccaacagacttgcttaaggcactgttaccacaaacctttggtttgttaaaaactcagcatctgcgaaactcagtaaaacaaagtgcagtaaaacaaggtatgcctatatgatagccagtcagcattcaaatgtccccagttgacatgtcggcttttttttttttttttttctcccagttcgagttgaggctaaacaaagtctacaaactgcatctggttgatatagcttatgggtctcctgagaatctattacagctttgccgcctcctattttttttttccttgccatctattttttgtacagacttggtcagttgttttgaggtattaatgttctggatatggctgatagtgtttagattggtgtttagcattacatactttttattttttatttagtatttttaaactatatgagagattattctttattagagaaagaaactgagtctcagggaagtcagggaactttagagtttacaccgcctgtaagttgcagggtcctaatgaaaacccatgcctatctagcccatgatttctaattttttcctctgtacttgatttagtgacttctgcatattacattgtatttgctgattattgatgcttttcaaatttaaatacaagttaatttccaaatcacttacattcttggattgtactggaatgtgtgaaagtattaaatattaaggcttctaaaacttggtgggttatacatatatatttttttaatttttcttatagagagaattgggatttgtttttcttatacatagacttgaaactaaaatgtatttgaccttcttttaaagtgacatcgatgtggcccagcagttcagcttgaatcagagtagagtggaagagataaccatgagagaagaagttgggaacatcagtattttacaagaaaatgattttggtaaaagagaaacaaattattagccattaattataatgttatattgtgttgctaatagcaatttcaaaagaaaaccagactatagacagaaagacttaaaatttcatrtaatgcattttcatcaagaraagaatttggctttctaccagtagattaagcattattttcatacttggagctaattgtttacctacttctctccctatatgcaatcayagaacctatatattgatttctgcgaggagtcccaacattgaagtggtgatcacgtttaaaccaaccattttggaacagttagtttccctgttatacttgctattcaaaaacaggtattcaaaactagttagcaaggcatattgttttttaagaggcggggtctctgctgtgttatccakgctggagtgccgtggctcttcacaggctggattatagcacactacagcctcgaactcttggattcaagtgatcctcccacttcagcctcaagtagctgggactacaggcacatgccactgtgcccagaaccagattcttttcttgatgaaacacattataacgggaaagtttcagctgtgactgttaatgtaacttaacatacatacatatttagagtttatcaaacatattttaggatcatttaaatctagatctaagtttgaatttgctagtcatgccccagtgttgtaactgtgtgtaattgagtcattttaaaaaattcagatgctaaagaattaaagtttaaactagatattttaacatttgaagtaagacttcagtaagcaaatgtgacataattagaataaatcattagcagttttcttttatcacagtgctatttctaatctttctaaactaatgacaaattaaaatttgtttaggtgattttggaatggatgatcgtgagataatgagagaaggcagtgcttttgaggatgacgacatgttagtaagcactactacttctaacctcctattagagtctgaacagagcaccagcaatctgaatgagaaaattaaccatttagaatatgaagatcaatataaggatgataattttggagaaggaaatgatggtggaatattaggtatgtgrgaatgatggttattccagcataaacagaatttctttattaagttgtaaagttttggaaacagttgctaattctgagtcttgaacagcttttagatatatatgagtgaattgtgatcagttggttcaataggacatttcggtaaaactagcctcttaaaatgttgtaacaaaacctaaatatgcttatctcagaatgctaaattttattagtacttaaaactgttctgtttgtgtttgatagctgtgttaagtaaaatattttttaaaatagataaataaactagaaaatacaaatgaagaatgagaatttttttttatataccaagtgttttatacttttataaactacctggaggagaaacagataaaagttgagtatacgtttaaattttatcccttttaacataattttgtttttccattgattggctgttgtggtttggcatttctttttcaaattataactaacttacattccctatttcagatgacaaacttattagtaataatgatggcggtatctttgatgatccccctgccctctctgaggcaggggtgatgttgccagagcagcctgcacatgaygatatggatgaggatgataatgtatcaagtaagcatttcatgttcagtgattctggggatgattgtatggcatccagaaagatacttaccatagaakatgacaaactaaaagttgtagtttttagtgaattataaatatctttaagtacagtgcttatgattactggttctgattctatgtttaatcttgcacccctccccatttttttggccaattgggttcaagtctggcggggctttcccattaactagaaaaatattttttcttagtaataacaggatttctttccatttcatgaagagatttttctcctccccatttgtgggatatatgttatataccaaagctttttgtgactttttttttttttttttttttttacagtgggtgggcctgatagtcctgattcagtggatcccgttgaaccaatgccaaccatgactgatcaaacaacacttgttccaaatgaggaagaagcatttgcattggagcctattgatataactggtaagcatatgaacctttagatttatacagcatacaacataaggtcctatttctggtttttgcctgtctactgatctgctactgttgtattagataactaggcttcttgcttttttctgtttttttggcctgtctactgatstgctactgttgctttagttaactagcttcttgcttttatgtcacagtcatctgtcatagagtctttcttctatccaattataattttgagtattttgtagaatgtctgtgcaagttgctgtgaaatacaaaagtatagaacaagctttctgataatgcatatcttagtctcctggggttcccagaaagttagcagcttacttgtgtaacaactggaaaacattggaaagcttttttcaataaagtacaattctaaatgctgtgcagttggtctacgagctggaaaaaactaaaagtattctttttaaaaaaaaaacaaaactagaggctggtgtggtggctcacacttgtaatccagtactttgggaggcccaagcaggaaaaccacttgaggccaggagtttgagaccagcttgggcagtaaatatagtaagacctgtctcttcaagaagaaatttttttaaaaattttatgcactcttagaatttgcctttttccacacattctgaaaaaagaaatttttttaaatttaaaaactggaaatgtcaaaatttctagaataatctttttcttgtagtttttttaagtaacattgcaagacacattatttaatttgaggaaggctgcttctgaatgacagacaatttgagataatggggatataaaacctaacaatttctagatggtttatgaggacagtaggatagaatacttgaaattgattacagtgtaatttagacatagtttttacctttaagtagagcaagattacccttttgggtttcccattgatgagggaaatgggcaattaagtaaaatatatactgtattagatggtgagattagagagagactctcactgtgtaacatctttttgtattttttttttaagtgttgaaccaaaaacctttggggtatgtctgacagggtgaaatcttgaggattttatttaaccccatgcgcttttctgcattttaaaaaagtgaggcaatacaacctacttgtaagttgtaaggattagaaatgactcttaaaatgtctaggatggagttaacaggtctrtctgactgggcttgggcttgtttcattctatcaagcagcttccacaactgccatatgtgaattacaacttttctaataaaaataacagtatttacaatcattaaagaaaactcaatctgtgagtttgagtgatgggccctgtttcaaatgagaaaatgagcccaactctgaagagtgtgatatgttcattgtttacagtataaaactacataggcaaaaatgtgttggcccttgcgtcattttgcttattttgtgctaaaagtctatacatactcattcagcaaatttttgttgaatgccygttgtgttccagcctctcttctgaatggtggttggaaaacatgagttaaaacgttctatcctcatgaagtttaacttctctgctagagtctgtgtgtagaaaagcaggggaatatagtcagtccagatcttgtagctgtgtgttccatgctggcctctcaggaaaatgatcttattttttattatcattccagttaaagaaacaaaagccaagaggaagaggaagctaattgttgacagtgtcaaagagttggatagcaagacaattagagcccaacttagtgattattcagatattgttactactttggatctggcaccgcccaccaagaaattgatgatgtggaaagagacaggaggagtagaaaaactgttttctttacctgctcagcctttgtggaataacagactactgaaggtaatatagtttgcagaatttttacttcatatacattttgagcatctaaaaaaaaaagattctaaaacctttgaatcatttttgatcaagtattttgcaactgtatggcacattttcttttttctcccttaaatcacagtgtactgggcataacttcatctgaaatatatggataagtgagacctgcatttctaaaagatgtaaaatgaattttccttacattaaaaagccactgacgtgtttaataatacttctctctgtaataaattattagttatatcgtcttagtgtgttttacatctgaattcttgaaatgttttctgaatgaaacatgagtggttctcctttttccacagtaaagaattctggcttcaggaggttttttgttgttttgtttttttgtttgtttgtttgtttttccatttataggctcttttctgctcacattccacagtattccaaaataagactcacaggtgtctggtgaatgaagcagtgctgttaggctactattctgtctgaagttgagatatgcacagaacctattgattttaccgtgtatttagaatatagtaatatattctaaatctaaagtatcccagagcaacaacattgtgctctttattgtaagccctatcatataattatttttaagaaggtccttaaactatttattctttgactcagtaatttcattattagaaatttttcctaaggaagtaattcaaagtgtggaaaagctatctctgtgaaaatgttgattacattgttctttacagtttaaaaagagagaagcctgaaattttaaaagtagaggaatggttcaaaatgaaatattatgtagccattaaaagtagtttaaatgagaccagaagcagtcgctcatgcctgtaatcccagcactttgggaggctgaggcgagtggatcacttgaggtcaggagtttgagaccagcttggctaacatggtaaaatcccgtctgtactaataatataaaaattagccgtgtgtggtggtacacacctgtaatcccagctactcaggaggctgaggcacaagaatcacttgaaccgggggcgcggaggttgcaatgagctgagattgtgccactgcactccagcctgggcgacagagtgagactccatctcaaaaaaaaaatagtttaaatgatagctaataaggttaccatatgtaagggaagaaaacacaatttaaagytattttgtatgagaccagttaggatgagttttaattgatgaatatgaaaataaactgcaggcagataaatagaaaagcccttaaggttgtgagataatggatacagtttttttagtttatctaaaatgtctgcagttataatttgaaaactcatttaaaatcattttcagatggaatgaaatgtgaatatgataaaagccatgctaaattatacacttatatttattagaacatacctttggaagatagaaatcagtggtgactttttaattakatttattttataattgaaatttttcttttttttttttttaatagctctttacacgctgtcttacaccgcttgtaccagaagaccttagaaaaaggaggaaaggaggagaggcagataatttggatgaattcctcaaagaatttgaaaatccagaggttcctagagaggaccagcaacagcagcatcagcagcgtgatgttatcggtttgttctgttggaatagttccttgatgaagttyacatgagtatttggcttaaaatttacctttatactgtcagagtgaaagaaatgaggaatcaaagatatactcaaatgtttgggcagggaaatgcattggatctgattgccttatttaagtatgaagcctcctgtctttccagagktttaaggttcagaactggcagggtagatagtctgctaaagaattgtcctacattgtrctgagggtaggacttgtccttttaagatcccctttcccctttacgtatattgctaaaaattgagtaaatctttatggagctaaaattttatctggccttcttcattaaagaaagcattatgtatgtcttagtgtactagtttaaaaaataaatggttctataatactgttcaaaactgtatgacctatgttttctcttcatatgaccaattgcagatgagcccattattgaagagccaagccgcctccaggagtcagtgatggaggccagcagaacaaacatagatgagtcagctatgcctccaccaccacctcagggagttaagcgaaaagcyggacaaattgacccagagcctgtgatgcctgtaagtaagcaaatctatccattaagtcatttgaaggtattcatacagtcagtagcaagtggtatttagggaggccttttaaagtatcttggttttgacagaaaatggtaaggaatgagtccagaggaagaagagcaacaggatatagacagtccactcggagtgagagaatatgttctgggagtcggtgcagtctttcctgactctttttgaatagtattgctttagagtgctccagagtgagcatccttgactctgaagttggttctgatttattatttggcaaacattcctgcacaccttcagtactaggcagttttaggtcatcttattaagtaatcagaataaacttcaaatacctgagaaaatgtaaagcagtatctgtctgcttcattcaaactttgactaccattgagttcagctaggataggaaagctaagcaagtatgaaggaggaaatagtagggtttggtttagggctttccaatcttaagtccatagaataaatgaatttgtgcaaagggaggcttttagataaccttaggcttcttgttcagcctccatcaagaatactctgccaattttaagaactagttttctgtgccctctggtggtaagagttgtcaataagagcatttttctgtatgagctcaggaataggaacacagtaatgagtaggtgactttcataaccaccctccttctggtaattctttagtttcttttaaagactttggttttaatgttcttaactctttctgtaaagcctgagagaagatataggaagtggacccagaaaagcaatgtcctcactcctattatttgctgccgtgagacattcaagactctcagagwgaaagcttatgatttataagttacaatataataaccttacagaagctttagtagttaaaaagcatttgactcctaaaaagtaagtatgaaaatgaaacatggtttaggataagcagtcagtttcttttgtaagctacttcaatgtagttttataaaaaatcaaaaaagatatatactgtaataaatttttccttgtggggaagtatagagatataatctcagtatttctttttgactagaaaacttcagccactgtgtattttcatatttaaaataagctactttaaaagcatatatcttaaattgtcttatttgtattgctttaagcctcagcaggtagagcagatggaaataccacctgtagagcttcccccagaagaacctccaaatatctgtcagctaataccagagttagaacttctgccagaaaaagagaaggagaaagagaaggaaaaagaagatgatgaagaggaagaggtaaactaattaataattttcattccagatttagcaaaaacctccaaccagctttatttttcatattggggctaacttaattgatgctgagcatcagagttatttaaaaatgttagaatataagcaaaattttaccatattcttcgtggtattgatcatcattaggaacatcaaattttatgcttcgctgtaactcattggctctcttgtggggttttgaaggacatggaattgtccttacactgatttcttgcttggcttctaaattgcgtgtagctgcttttactatcttgtggtcagtggacgattcttactgctgttattgtctgcttctgatataaccttttctgtatctgtggtggcctggaaatcagataaccatatgttttccacttgtctgggttttgtttttgtttttcttttacttggaccagggtaaagcataactttgctaaaacacttagactgagtgaaggcttaaatgactttttctttttacaaagtaagaggtgttttaggaatcaatttctttttcctggggcatgtttacactgttgaaggtcttttttcttctttttcttcctaatttctggatcattgagkttgttgtttaagacttagaatttattcttctgtttgatactctatcggatatgttacttaaacctttaaatttaaaataaggtgtcctttaggtagcattgaagctgtttaaatttcttcaagaccaaaaaaggttatggattggataaattttcagtagcatctgttcttaattctaataatagtgcttatctttaatatgaatatcttattttaaagccaaaattagtttcagagccacttctacctatgtgtgaggatgtgccattatctcagacttagttgtgaatgagtattaaaatagttgtggtttctgttatggctggtatatagtttcaccatagcctgggaacatcacaactgctgccttgcacccaccttggactttaaaaagtcatttaggcagcatgtggctgagaactaggttgctcaagtgaaatatataataaggagtatagcccattcattttaaaacaccatataaatcaacttaggtagtctgcaggctctttggtactgctccacaatgagattaagagtctgccagaacattagtcatctagaaaatcatgttgcaatatttatgtatgtatatttagttgaaataaacagtatatttagtggtacagttgatttatatcctgaagttctttaagaggggccagtaaccaaaacctccatgatcagcagcagtccacagaccacatagtgtgtgtagatagcatccttatagcgcartatagaagcatactttcagccaaatgtttgcttgcacatagaggactttgccttgtaatttaagaaaaacagactcttcagtttgtactctaaatgctaagtgattgctcagcagcattaagtacagttttctattagttcaaaatacacaatctcaaggtaatttaggagcttttaggagatgtagaaatacttcatttttcattggacttgttttgtcagctttttgggggtcatttttattcaggatgaagatgcatcagggggcgatcaagatcaggaagaaagaagatggaacaaaaggactcagcagatgcttcatggtcttcaggtattgccgctgttgtctcagaggaaaatgcttcatcaaaggcttttgccattgttccctgaaaaaaaaaaagttagatgctggaaacagaaagcatacctttgtcaaactttttccaaaactacatttttatttatttatttwttttttctggagggagagttttcttttcttttttttttttattatagtttaagttttaattaaatacataaactgttaggccaagagtaagccggaaaagcatggaggagaatgcttgtggttttcctgaaaagcagaaccatggtgacataccacacaactcctttgtatgcctgcaccttcttgttttttgttgagtaaatttaatgtgctgaatcattaaatttattgggtcattgtgtagcatcagacgttacttttccttgtgctttaatgtcctagacatagacaggatatcttgaatgtctgcaaaatgccaagcaagttgctcaaggtttcttaaaataggacagttgacatgtgtttattaattttttactttaaaaactataagygctagattttactactatattacattagctgtctaaagaaattggttattttaataatacatgtcagaacaattttgctggtttcttggactttcttatttggattttagatgtaccataacatactttggccttttaccctcttgattaacatgagaatcacatactatttaaaaaagtgcaatctttgtcctaagcagaatatatagtttgttttttccagtaaccaaaattagcatctgtgttagtctgttttgtgttgctctaaaggaatacctgagtctgggtaatttataaagaagtttatttggctcacagttctgcagactatacaagaagcaaagcaccagcatctgcttctggtgaggcctcagaaagcttatagtcawggtggaaggcaaagggggagcaggtgtgtcacatggcaagagagggcatgagagagatggctaggcgcttttaaacaagcagctctygtgttaactaacgagcaagaattcactgattgccacagggagtgattgataagggatccaccaccacccccatccccaccccatgacacaaacacctcactaggctccatctctaacactgggaaattacgtttcagcatgagatttggaggggacaaatattcaaactgtatcagcatcctcactgaattactactttattatacagattaagttacccttttttggttttatttcagcgtgctcttgctaaaactggagctgaatctatcagtttgcttgagttatgtcgaaatacgaacagaaaacaagctgcygcaaagttctacagcttcttggttcttaaaaagcagcaagctattgagctgacacaggaagaaccgtacagtgacatcatcgcaacacctggaccaaggttccatattatataaggagctagaagcattatagctagtgtttgattcactagtgcttacaaattgcccccatgtgtaggggacacagaaccctttgagaaaacttagatttttgtctgtacaaagtctttgcctttttccttcttcatttttttccagtacattaaatttgtcaatttcatctttgagggaaactgattagatgggttgtgtttgtgttctgatggagaaaacagcaccccaaggactcagaagatgattttaacagttcagaacagatgtgtgcaatattggtgcatgtaataatgttgagtggcagtcaaaagtcatgatttttatcttagttcttcattactgcattgaaaaggaaaacctgtctgagaaaatgcctgacagtttaatttaaaactatggtgtaagtctttgacaagaaaaaaaaacaaacaaacacttctttccatcagtaacactggcaatcttcctgttaaccactctccttagggatggtatctgaaacaacaatggtcaccctcttgagattcgttttaagtgtaattccataatgagcagaggtgtacgcgaaattgtgttatgactgatagccttcagctacaaaaagataggactgacctggtttaaagtgttctattttgtaaatcattccatttgagtctttctgatgaacttggctataytgaaatctgttattttagtgaggctccaaaatgagcaaagctaggcctgattagagtagagtgactattaaaaaacataactttctaggagctataaatcaaagttttaaaaagatgtttggatatatttgagtattccgatcatgaaaacagaaattgccctgcctactacaaggacagactgatgggaaattatgcacctggtcaacttagcttttaagcagacgatgctgtaaaaactaacggcttctctgatatttattgtaagttttagtactgatctccttttccagtgctgcacactcctggtttggamctttaatagcgttgcaacgaaatcctatatccagtttcctgtaatttaattgaagaaaaatacatccaaataaagactttattattaacagaccagatagcatcagaaatcatgtgactgttatgattatcagaatgtcttaactttttagggcaaagttaacactgaaasttctagcttaagtgttgaaacttttgtgggaaaaaaaaatcacttttgaaactcagacttcagtgtatacccaataatttaaaattatgtgaaatgttttaaatttgtgaactcgtaattactgttwtaatgattcagtttcttcagagtggtaattgtataaaattgctattgcagctttayattcaatatgatgtgcctgtaaaccaaggagttttcccygtttgtaaaaagacattgtagataattgaatgtttgattttagaaaggtcattagtttcttgttacacattttgttagtctggtttttgttgcttatcgggtttaatattgttcttgaaaatagttgatgctatgttatgtataacttttctaataaaagttgtgttataagctgtacttttttgagtattcattattcagttggtggtggtccccaagggaaagttggctgaaaaagttaatagagccaaacacttcgtttgtttgccttatctagaatagttatccatacaaaccaaatgaatttttcaaaagaaagaggtcttagactaaaaaatggaagacagactagcttgtctccaaccttctttgttaacagaactaggtgatctgaaattttaataaatatataattgttatgtgtgaaggtattaagattaaaaatgaaaccaacaaatggctggtacagaggaagctttggggcataaatatatctctgtaactgctaagtacatacaaactgacatgctatgtgtgtacatccttggtgctccaaacaagctaggtgggtaggcaggtgctagaaatatcctaggtcaatctgagaagccaaactcaaaaccaggacgttcagtaacctgacatgtacccacttttacattctagcctctgactaggcctgttgcccctgcccccgctccggcccccactgtgagctttaaagccctgcgattttatggtttaaaccctgatttgagtgtaaatttgttgctgtttttaaaagaaaaaaatcagattttactaagcatcaattatcctgaaacccaaagcagcttgaatttggggctcactgccatagatgcctctagtaaagaattatgattaatgtgaaagtgctgagagcctagaatacagcatgccacagtacctgggggaagttcagaaataaaagattctcagatgataaaaagcttttgctaaaattgaaaagatggcttggcatagtgagtaaagtgaaatgatgtttagctagagcagaaccatgcgtgtttgaattcaaaggcctaggtgtagacagtagaatccagtctcttgactgtcctgaaacttggagttaccagagtggtacagtgggaagagcaatgggccagaggcctaggccccaggctgtaatcttaatttgattatagaacctgaaacttcataagtgtcattctgtatctgggtctaaaagtgaaagtcgagtcccaccgatttccaagagttgtgaaaaccctatgagctaattaaaagcagtttgaaaagcagctaacatttgtatgatgaagataacattggctttcattcaggccgcttaggtgcacgcacttgggcaaggttttaaacttggattctaattctaaagtacgtcgtgaggtggacatctctacttggaggaactacatacactttaacttagtttctctaaaactgaattaattctactttactactttagaccttcctaatgcttcatctttggtgagtggctccttcaccttcgatgtcctctcgacctggtgcttcagtgttctatatttcaaataaccattcctgtgctcacactattgaagacttgcagagatgacttcaacagctccagctactcaaaatttagactgttacctccaaatacattagagtcaactggcaagtcagcagagggacttttaaacaggtaggacaggaaggtttttatttcaagaccatgccctagcagccatctgccctgctttctgtattcccccagctgtcttcccagctgtgctctaggtcatgtgtgcaaacgcttagtggccaggcaggtcatggaaatgagtgaagcagccaggtgactagcagtggagggtgaggaggaacagtgctgaactggatgaaacggcaggggctccctttgagctgagcacagtgtctgctcaaatgtcactaactgctggttcagaaaaggagacagaatattgcctcattgcctcaggaaaggccagaggtccagattcttctcactcctgattttaaaacgtgataaatgattcaaaactgtttcaataccatgcgggccacccataccttggcagacagatccagctcataaacctcaggtttgtggcttctgttgagctgactttgaggaccacaaggaaagcaagttgtgccacttaaagaagcaaggctttctgggctctttcctgtcactgcttcaaaggccacaggctggctgattcctcttaaagaatgctgtccaatttttttaaggccctatttgatgttccatgcccataggcagtatcctcacctgactttatacttcatgtgcgccctgctaactttgtgtgacagctgttgtataacattcccaacctagtggaaatgtcttctgaaaagcaggactcgaaaaatgtaaacctaaagacaaaagtctaatttcttcatatcttccaaagccaaacaatgcagggattctcagatgttagttagctcaagagtcagatggaagattgtaaacctgtaggcttgacatttagccagggaattctcatacaattcaagagaatgaagctctccaacttgagcaaaccggtacactgttatttctagaaggcatctggccaaaggggttctcaggtcctgttctaattaccccagctgtgacagtctcctatttgctatgaaaatgagttaagggcaccaatgggtggccagtaatcataccagcaatgatcatcaaaacagcaacacagcttctctaattaatggagtgagtttggtccagtggttgagaacatgggttggaatccaagagaggtgagttcaggattaggtctgcctctaactaggaactgtggtgaccatcttaacttctttaactcttggttctctcctgaggaagctcgtaaggctcctgtgaggattaaataacataatgcaaggaaagcacacagtgcctggccagtggtcgccgctatatattagctgtttttcaggccaaaatacttactgaatgctttgctctgaacaaggaatgatactacaactaagtgtactgatgtgaacaaaacacagagttgctgtaagttttggtaagtttttggtaagttcaagaaaggacatctccaaagaagtaaaccttccttcaattcccctagagaaactattcccccatcttctctatttccatgatattttattcataactgataaaacttttcacaatatgtcatactttacctgtctacttctcttgactagctgactatggatttttggaagacttgtctataattccagaactacctaatccagtgtgtgactctgagttagggtgcaatcagtcttactggcttcagcatgaccatcgtaaaggatgaaaataaaataactcctatgaagccaatttctgtgaaaattggttttgagaatagaatatgaattcttagagtttctaaacatacagttcctgtaaactttggtaagtgtgtgttattttgcttasaaaacaaaggggccgggcacagtgtctcacgcctgtaatcccagcactttgggagacgaaggctggcgggttgcctgaggtcaggagtttgagatcagcctggacaacatactgaaaccccatctctactaaaaatacaaaaaaattarccgggcatggtggcacgtgcttgtaatcccagctacttgggaggccgaggcaggggaaccgcttgaacccgggaggcggaggttgcagtcagccgaaatcacgccactgcactccagccggggtgacagagctagactccttcccctcaaaccccctgcaaaaaaaaaaaaaaaaaaaaaaaaaacgggagaataatttatctaccgccttccatctcccaccagtcaaagatttgctcttggaacattagttacccatttcttccagggccaccaagctaacccctacctcacctatcaaaaggctcttatgggtatgtccttttgaaattgattcagagccctgctagccgacgtggctggatcagaacaaatggctaatggccccggattcagttgctacattgaccagtttggaagcaagcacctcagagtttaaatatgtggtaaaatacaggagaatacttgatttgggattccaaatccctacaataattcttgggtatgaaaccttgctttccagaaaacaacagtgtcattttcttcatgctgtttgggaggttatagcagctggtaaattctgagtttctttcccccaagccatccaaaatttgtttagattgactctgctgaaataacagagactgccagattcccttgattataggagttgtgtacgcaatgtcatcctctgctctaccaagccccatgatcacaatgagtgctaaacaagataatgtatgcacatatactttgcaatcgggaaagctccataaaggtagttgctataataacaaggtagcttccttgggaagaagagtcctcatatgagatgaagctaacattatgccttcatttgaaaatcaatttcagcaaggtaagaggatacaagatagttcgggttgatttcttgggggaaccactgcaagtgttacaagcttaaacttctcagggaatttcagcacttaaggcttttcttgaagggactctggggcagaagcagctttccccaaatttcttgaaactttgtccccgttgatagtctccataaacataacactaagggataaaattaatgaagaaaagggggatttcaactcaacatttattgaacaccagacaccatgctaggtgctaatagcatacaaagacataatccttgtgattataccttgaaagattagaaggaaacaatgagtggcatttaaactacaccttgaagaattagtgggatttattcaacaggtggcgtgcaagggacaggaagaaagggtgttccaggaagaaagaatagcacaggcaaaggcatggaggtagaaaggaatggcactgatttggaagaccaaatgtaagcaagcaaagccaacgtagcagtcagaggacagaaatcactctcaggctaagcagcttggctaaatttgctaccaattattaggctcaaagaccaccttgacttcagatagtctgctgtgcatttgtatgtttataagaagtgtggcctctcctacaacagcctttttggcttttaatcagatcctgtaggtttgttttcgttctctctctttttttttttttttaacctccacaaaccaaacagaatagaaagttgaaaaacatttccagacaagagtgtgcttgaggagtggaaccatttttataattccttctggttccagttttgtttgcatatgagccttactgccaggaaacctgagtgggcccatcatgactctggaggccacaggggtgtctcacactgacagcctgggagcatcaggggaacactgagccctggaaaatcatgtaggagaagaaagagctggaggcttccaatgtcctcagacccttccctgggttgctgacaggggcagtcatggccaggattggcagaaggggtaggaccaaaggtagaggggggaagggcatacagttcaacaacaagctttcctggaacaagcttttcttcttccttgagcagagtgtacagcagaatgccttcaggatggctcaacaggttaagagcttaggcacaaatggttaagagcttaggcacagtcacttttgctcttagaagaattacatagtgataataatgctacaacttatttcccacttaataataataataataataatatacttattatggctagaatttgtgaaatactttctatgagccagcacaatgttaatcatgtcacatgcattcatcttcccaacatctctatgaggtaaatcatactattattatcataactttatcaacagatgtggaaactcaatatggcctagactataattgtcattgaagattccatttgttcctctatatttcgcagctcagctaaagttaggcgaggtcacatgacaagttctggccaatgggctctgagaagaagtgaagcacagctctgaattaaggcagtgaaagcccatgtgcacgtctcctccatctcttcctttcctggacccctggtggttaaggagggtagaaatgccacagaaactactaggtgatggaacctccatcaggctgggtccctgagtgaccagagggaacagagccttttcgcagacctggaatagatacacacgaggaccaagagataagcctttgttgtgtgaagccactgagaggtcattgttaatttattattgctacgtaacctagtgtatccaggtaatacactgaggcctcaagaagtttagtaactatagattgagttaagtgattatgctggaactagaaccgcaatttcctggttcccagacaagtctttttttctactacacaaatccgaatctgtgataagggccatagcttccattgcaccatccactctggtgtgtaggaatgacttcggaacctatccatgaaagacccaacacatttgggatgactcttcatggcagctaatctatgagctctgacagggaaggctggttagaggcagatgtgcagactgaatttcaaagtagaccctgcttgtgacaaagcttaactgtcactaaagctattttacaagcacagtggtcgccaaatagcctcacaaagtaacagaaatttaccatggttcagaccctaaggcttgcccaatttgctttttttttttttttttccttcagacagggtctcactctgtcatccaggctatagcgcagtggtgcaatcatggctcactgtagcctcaacttcctgggctcaagcaaatctcccatctcagcagcccaaagtgctgagattacaggcgtgagccactgcaccagcctggggcttacccaattggctaaggaaactccaagcagattctttgctctgaatgctccaacttggagtatccagatcataggagacttaaatcagaaatccaatttattgactgggactggagatcagtgatatccaagacaccattcctgccctatcacagtgtcttaggagacacagatgaataagaatgcaattgaaacaattttatagatgccggattgggctatgcagcaggtattagggactcggattggggagtcaggaaacatttctggacgaagtgacaaatactgagccttgaaggatgcccaagagttaggaaaggagagtggcaagcagagttctggtttaaagggacagtatgggtgatggttcagggggtgaacaagcttgctgagctgtttccctccacagagtgcagaaaaatagggcctttctggaagcaagagaaaggctgtctattacctgggcttctaggtgagtagccaggaaggggagaaacggcttgagattctgtttgctctcaatctttgtccatcccaaaatgcagaacactaagtctagtggcctgggacacattttagtttgtcttttgatccttgacagtatttaagacatgttgagggtgggcacaacggctcatacctgtaaatcacagcactttgggaggctgaggcgggagggtcacttgagcccagaagttcaagaccagcccggaaaacatagtgggatcccttctctacaaaaaaaaaaaaaaaaaaaaaaaaaaaaaggccaggccaggtggcacacgcctgtgtcccagctacttggaaggctgaggtaggagaattgcttgagccagggagtttaaggctgcagtgagccataatgatgccaatgcactccagcctggaagacagagcaagactctgtctctaaaacataaatgaataaattcaagttattaatttacaataagaaatatagttgtcacatggctcacaatgattttgttggcctgactaatcagcacattctcacagttaatgcaattgatcactagttcatccccgagactaattcttgacctggcttctgcaatatctcactcttaatctctttgatgtttgtttttcctgcttcactggaagcttattcttaaattccttcttaaattcctttgttgattcctcttcatctcccagttcttaatactgaaataccccaaggcttagtccatgacttctcttttccgtctttacattcccatagtaatttcttccactctcaggactttaaataccatctacatgctgatgacttttaacttgatgtttccctccagctgtgacttttctcttgaactcttggctgactgattgatatcttccctgggatatctaacagacatctcaaatttaccatctccagagctgacctcctcatcttcacccacaaatgagctcttctgctccttcaccatcataattagtcgaactgtcctatcagttgctcagacccacaaccttggaatagcccttgactcatcagtttctctcacacgcaccacttcatgccctccgacaaatcccactgctctagcttcaaaaaatagctagaacttgaccactttttaccacctttattgctactatccaagttcaaatcaccatcctctctttccctagatcattgcagcagcctcccaactggggttcctttccattagcatactcccctccctcaaactcttcccaacacagaagtcagagtgattatgtttgtcagatcacgtcatccctctgttcaaaacctcccgatggcttcccatctctcggagtaaacgacagtcattacaatggacaataaggtcccatgcaacttctgtaggtcctggttcctatagtaattccttttccccctgccccatgccattatctctctgatcgcattttctaccactatcccccctgctcactccactccttgttatgtctagaacaagcctccttgttatgtctagaacaagccaaacccatcccacttcaacatatttctactggctacttcctttgcccagaacggtcttccctcagatggctacatggctcatttcctcgccttcttcaagtctttgtttaaattgatcttctcaaagagggtttgcctgaccaacataacaaaaatggaaacacccctagcaattccaatacctctcctctgctttagttttctccatggcccacaattaaagtactatgtagtgtgtgtgcgtgcgtgtgtgtgtgtgtgtgtgtgcatgtgtgtgtgcgtgcccgtacatgcatggatctccgttagaataaatgataaatgtaaacttcatgagggctgggggttttgttttattaattcacccctgtatcttcaagacctaaacaaaaatccctaaagcatagaagatttttgatacctgttttagataaataattattctacagcttatacatatagcaaactatgtgtagaatattgcctggtgagcatggatttgaacagggacagtatctgatgagctaaatattttaatggcatcattttagaatgcagatgtacctgtcatagtgaccaaagtattccagtctgtttggccactgattttccactgccaatgttatctttcaggaatgaagtaattcccctgaaaaattgatctatttgttttcttcaaacatattgttatcatcaacctggtgatagttgaagcttactttggttaaggaaccattctctatcttctgtagagttacattgtgtccattatgtgctgattgttaatttgactctcaaagaacagctccatttgaagtcccctgttcccaagttcttgagagcactgccccttt

SEQ ID NO: 97026 - DNA, 14069 bp, Homo sapiens
agattctttctgctatcctgggtccctttcatttttatgaattttaggatcagcttgtcaacttctgcataaaagtcagctgggattttgaaaaggattgtattgactctatagatcgatttgggaaatatttccttcttaacaatattaagtcttctgatccataaacatgagatatctttcaatctatttaaatcttctttattttctttcaacaatgctttgcagttttcagtgttcacatcttgaacttcttaagtctattcctgagtattttattctttttggtgctattataaacggaattgtttgcttattttggctttctcattgctggtatatagaaacacaatttatatcctgcaacattgctaaacatggtttttctaaggtttttaaaatgaattccagccgggcgcggtggctcatgcctgtaatcccagcactttgggaggccaaggtgggcagatcacctgaggtcaggagttgcagaccagcctggccaacatggtgaaaccctgtctctaccaaaaatacaaaaattagccaggtgtggtggcgggtgcctgtaatcccagctactcgggaggctgaggcaggagaattgcttgaacccaggaggtagaggttacagtgagctgagaacgcgccactgcactccagcctgggtaacaagagcaaaactcgtctcaaaaaaaaaagattccataggttgtttgtttgtttgttttgtagagatggggtctcactgtgttgccctggctggccttgaactcctgggctcaagcagtcctctcaccttggcctcccaaagcactgggatcataggtgtgagccattgtgccctgccataggctttttttacataaaagattaagccatcttcaacaatctctagagattgttttatacctttcttttgaattggatgctttttttcttgactaactgccctggctagagccttctgtacacaattacctagaaggggcaagccgctcttgttttattcctgattttaggcgaaggcctcccatcttcaagcattgagtctgatgtcagctacaggttttttgtagaggctgtttatcaagctaaagaaatttccttccattcctcgtatgttgagactgaaattcagcagacagctggcacactgactgaagttcaaagctcggaacctgaacgtgagcctgagtgaggcagctccctgagggggcagaactgttgccttatgtgacagctagtgggtatggaggaatgaaaggagcctccactccttgctgccctgatctggctcctgacattttccttcaaatggcatcaggaccaggggccagctgggctctgtgaaacgcaggaagcagggagctgcgtccacccgccagcctgccctcacctccctagagccttgccttctctgtactgcacacttaggcacggtgagcccagcccaaggcatcattctcacctgcccctgaagtcagaccagtctagcggcctccgtccccttcctgccagtcctcttgtaaggagggcaaaaataaaacaccaaacaaaacatcaactatattctgtatttcctacattattcagataaattgtatttatcgaaaaagctgtcccgtttcgttttgacggccctggagtacggccccttcatcagctgagatcacaaagacgtctagcggaggtaacgggagcagggtctgcagtcagccacctggcttccagatgccagtcctgcccgctcctggctgtgcagctgagcacccaaacctccgcaggcctcgctttcctctcttatctgtaagctggaaaccgtagctacctcagtgagtcatggtgcagatgaaatgagaccaggctctgcaatgcacttggtacagcagctggcaaagtgtcatctgcccccgacaataagcaccatccttgcctctgcagagatgcttagcaaggtaagtgggttctcagtgttaagattcacagtgtaaccaacatctaaagctgttcatgattttggcctgaatgggaagttaggaagaactcacaaagaaatcacaaaggaaagtaaaaaaaggaaaaaagaaagtcatcaaggggagtaaaaactggttaacatttcattttcttttcttttttggcctagagattattaacttttagaaacaggtgtcacaggcaatggtctttaaagagcatctaaatagacctggaatttgcttttttaaatgtacttaattcccattacctctgtgcttctcaagcaattctggttcacattatgaaatgagtacattctcagattatttagttcagaaatcggaatatttattctattatgccacaaattaagcagaactctgcaaagtgatctctaaaaataagtctgaaaaataatcatctaattccagtagaggcctcttacactttttaaatgttaactccaggccgggtgtggtggctcacgcctgttatcccagcactttgggaggccaagatgcgtggatcacttgaacccaggagtttgagaccagcctggccaacatggtgaaatcccatctctactgaaaatacaaaaattagccgggcatggtggtgggtgcccgtagtcccatctattcaggaggctgaggcaggagaactgcttgaacccgagagatgggggttgcagtgagccgagattgcaccaccgcactccaccctgggcaacagagcaagattccatctcaataaaaaataataatacattttaattgtggttaaaaaatacataaaatttaccatattaactgtttttaagtgtacactttagtagcattgtttattcatattggtctgaattttttttatcttgcaaaactaaaactctgtacccatcaaacaactgcccaccctgcccccagccctggtaactaccattttgttttctgtttctataaatttgactttaggcatctcacagaaggggaataagacggtattgcacagccaagatcatgccactgcactccagcttggcaacagagcaagactctgtctcaaaagaaaaaaaaaaaaagacagtatttgccttttcgcagctggcttatttcacttggcatagtttcttcaaggttcacccatgttgtagcatgggtcagaatttcattcctttttttttttggagatggagtcttgctctgtcgccaaggctggagtgcagtggcgcgatctcggctcaccgcaagctccgcctcccagttcacaccattctcctgcctcagcctccggagtagctgggactacaggtgcccaccaccacacccggctaattctttgtatttttagtagagatggggtttcaccatgttagccaggatggtctcgatctcctgacctcgtgatccacccacctcggcctcccaaagtgctgggattacaggcatgagacactgtgcctggccttcattcctttttaaggcttaataatatcccatctcacaggccacctggcttgtccattcatctgttgattgacgctatgttgtttctgcctcttggctactgtgaacagtgcagctgtgaacatggtgtgcaagtggctctttagactttgctttcaattctttgggtaaatacgtacaggtgggattcctggatcacatgctaactctgaggaaaacctccatgctgttttcatcacagccatcctaactccatgctgtttttcatcatagccatcctcatgagtatggagtgatcatctcattgtgactgtggttcgcatttctctaatggtcagtgattttgagcatcttttcatgtgcctactggtcatctgtaaatacgactgtcccttggtatctgtgggggactggttccagaacctcccacggaccaaaatctaaggatgttgggagtatttgcctgtaacctatgcacaccctcctgcatcctttaaatcgtcactagattacttataatagctaatgcaaagtaaatgctatgtaaatagttgttacactatattgtttagagaacaatgagaaggaaagtctgtacatgttcagcatgggcacatttttttaataaaaatattttcaatccctggctggttacatccagggatgcaaaacccatcgatagagtgctgactgtatatcctcttcagagaagtgtctgttgaagtcccttgctcatttttaaatgaggtgacttgttttactgttgagtggtggttgtctatatattccagatattaaccccttatcagatatatgatttgcagatattttctcacattccacaggttaccttttccctgcacagaagggaaaggttgattgtgtccttcgatgcacagaagtttctaagcctgatgtcgtcttagttttacttttgttgcccgtgtctttggtgtcatatccaataaatcactgctaaatccaatgtcataaatttttcccgttttcttctagaaattgtatacctttatttcttgtttagtctttaatccactgagttttcacataaggtgtcagataagggtcttgggggccacatgttggcctgtgcaacagttaaagggccccaagcatagtcacatacgtgcagatgatgttcacacacagatacccaggcccaggagatcttggactccccaaggccatattctattcctacaactgctgtccttccccttaacctccttttgttctggccttgctagcacagacccttgcatgctaatcaaatgacacagttgagtttggaggaaacatacatcagtgaggaaaagtgaccacagaatccttccaggtttcaccaaaaccacccgtgacgtagataaaactagaattctggggactgggattcctccttttcccctgagccactacgtaaaggtgactgcattacagtcccatacctcttatctgtggccccagtatccattttttttaagacagggtctcgctctgttgctcagactggaggacagtggtgcaatcacagctcactgcagccttgacctcctaggctcaatggatcctcccacctcagcctcctgagtagctgggactccagacaggtgcacaccaccacactcagctaattttttgtagaaatgaggtctcactatgttgcccaggttggtcttgaactcccgggctcaagtgatccacctgtctcagcctctcaaagtgctgggattacaggcatgagtcacagtgcctggcccaaattcatagtcctaaacatggaaagttttgtgtacttcatttggcggaaagtctaacctgatttggcacgagacgacccatgatccttttcgtcctgcttgtattttgctgcaggaatatcagtttgatgagggtgttgccccaggccccaagtggaatatgcacacgtcactttcctaaaatcagaacaattcagagttctgaaacacacgaaacacagctgtttctaagattcttgactaagaggttgtggcttatgctatttttcctgactgtggcctcactttcttcccaataaatgtttcaatctgttgatactaatgttttttctcatgatacttgtaagataactgattttaacaaaaggtggcacacctattaaagacatggttaagtttcattggctgtatagcatctctaattggaagactacatggcatctatccaggttggagttgtaatcacctagggatgtctacatctgtctacctagatcagtctgtcagttccatcgaggtctgtatttcaaagtccatacataacacacggttcttcccattttacagaattattttttcaaaccaaagttcacatactgctggtgggaacaggttcaaatagggaatgctgatacatatcaacaacctttgagacaaacctgttcacacagtgagtgtggagcccttggcccccctactttctctctcgcaggccccgacatcaccctgggcttgcgctgttggtagtgttcaaaggaaaactttagaaacattaaattttacagagtttaattgagcaaagaatgattcaggaatcagggaacccctcaaaccagaataggctcagagagactccagtgccactgtgtggccaaagacttacggacagaaaagggagtgaggcacagaaggcagaggtgaggcctgcaaacagcagggtggctacagctcgtgtctggcttattgaaacagagtttgaagtgctgctgcctgtgactgattcaagagtaggttacagtgtccacacatccaattagatgactgttcactacgtatggagaaacctataggctaaacttacagtatgtaaggaggcggcttcaggctacagctgagtagtgtgtccttacagttggaaccaggagttcatgggaattcttcatcatccagtggtctgtaaatgttgcccatgctgagtagtctgtccttacagtgtgaaccaggggttcatgggaattcttcaccatccagtagtctgtaaatgttgcccatgctgagtagtgtgtccttacrgtgtgaaccaggggttcatgggaattcttcaccatccagyggtctgtaaatgttgcccatgctttagttttgttacctggttgctctgtttttatgggattgtgagaaactgaaaaactgtgactgctggagccattttcccacaatccccattttttaaaaatcccataaaggctctctcgtgagcrccgcacgttttcccttgtagtcacgagggtaggggctggagaaagcagcagagatagtcaaaaacccacagctacaaaaaatgcactcctaagagcaagtaatggcgagggctaaaaggcactgtgccccttctgggccattctaattaccacatttaaatggttttgagaaaagagaatttttatctgaggaacgcgagttcttttaattatcaggccgagagagacattcaaatgaggcgacaatcgcgccctactaccccttgacctgtgttcacctctttaaactgctactggtggcaacagcgccacaaacagctataaattaacctaatgacgccacaatggacactatacccacactcaatagctgaacaacatatagtcagtcactaatcaatgttatttctgtaaaccagtgagaattcctcacaaacaagttcctattagtccactccctggcccccttttttgcctttaaaatccactgttaactgctaatcggagtacacattcagggcgccttgaatttgtgctcaagtgtggcccaaataaactctctacttagagaaactgtgtctccgctcgttttcaggccgacagtttccaaaatgttagtattcagcctaacatgagaaaagtcaccatataaaagtgaggggggaaaagcaaatacaggataatctcaattgtayataaaatttatatacgtaaggacaaagatacatagtaaaaaaaaaattctggcaggtattaaggctgaaaaaattaaaacagtccagagcggtctggctcaggccagcctgggcctgccgagtagctgggacctcagccaccgcgcctggctaagtattaatgaatctgttttagagatagggtcttgctacgttgcgcaggctggtctccaactcccaggctcaggtgatccgcccgccacagcctcccgaagtgctgagcctcccraagtgctgagactacaggcctggccgcccgcccgccagcttaattcacgtaaattccagacaaacgtagaaagtggctcctttagtaagccacttgcggctgctgctcatcagggttcgcctggggccactgagaccacgcgccggtgcccgccctcccgctgcggtccgattttctgaaccaaccaggcgcttccgggcgccttgccccagacgggcccaccgcctgcgcgggccgagggcggcgcacctgcccctgcgcttccgcatcgaaggtgaggtcggaggaagagaagaccgcarcccccaagctcccgcggcgtggggtccggggggggacacgaggcggggccaccaggacgccgacagcctcacgtctctgggcccgcggcgcgcaaggcatgccgggacccgtagtcccgcgacgttgcgactcacagtgcgcgatgggagtggaggagagcggctcgcggtgcatgccggaactcgtagtctcgggatgctgggtctcagcgcgtgatggggtaatggcacgcaggcctgcgttgaacgctgggactcgtagtcccgccatgctctgtccgcggtgcacgccgggatacgtagttccgagcgcgccaagaccgtcactgggactgggcgacagcggcccgcgttgcatgccgctgctccacggtgccggcgctccgaggaaaagtaggtagggctcaggaacgcagttcttcacggccggcacgcagggttggtcccaggacggagccggctccggccccgcgcggcgctcgtatttacacgcgcacgtacgcacgtacgcggcgcccttgcgtgacgtcacgcgccctccaggaagtcggcgcgggctaggcgacgggtggaagccggtaccgagaggaactacagcgtcgccgcctgggttgtgtcgccgcggtaggcgctgcgctctgagcgcagcgcaggccccgtaccgaccgcccgcccgccctctgtccgcgatggaggtgccggccgcgggtcgcgttcctgccgagggcgccccgacggcggctgtggccgaggtgcgctgcccggggcccgcgccgctgcgcctgctggagtggagggtggcggcgggcgcggccgtgcgcatcggctcggtgctggccgtgttcgaggccgccgcctccgcgcagtcctccggggcctctcagtcccgtgtagcctccgggggctgcgtgcgccccgcgcggccggaacgcaggctgaggtcggagcgcgcgggcgtggtgcgggagctgtgcgcgcagccgggccaggtggtcgccccagggtgagtgtgctgagccgggcggggccgagggcgggcggctccggggagggatcctggaggacccccgggctgctgcgtccgcggtgggcaggggcgcccctggtgagggagcgataaagcgggacgcaggcactgcgcttctcccctaaaactggatagtcaccacctgtggttttaccaacggggagcattttgagataaaaggaaagggtcctgcgtagcgacacgaagttactgtttggaaaagctatgtttgtttctttctttctgcagtgatagtccccgccccttcctttagctccacctttgtgacttaggaaaactcatgggtggctgtgagcacaagagtcatcaggcaggctccagacctgttattgaaatataaactgttgggtgtgtgcacatctttaaatttttgtaaactttgtgaaacgcagttgtaaaacctggtgcagttctgtttcgtggctaaggaacgggcggaacccaggcctgcagcgaaggcagtagccccgtggttgaccacagtgggcattgtcgcaggctgcttcagggtgacgtgggcgttgtgacagactccacagctctcagtagctgtgctctgaccccagaaggggatatgtttccgtagcaccgaagtgtccagccatgtttgaatctacccttgtgttctgggatgggcgggcaagtggacacgcgtgtgcgcctggctctggtagttttgattgtgagaacagaaactccagggagaggtggacactccagcccgcagtgggccgggcgtgagctccctctgggaaaggtgccgctccttctggggatgccactctcttccctcctcggcagccgcggctcctcgtccctttggcttgccctgaccctgtgtttgttgaggatcttctctgcatctggttccgcaagagtgaggactgggacaggagtcttcccgtcacagccccagaacgtcctggctccgcttcctttggagacagagcctgggtccttgaccctcggcacgggcactcactcctgccccctgcgtgctggtgggtggggctgggaggttcagggccttgcctcccagaaaatgccttcacggcttcctcagtgggcactggccgtacctgggaggattgtggaggcagatcccaatgctggtgtattccctggacagaaaaccccaggatggaagatccctactgaggtttcattctgttcctctgattgtacagaaagggctgctttggcctagacaggtgagtaacttggttatgtggcaagttagtattgaaattccatgttcagtcagtctagtgaataaaaccaacccagtgcatcagtcagtcagccagccaggtcatgagcttgatgacgggttcccagcagtcagtagtgtttacagggaggtgctgtttgagatcttggggtacctcacagggccctttgagacactgatgtgatatcatttctcctcagatggagcgtctgtgtggcaccaggtgtccctctggttccaggaggctcatctctctgcctccagtccatgggcggcaggtaaatccttgccttagagaaagccacagacggtgctgcctggaatttgaggtggcttcttccccgtttctgtgtactcctgtgggtttgtgtacatgggttttatgagcgttctggggagtgtggtggtggtggtgtgacgtcagcatttccggaggtgttcctgcccgtgcagtgggcgtgggtgccatagatccaggaaggagcgactggaagggctttagtctaaagccctgtgtgcatgtgccctggcagttctggtcgtctgtttggaatcaggttcctgcctcgcagttgcattagccagctgaattcgggaggtgcatttgcagcaggagtccatgctgctgacggtcggctccgtgtggtccagatgacactgccctggctctggggggctgccgttgggagccggtatgtgttggcctccccaaaatgcctgctgcacctttgtggaacacagttgaaaattactagattcagtcacttgttgacagattttgtgaacagggtgggttacaagtgcgtttctctggcagcacccctgtgatgggagtagcgccctgcagtgtggacttgtggtggctttgctgacgtctctccatagagagttgcaggtagaaatctccgcagcttttgcttaaagccaacagtgatggatttctccaggacgttgagttccagctcagcagctctttatacacaatttacagctaaccctcgaacaacttgctttggtctgcgagggccacctttatgtagatgtttttcagtaaatcgtctgctgttcgcatccatgggttccacgcccaacactgtttgctgggtgtggagcccagcctgtttatacagagcgctgactttctggatcagtgggttctccaggttgactgcgggacctgagtatctgtggatgtggaatttggtatctgaaggagtcctgcagcccgtcccccgtgagaatgagggactgattaaatatggaagtctttccataatagattgtgccgctttgtgatgaagtagagaatattgggcataattccatcctgatgttggaaggtgataggtgtgagtttagttctcatccctgcgacgcctctgggacgtcggttggtgaagagcatctgccttcctctagagagcctgagtcactttcacttaaaaggtttttcctctgtttttctttttttctctgattgctggtgtggtcatttccagcaacagctccgcggttctcttctgcggtgtcccaccacttggaggctggaaggtgaagacatcagggaagaggaactgccttcaaccgtcattgactctgctcaccagcccaggtgtttgatttttactaagcaagttcccagaattgcacgtgggctgttttataattgacttatcttgaccacctctaaaagttctcttgaagttacagattcctgagatctttatctgggagagcaagcatttggttgaagtttgctttaaatgtttatagactgattatcgtgtattgatccttagagtacccctttcagattatgcaaataacacgcacttgtatagacaagcatgggcagaatccacaactgcttttgtggaggctccaaccctggcttcagctcatctgcgtgtgagggcaggggaggtgcagaatctgctcctgggcttgtgctgaaaggaggtcccttttaacagggacctcccagcaccaatggaaccccgtggctcttggtgagagagagcaggtcctgcccagctgatggatcagaaactcaggtgtcagaaacggggtttcagggcggctgcctgaggaatgcgcaggcgatctgacgttggaattctggcttgggcgaagcccttgatgtggccacacagttttggtccctcaagggcttactggttgcctgcgtgccctggtggctccttggtgaggggcctttggagaaagtcttgggaaatcagatttcccgagggtgttgttgaggacattgctgacgaggtgtgggatttacggggaggacagcctgtctcttgaggcttggtcgctgtgttcaccctgcaggtgttatgaattagcttctggcccaggacggttttgggaccggggggtgcctacccattgttgttcctttatcttgatcctttcacagggcttataaaaatacttatttttcaggaataacgggaagtatctttgaaaacatagcattaaatctgctgaactggagcttgcagagagcagacagcggcagcagcctgagtgtgctaagctcaagcgtcgcttgtgtgccatcaccttagtgaaggtggctcttgaccccactggccgccggctgcttgacagtaacttgtttagctgagactgtgtttgagaaactgagaggtgtggatgttgcttgtacatgtgcagccagcatgctcacagtgccgaggagcagagtacgcgctgctccagagcgtagattagaacgtcagtctaaacagttctttatagcatggaattttaacaaagaaagaagaatcccacgtgggtatgtgtgagtgagccttgtgtagcttagtgtcggttactgaggcggagcactgcggagagaggtaatggaacctgtggccctgtgaaacctccctctataaatagcaggtgtgagtgaacctgtgaaaagcaccagcaccagccaggcagggtgggtccgtgccctcgttgcctgcattgttgtcaccaggcaaggtgggtccctgctcttgttaccttcattgttgtcaccaggcaaggtgggtccgtgccctcgttgcctgcgttgttgtcaccaggcaaggtgggtccgtgccctcgttgcctgcattgttgttaccagcaacatttatcctaaccacatcagtggttatttttagacaaagaaccattctgggaacttaaaaacactgcatttgggtgaagttacaatagtcactagattgtcgttttgatctttaataagattgtatgtttttgtcgggcttcatcctatctggcagaagtaagaacctcctcactccattggaaagaaactgaggttccaagaagtttggacctgccctgccccttacagggtgtgaggtcctggtgaggaggacggtgcagggacctcgtggtctctactcccggtttctctgcggtgctccttacggggtgtgaggtcctggtgaggaggacggtgcagggacctcgtggtctctactcccagtttctctgcggtgctccttacggggtgtgaggtcctggtgaggaggacggtgcagggagatgcctcgtggtgtgctcaggcccttgagagagcctctgtccttggttctctgcgtgctgctctctgtagaccaggtttcagccctggagattcctagtgtggggggagtagctagaacaatagtgtttgtctgcttttataatatttatgtggagtacaattattttaatagaaaatattctgacaggtcaccatctttcagaaactaagtcttttttttcctgcagatttctttgctttggctttttcccagtcactcac

SEQ ID NO: 97027 - DNA, 53674 bp, Homo sapiens
ctagaaaaaaaacagaagactgtgtggcaagaaaaaaagaaagctacagatgaattttggttaatgagtagaaacctaacagaactcaggtgatgggtcagtgcaaggacctataaatgaccttgctatgctcagtaagcagagaagttcaggaaatctgtgaagcctctgaactggagaaaaaaaagatagaatattgtcaagaaatggtagagagagaaaactaaatgcctgagcagagttaaattaagtcaagctggagtcagcatatcatctctgtgcctataaattatctctaggcatctagggtctcacagtgtggctgagcagcttctaccctaaaggagtaaatttctctgttgaaatttaggagaaagatttaggcctcatattgtaatcttcagaagagaaactcttgaactcttgaatggtggtattagaatagagtcaagaaaagaactagagtaagtgttctctgtgaggaggctagaggctaggttagttacaacagtgacagactgaatccaaagcattatctttgggcacaaagatcagcatgtttggcagcagtaagctgtaaaaaagaaagaaggcaagaaaaggaaagaaagttgtttgactgctattatctcatgtactcttatgtagcttaagatcaatagaatactgtattgtagttataaaatatatacacatcaaagtaaatactctcaaaccactcatttacggtgcagctccttaaaaataatccatccatcatatgtggtcctgatcaacaaacttacttagatatttatggaagctgcagtatttttcaaactacatcttaagaaatccaaaattgtgtggcactgtctcaggagcccctgggttgtggagtggggcgggtaatgggggagagggaaatcaaacaagcagggctaaaaatactcctctgcttcttaaatcagaaaagctttgcttttatctgttttatataacagggattcatgtaagatttcatttgataaaagactactggtaaggtgggaaaagcataggcaagactaggtttgaactgtgtcactgctatttacttactctgtgacttgggaaaattacctaaactctctgaatcttagtttcctcttttataaaatgggatgaataatatttacaaattgttgtatgaagtaaataagataaagtatgtaaaacacataccatgagactttagcacatagcaggcactagctgttagttccttttctgaaagacatggaatatagagatagatagattagatagacagatagatagatagatagatagatagatagatgagatagagagatagagagagagagagagatgggttttggggtttttttgtttgtttgtttttcagacaggatcttaactgtgtagtggcacaatcgctgctcactgcagccttcctgggctcaggtgattctcctacctcagtctcctgactagctgggactacaggcatatgccactaagcccagctaattttttgaattttttatagagacaaggtctcactatgttgcccaggttggtctgaaattcctaagctcaagaaatacacctgcttcggcctcccaaagtgctgggattacaggcgtcagccaccgtgcttggccaatagatgtttaaataaataaataaataaatttgtataaaaaatatatatttgtctgtgtgtgtgtgtgtgtgtacatatagttgtagaagcttctgcagacagctcttctgtaacttgcagtcattcgaaagatatactgagcaagaatttggaggtcagcagcatcactctcttcagcatttccaggccatggctgccgtactatctgctagcataaatcctcagcattcagctacagttcttccttcctctatattttcaacagttactatcagtagttttcattagctcctcaaagctatattgcaaagaatttaaatattattatcattttaataaactaggtcagttcacaaaagcaaccaaccacaaaagcactttaaacaaataagactcaccgactgagattaaaaggagctttagagtggatccacgcaacacctttttttgccatgagagatgaagtaacctcatcaaactggcagagtaatcaactagcaaaattcccagatgattgtagtagctcttgaacacataccatgctgattagctcatgttgcatgttgcatgaacaatacatggcagagaaaagctaaaagtcagtgggaacactatgccaatttaatgtcattaacattccagaaacctacaataacaaatactaattgcaaaatatggaatgaaatgcctacattaaatcttaccatcctaattccaccattgtgtgacattgggcaagttacttaaccaaagactatttcttcacgtttgaaataaggtggcaatacctgcctcaaggccttgttatgaacaatatctcttcgtggtattcttgccaaaaatccataacctcagtctaaacacaaagaaaaatcagacaaacctaaactgagagacattctacaaaataactgactggttctcttcaaaagtgccaaggtcatgaaggagaaaatgtatgcattagaagagacatgaaagctaaatgcattgtgggaccctggatttgatcttggactaaggaaagggacagtgaaaaaactagtgaaatttgaactaagtctgtagctaaattactattattgtaccaatattaatttcttgattttgataactgtattatgattattcaagacaaagcttggtgaagggtatacagaaattctctgtactaattttgcaactctgtaaatctaaaattattttaaaattaaaaaaatttaaatcttgtgagaattaaatacagggtcaaaaattttaaaccacgctttttttctttttaggcgtaattcttcatctaatggctatacttagcgatagttaacagcaagaacattatgtgaatactggccaaacccagactaggaaccgctaataatgaaacatgttcaactgcaataaaatgtggacactttatcatacttcaactgaataacaaatacttttgcaaaaatctactaaccatcaatatttcactctttgcacaatacaatcatgacttagtgcttaaagaagtatggattctgtgtttggccaatgatgacaggcttaaatttacctaataccatcaacatttaaacagaacatgtcagatcttaactcctctgactttatgactacgctcatcttgtcagatttcaacagttttctgtcaggcaacacctggcaaaataaaccgttttcatataaattgtagacatcccataatgagtatggagtgatgtgctgttattcctgtttctccctgttttattttcaacttgagtttacatctgcatcctctgagataagcaaagatgccctatgccaacatttttacccaagattttgttttaaaaaaagaaaacactaaaaaccattaaaacaacttaggaatcacaacactttattagttagagtttctaacatagcactgttatggctcattcacttttgctttacacctaagggagtaagtgcacagccaaggctaataaaaactaacttggctatttcttggtttttgatggaaccattcatatgataaatatacattttttcccattatactatactcttgcaaaataatttttttctacaaaggttatgagatatcataaaaatgtctaatgcatctggtttaagaatccaatgcctctttcacatatttctgcatctgttcacaaaatccctttgacttcaaaggaagcttttcaagagaaaaagaagatacatacaggaaaagtggccataaatttttagtagtccttttctaaggccattttaataacagcattgtgggacaagtatcttcctcagaatcctaaaatatcacaaatgatattaatgactaaagatctgtataaagatttatgatttcaaaacgtttttctggttattaaaaagtgtgtgtcttcaatttagacatgtgaaaaatatgtaatgctataaaaggaaacaaataacttttaacccactatttaggaaggccaaagcaaaataaaaaagttaaaaatgtttgttcccttccaggctttttttctatgtatacgtttatataaacacttatatataaacataacatcgtaataacactatgaacacaattttgtatcttttctcagtctttcaaaaaaccacattaatctttcaaaccatcattttcaatgactgaaattatatgtagatttatactttaaaaaaatactctcacatttaatacttattctactcaaagctaaattaaaggtttagaaacattcatcggtactggaaattctacatcttgaaacaatctagattaataattaactttaatagccctattcataaatgccactgaaacaatagtagaggtttaagaaattttttctttagcatttataatgacttagtgtcttaaacttccctgggcagtcattagcaggctgcagtttgtcttttttttctctctctctttgattctctattctcaagacatcttcaattctttagtttggaataaggggaagtttgggtctacggcttagctactttgatagcataggtgttaatgtgctataaattataaataatcatctcattctagttctgcagaatcaaaccctcaaatttcaaggagaggaatttttgataaatttatctaattttgaattgtcttacctaacattgctgctgaaatttaaggtgacatttgaatagttgtttgctgacaagcagctttccggtatatattaatatattagcttataagaattttgtgaggctcacattaataaaaaacggaagttcaaaaaatttatgacatgactagaaaaataagttgaacttaaattttggttttcataattactctcattggctttgttttggcttcataatcatggaactatagattttccagaggttgaaagaacattaacgtgtcaatcagtccagctctcttcctccactcaatatgagcaaaaaaagaagaaaagtcccagagagattgtgacttgtcacacagctgtcaagtggcagaccaaacccttgacctctaggctaccttcctgtctagcgctgttttcaacacaacagttacaataggtgcgacatcctcacacctactcattatggcaatacatatgcaaatgatgccgggaaattacctaataaaatcacattctctcctttctctctagttcccagaatatatctcccgtagataaagtatgtcaaagtgcttgccactgagactgtacttggaagacgtttggtaaaatcctgaataactgaaagggtatcccctccccctgacttttttgctatgagggtaaaattccaaatatttaagacaattcccaataagaccaggccgcgacatggtctccgtacgacgagattaatggtaacagcagtgttgtcaagcgcaggacaggacaaactctgtagcagcttgcggtcactctttcacagcctgctagatagagcagtgctgtggagccaccaggagcaaccagaatggaagatgcactgacacttgctcaagtaccacactgccaacctgctgccccgacccaagctgcccaatgcctaacaaaacttctctactctctccgatagccccttagcgtgttgttagggtaaggagggtaaaaacagtaataagaccacaagaagagcagtctctaaaacaacccgtctctgaaaacatcacacgcggggtaggctcaccgcgttgcccggcaacagcggcggcgctccgctcccagaactggaggtggcggcaagaggtcagaaagcggcgcgctttttccaccaagaaacctttacgtcatcacgtatccttgcaacgtcactacgctctgagcaggccgacagtcatagacgagtagaccttaggcgarggaaggcatgtactttccctaagaagcgggaggagagaaataaatagagggcagtgggatgagaagaacctcgcgggatgggaagccgcggagggaaggrccgtctttggttacctggagagcgggagcagctgcggatcccttatgaagtgcccggatgaagctccagcgctcacgcgctttccgcattgagtgcagcgccatcttgagaagggcggagccgtcttgtttggaatgacgtctgttcagagagccaatcccagtctcgcgactcctgcttgctgggcgcggcttgggcctccaggctgcgcagcgcagccgctatcgggcggactgcagttcttgccgagcaggtggggacaggagcggggtggggctttagtgtttttccctggatcccttgtctgctcagccttcctggaaggagaatttccttgggggttattagtagcaacgctttagactggaagaaagtcaagtaggctgcatttctgatcttagctatgtgaaggcaacctttaaaaagtttgtttagaaactcccagttctcttagagggtaatataagtggtctttttagacatgtgtggcctcatttcccttttttttctttgagacaaggtctcactctcgcccaggctggagtgcaatggcgcgatctcggctcactgcaacctccacctcccagactcaagctattctcctgcctcagcctcctgagtagctgggaccacaagggtgcgccaccacgcccggctaatttttgtattttggtggagacagggtttcaccatgttgcccaggctctctcaaactcctgagctcaagccaagccatctgcctcggcctcctaaagtgctgggattacaggcatgtgccaccgcactggacttatgtggccttatttcattcgtcctgtaaactttgttgaaccctaccgtaatgtgctgggcactgaaggtacagagaaagacatatcttgtcttcaagttgtgtacagtctaatagagtagcggataaataaatgatgtacacttaataggtgttaaagaagcaagcaccgcaagttttaaggaggagtggttatgactgtggtgtttcaacctagtctagggaaggctgcaggaaggttatacctgatggaagaaattgttttgtttggggttatgagaaagtttaatacagttyttctgcttctgttaattcacctaaaaatctcccagacagataacgagtgtttcagtaaaaatataactggaagaaattcatgacaattcctttatgtgttttgtttataattcatccagctactgaaaattaccaaggagaggtaggagataagagatgcctataaaggagctgaaatctaccagggtaagacaaaacagtaaattaaaaccatataggataatcttgtaggtatacaaagtactggtgaagttcaagtataattggtgtaatttagaagtgagcaggaaagggatgaaggcaaaaaaaaaactaggaaatcaagttatagtcttcaacaaagctgatcagtttggttttggctgttaaatttgaggtgcttgtagtacttccaaaatgtgatgcccattaaatagatacatgggtctggagctcagaagagatttgaactaccaaacagatggtaattgaaaccaaggaaatccttgagaccatcagatagagtttgtggagtgaaagtagccagatgatggaaataaaggagccaagaggtgttgtagaacccaaagaatgtgatattactgagaccctggaaacaaaccttgccaggggaagggggatatatgttatgccttgtaaaatgcagtttaataaatgccctacatgttttactcatacatagagcaaagcattatagtacagtgttttacatatattttattaatgagattacatgaccctagcaattagcaagattagctttctgacatctttagtcatctagatagcaagataaaacctagcaataagactatggtgcaccaaaagctgtcaaagggtgtacctactttatttcttcaagaagtagttcttagtcgtatctgcagactcctatgaccaataatatttccgtgggaggtatttccaagacatagtcccactaaaaaaggtgggactttaagaccacaagttttataactttagtatcctgatttttaaaattgaaaatatttgctaatttttagactttgttagaagtaataaactgtgttttgcaccgtggcggtgacctggtaactctcaggtgtcactcagccagccttgcttcttggacaaggactatagtttatatttctaacatctcccccagcacctagaatagtctcttatgcagagtaggcacctcttttaaaagtaaattggattttaacaaattacacagcttattgtcagcaattgttatgcttttaacagccagaaggaacagttaacagaaaagacacaggatgtattaaaaatgaaccagttctgtctacttttgtactttttcacagtaagcattttggtgttggggaaagtatgactacaaagctcaccatcttctaagaggaggaatatattcagctcagtatatttaacgtattttaataagtttttaataatggtaaccatgactcctcggggaaagatatattattcaatgtatctttgaagaaaaaacctacaatacacttttgaaatgttttcatacaaaatggttaacatttaaaagtgtgtatatatcatgggctgggcataatggctcacacctgtaatcccagcactttgggaggctggggcgggcagatctcttgaggtcaggagttcgagactagcctggccaacatggtgaaaccccatgtctacgaaaaatacaaaaattacccaggcatggtggtgtgcgcctgtagtcccagctactcaggaggctgagacacgagagttgcttaaaccagggagacagaggttgcagggagccgagatcaagccactgcattccacactgggcaacagagcaagactgtctcaaaaaaaagaaagaaagaaaagaaaagtgtgtattatgcagttggttatatggaaaattctcctatggaataattcattctccaacagtggtgtttaaatgaagcaccactgtatttaatgacggtattttaccactgctatcatttgagtaagctaaagaactttggtaaagtaagatataaatgttgtatggaaagcagactttaaacatacctaagattaaaaagttttatagtcctatccttataacgtgaactatatgtctacatatgttcatgcttacaattttgaacacttgtttaaattttgatttctcatcaacacttttactttatagtaagttctggtaattttgttctctccttaacattccctgcaaatcctctcctgctagaaacaacagattaaaaccagactggcagttgggaaatggtttctattgcaaccatgtgtgtcagaagaaaggattaggtttccttgtccaagaacatcaaggggaacctccacctctgcagacacacctctattccttagtaatrgagagtttatacctagttagatttaaatgggataagggaagagtttaaatccattcttagctcaagcagtataatcagccctcaagtctcaaagtatccaattttctttctctaatttaattctaagtgtcaggttggtattagatgctgatcaaggtaatggagagttgccctacacatttattcacttaaagaagaattttgcagactgcaaagactagatggcaattgtattcaaaacttacttaaagcacaattcattcacccctgacctttcatttatattgagtatgttttttcaaatatagaagagattccataataaaagcaaacaaacctctctcttcataattatggactatagttctctgtacrtgttctctgaccatgccatcttatgctggacctattataaggacccaaattaaagtgaggcagatcctgcttttgagtgagataacctccaagagtcataaaagtatatgggaaactgtaataatgattattctttttttacctttggcttaactttagttcttcctcttattttataactaatgaaacttgtccacagatattaagtaccttgaccaaaatcacacaagtaaaagcaacaatgagaagaaccttcggctgggcgcagtggctcacacctgtaatcccagcactttggaaagccgaggtgggcggatcacctgaggtcgggagtttgagaccagcctggccaacatggtgaaaccccatctactaaaaatacaaaaatgagccaggcatggtgctaggcacctgtaatcccagctactcgggaggctgaggcaggagaatcgctcgaaactggaaggcggcagttgcagtgagccaggattgtgccactgcactccagcctgggcaacaagggcgaaactcatctcaaaaaaaaaaaaaaaaagaaatccatctccagatgaatgttctactttgacaccacagtaaagctgaagaggctaaagctagggcgggtccaaatggggaaggttccacataaagccacatccttgtgtcaggtttcaaagtcagaacaagcaaatgtcttatttttaaaggctgatactctcatctccacccctaatgtaaaaagatgttgtctttccctagtagtttttgggagagagcaaattatagcatcttactgtaaggacaataatcagaagctcatcttacctttgggaaggcttaaagggttttatagggagtcatcattgtcactttatttctggaagaaagggcaaaatccaagaagagactaagtgatgtgaatagcaaaatgggatttttctcagagcacttttttcttaagattaagggtcaaggccacactttttatattgccaggttcaacttcttgccttaaggacaattttccaccccacaacagtgaagatattttgatgagagttgagagaaggtggggaaggtgggtagagtcagagcagacacaagtgaataatatgcatgaaaactgactccattacaagtagagtccttagtgttcagaaccaggaggaatactgattacataggaatgttacaggccccaggattcctgttcatatttaatgttttctctccatactcttacaaatggccatttgaacattagagaacaggtctttaaagaaggcagagaattgctcccttgggtatggatctagaatagagaataatttgggagaattgtaagactatttcaatggtccttatccccatttttcatcatcagtcttaggacatgtatcccatagaggaaatacaactttaaaattagcaaaattcaacttttgaaagtgtattttactttgttgtctctctttgcrtggtgtatcttttccacttggtatggtcctaaagacaagatccttatgctatctgtacacttactctattttaaaatcaccatcttttgctcccagctactttataacttgggggagcagggtttgccgttcaaagcttatcttttacaaaaggaactttaacaagatctccaaaaagctccctcgagtggcttttagataggctcttttctgtttgtctttgtaatcaaactacattagatcctatccaacaccctgtctatctagtatgatgctatgatcctaggtgtgactactgaaagtaaaacataatgcttagatcttgatatttataaaaacatgattaaaagatatctctgcctctctaaaaatagggtcttgacctcactgtctcagtcaaattccatttcagccagtgagatttcactggacttccccagatgcattaacaactgcaatcaactatgtttttctttactttttcccttaataggtagaactgagcatgatcttggagaaaatctgcatacattactgatctctgaaccatttacccttcacgtgcctctttttccgtgtatgtgcctctttctccttgtatgtaaaatgagtgaaagaaagaggagagctagatgataccattgtaactcttgtatttcaagacactcgtttctgccttgtctcagattacaatcatttagagatacagaaataggtattacagtcagaatccacgttttagagtatatctgctgaccccatgtctgtggaagatactgagatgcaggtactgagaatgggcctcaaaatttttctgaagactgtgctccaggaagctatgctcaaccaaatgaaattggccctacttgtcatcctagcatagcaggtttcggtttatgaaagacagagaatatgcagctctctcagacacctaaatatgaagtggctttccacagatctcttttcgaagggtaagtaggaagaatatcttgacctgtttttgttctctgtggcagttcctctagctcccaactggattactttttgcttgttctcagaaatatgcttcttcttttgtaatcggcagtcgcaatgatttgtatgacagctgctagcccaagagagagttccagaagagggctacctaacaggtgctgtggcatttagaagaggaatggagccattgtcaacgcacagcttgcaggtgtggagaacaaagtatatatgtgttggagaggtggtgggtgggaaataaatacccctgcctctctctcctctcaccctttgatcttctgatcttttgattactcccatttgatgaacctcagggcaaaggaatatgacttaaccaatccgtaaaggtcagtccctccgccagccccttccccagatgcacagaacaagatgcaaaatgatagacaatggatccgaatgaaaatattcactgtagaactatctatttacagaactaggaataaactaaaaatgataaaaaccaaaatcatcttaggataactttttaaccaggcattatactttttaaaggcaagacctttatcttcatctctgacttacagtactaggcacatgcaagagaggctcatcagtgctgtgtgtggaaactaagaaaaaaaaaggggggagctcaataaatattggcaaattggttaaatgaacaaaacacatgtgagggggaggagggaaatgtgcaatgggatattttagatagtgcagagagttggggaaaaaaagtttttgagcctaagaaaccctggaagcattttttaattctctaatatatgcttgctttcttgtggtttgctctttccgctaaaaagcagaatgcataaaacattgtgattagttaagsattattacttaggttccaagtaattcgtatataaatctaaattactactcttcctccgttctgcttccccttctgtttggtcaaatccctgtgggagagagtagcattcctgtcgtgggtaaaataatttctatggaaaattttcaaaatgcaatttctataaacattatgtgaagatatgatttatttctggattcagtccttgtgcttgcatcatcttccaatttatcatcaagttctctgtgtgccagttctgtttttaaggatctgttcatatcagttgtaatctgagagggtaaacttccactaggaggattgaagcaaaaaaacaagaaaatgtgtcccagaaggcagtgggtgcactgaaaagaagatgggactttattcccagttctaacactgctatagcaagtaaagtgacattggaaagtccttaacttttccacctttttttttttattagacagagtctcactctgttgcccaggctggagtgcagtggagtgatctgggctcactgcaacctctgcctcctgggttcaagtgattctcctgcctcagcctcctgagtagctgggattacaggtgcccaccaccacacccagctgatttttgtatttttagtagagatgaggtttcaccatgttgggcaggctggtctcgaactcttgacctcaggcgatccacccacctcagcctcccaaagtgctgggattacaggcatgagtcaccacgcccagccaagtcccctatttttaaaaatattagccactagataattcagtatgagtccacacaaccactgacagtgaaaacagggacatacttcttggggcctttctcctggtctgcatgcacaaccccaccacaggagtaagaggcgggggtacacttaccacttacgttgtcacggctagttatcacctcagtaaaaacaagactaccatgcctagtgcacagaaggtcacaggacacagggctgtggtttctcctcaaagagtgacattcgtttagaacttagttcatccctcttatcccagactgcttgagaattaaggagggaaggaaaagaagagggtctctagctctgatctttactgtgttgggaagatccccactctaatcctgttgccactcctttttttttttaagacaataataaggtctccttttctagaacactcagctcataagtttttagacctgtccttggtggccggacgcggtggctcacgcctgtaatcccaacactttgggaggccaaggcaggcggatcacgaggtcaggagatcgagaccatcctggctaacatggtgaaaccctgactctattaaaaataacaaaaattagccgggcatggtggcaggcacctgtagtcccagctactcgggaggctgaggcaggagaatggtgtgaacccaggaggtggaggttgcagtgagccgagatcgtgccactgcactccagcctgggagacagatcgagactccgtctcaaaaaaaaaagtttttagacctgtccaactgacatttaacaccatgagatggtgaacttggggaagacatgagactagtaacacacacacacagattttcaagagcttgacattccattatttactcacctagcaaatacttattgggtgtcttttgtgccaggcactgtactaaatgcacagagctgaataggataccatctgtgctcgtcaagatctccgtttaatgaaggagaaggcaaacaacaaacagaatttcaagacataagatgttggctgtgggtttgtcaaaaaaaaaaaaaaaraagaaaattcaagagaaacatctttgtatcaggaagcccttgtgatttccttagaatcacactttgtcagcaatcctagcctcactgcttgctgttcgtataaccttggacaggcttcctaagagttctggacctcagtgtcctcatctgaaaatgggggcaaagaataagctcccaaagtttccttactgctctaagatgagtactgagctcaatcttgaaggagtgtctgtatagaattttgaattggaaagaggagcagggtgcccttaggagagagaactgcatgaagaaagcaaggatatgcaaatgaatagagcataaagaaaggtgagagtaaagagaataaggtaccgacacatctccctgcttcctccttcacccgcttacgtgtattttcaatcagccatcagagtgacctattaaaatgtatgtcagctcatggtcactactctgcccaaaaccctccagtgactttccatgtcatttggaaaaaatccaaagttctcaaaacctataagacctaagtgacctgcatcccccatcccaacctctctttctggccctttccccattaacttccccctgctttgctttactccagacatgctggtctcctcaccaatgctcaccagttaccacctaaaacattttactttattttctccgcctctagaacataagcagcatgggagcatagccttttgtctgctttattatgcatcctcaaagttcagaatgtgcatgtctagtaacatatttgttaaatgcattttcttatttacaagtaaggaaactaagatcaaagagaatgcaaatgaagtcacactgctctttaggagagggtggaccagtatgtgcacagattttctgtttctctgccccaaaggtagatagaatgatgggccctgaagatggctatatggcagaaggaactttgcagatgtgattaagaatcttgagatgagaatattatcctggtttattctgtttagtccaatgtaatcatagaggtttttctaacaggggagcaggagagtcagtctaagaaggaaatgtgatgatggaaacagaggttggaagatggaagaggacccagagtcaaggaatgcaggtagaaaagaaaagcctggattctcccctaaagcctccagatggaacacagccctgcctccaccttgatttcaggacttcttaccccaagaatcgtaagctaatacatttgtttttgtttttgtttttgttttctttgagatggagtcttgctctgctgcccaggctggagtgcagtggactgatcttggctcactgcagcgtccatcttccgggttcaagcgattctcctgcttcagcctctcaagtagctgggattacaggcgcccaccacacccgrctaattttttttttttttaatactttaagttttaggttacatgtgcacaacgtgcaggtttgttacatatgtatacatgtgccatgttggtgtgctgcacccattaactcgtcatttagcattaggtatctctcctaatgctatccctcccccctccccccaccccacaaccgtccccagtgtgtgatgttccccttcctgtgtccatgtgttctcattgttcaattcccacctatgagtgagaacatgcggtgattggttttttctccttgcaatagtttgctgagaatgatggtttccagcttcattcatgtccctacaaaggacatgaactcatcattttttatggctgcatggtattccatggtgtatatgtgccacgttttcttaatccagtctatcattgttgaatatttgggttgtttccaagtctttcctattgtgaataatgccacaataaacatacgtgtgcatgtgtctttatagcagcatgatttataatcctttgggtatatacccagtaatgggatggctgggtcaaatggtatttctagttctagatccctgaggaattgccacactgacttccacaatggttgaactagtttacagtcccaccaacagtgtaaaagtgttcctatttctccacatcctctccaggacctgttgtttcctgactttttaatgatcaccattctaactggtgtaagatggtatctcattgtggttttgatttgcatttctctgatggccagtgatgatgagcattttttcatgtgttttttggctgcataaatgtcttcttttgagaagtatctgttcatatcctttgcccgtattttgatggggttgtttgtgtttttcttgtaaatttgwttgagttcattgtagattctggatattagccctttgtcagatgagtagattgcaaaagttttctcccattctgtaggttgcctattgactctgatggtagtttcttttgctgtgcagaagctctttagtttaattagatcccatttgtcaattttggcttttgtcgccattgcttttggtgttttagacatgaagtccttgctcatgccwatgtcctgaatggtattgcctagattttcttctagggtttttatggttttaggtctaacatgtaagtctttaatccatcttgaattaatttttgtataaggtgtaagaaagggatccagtttcagctttctacatatggttagccagttttcccagcaccatttatttatttatttatttatttttatttatttatttwttttttttttgagacggagtctcgctctgtcgcccaggccagactgcggactgcagtggcgcaatctcagctcactgcaagctccgcttcccgggttcacgccattctcctgcctcagcctcccgagtagctgggactacaggcgcccrccaccgcgcccggctaattttttgtatttttagtagagacggggtttcaccttgttagccaggatggtctcgatctcctgacctcatgatccacccgcctcggcctcccaaagtgctgggattacaggcgtgagccaccgcgcccgaccagcaccatttattaaatagggaatcctttccccattgtttgcttttgtcaggtttgtcaaagatcagatagttgtagatatgtggcattatttctgagggctctgttctgttccattggtctgtatctctgttttggtaccagtaccatgctgttttggttactgtagccttgtagtatagtttgaaatcaggtagcatgatgcctccagctttgttcttttggtttaggattgacttggcaatgtgggctcttttttggttccatatgaactttaaagtagttttttccaattctgtgaagaaagtcattggtagcttgatggggatggcattgaatctataaattaccttgggcagtatggtcattttcatgatattgattcttcccacccatgagcatggaatgttcttccatttgtttgtatcctcttttatttcactgagcagtggtttgtagttctccatgaagaggtccttcatatcccttgtaagttggattcctaggtattttattctctttgaagcaattgtgaatgggagttcactcatgatttggctctctgtttgtctgttgttggtgtataagaatgcttgtgatttttgcacattgattttgtatcctgagactttgctgaagttgcttatcagcttaaggagattttgggctgagacgatggggttttctagatatacaatcatgtcatctgcaaacagggacaatttgacttcctcttttcctaattgaatgccctttatttccttctcctgcctgattgccctggccagaacttccaacactatgttgaataggagtggtgagagggggcatccctgtcttgtgcccgttttcaaagagaatgcttccagtttttgcccattcagtatgatactggctgtggatttgtcatagatagctcttattattttgagatacgtcccatcartacctaatttattgagagtttttagcatgaagggctgttgaattttgtcaaaggccttttttgcatctattgagataatcatgtggtttttgtctttggttctttttatatgctggattacatttattgatttagcgtatgttgaaccagccttgcatcccagggatgaagcccacttgatcatggtggataagctttttgatgtgctgctggatttggtttgccagtattttactgaggatttttgcatcaatgttcatcaaggatattggtctaaaattctctttgttggttgtgtctctgccaggctttggtatcaggatgatgctggcctcataaaatgagttagggaggattccctctttttctattgattggaatagtttcagaaggaatggtaccagctcctccttgtacctctggtagaattcggctgtgaatgcatctggtcctggactttttttggttggtcagctattaattattgcctcaatttcagaggctgtaattggtctattcagagattcaacttcttcctggtttagtcttgggagggtgtatgtgtcgaagaatttatccatttcttctagattttctagtttatttgcatagaggtgtttatagtattctctgatggtaatttgtatttctgtgggatcagtggtgatatcccctttgtcattttttattgcgtctatttgattcttctctcttttcttctttattagtcttgctagcggtctatcaattttcttgatcttttcaaaaaaccagctcctggattcattgattttttgaagggttttttgtgtctctatttccttcagttctgctatgatgttatttcttgccttctgctagcttttgaatgtgtttgctcttgcttctctagttcttttaattgtaatgtcagagtgtcagttttagatctttcctgctttctcttgtgggcatttagtgctataaatttcccgctacacactgctttgaatgtgtcccagagattatggtatgttgtgtctttgttctcattggtttcaaagaacatctttatttctgccttcattttgttatgtacccagtagtcattcaggagcaggttgttcagtttccatgcagttgagcagttttgagtgagtttcttaatcctgagttctagtttgattgcactgtggtctgagagacagtttgttataatttctgttcttttacatttgctgaggagtgctttacttccaagtatgtggtcaattttggaataggtgtgrtgtggtgctgaaaaaaatgtatattctgttgatttggggtggagagttctgtagatgtgtattaggtacgcttggtgcagagctgagttcaattcctgtatatccttgttaactttctgtctcgatctgtctaatgttgacagtggggtgttaaagtctcccattattattgtgtgggagtctaagtctctttgtaggtcactcaggacttgctttatgaatctgggtgctcctgtattgggtgcatatatatttaggatagttagctcttcttgttgaattgatccctttaccattatgtaatggccttctttgtctcttttgatctttgttggtttaaagtctgttttatcagagactaggattgcaacccctgccttttcttcttttccatttgcttggtagaccttcctccatccctttattttgagcctatgtgtgtgtctgcacgtgagatgggtttcctgaatacagcacactgatgggtcttgattctttatccaatttgccagtctttgccttttaattggagcatttagcccatttacatttaaggttagtattgttatgtgtgaatttgatcgtgtcattatgatgttagctggttattttgctcattagttgatgcagtttcctcctagccttgatggtctttacaattttgcatgtttttgcagtggctggtaccggtttttcctttccatgtttagcgcttccttcaggagctgttttagggcaggcctggtgatgacaaaatctctcagcatttgcttgtctgtaaagtattttatttctccttcacttatgaagcttagtttggctggatatgaaattctgagttgaaaattattttctttaagaatgttgaatattggcccccactctcttctggcttgtagagtttctgctgagagatccgctgttagtctgatgggcttccctttgagggtaacccgacctttctctctggctgccctcaacattttttccttcatttcaactttggtgaatctgacaattatgtgtcttggtgttgcccttctcgaggagtatctttgtggcrttctctgtatttcctgaatgtgaatgttggcctgccttgccagattggggaagttctcctggataatatcctgcagagtgttttccaacttggttccattctccctgtcgctttcaggtacaccaatcagacgtagatttggtcttttcacatagtcccatatttcttggaggctttgtttgtttctttttattcttttttctctaaacttctcttcacgcttcatttcattcattttgtcttccatcactgataccctttcttccagttgatcgcatcggttactgaggctgtgcattcgtcatgtagttctcgtgctgtggttttcagctcagtcaggtcctttaaggacttctctgcattggttattctagttatccatttgtctaattttttttcaaagtttttaacttctttgccattggttcgaacttcctcctttagctcggagtagtttgatcttctgaagccttcttctctcagctcgtcaaagtcattctccatccagctttgttccattgctgrtgaggagctgtgttcctttagaggaggagaagcactctgatttttagagtttccggtttttctgctctgttttttccccatctttgtggttttatctacctttggtctttgatgatggtgacttacagatgggtttttggtgtggatgtcctttctgtttgttagttttccttctaacagtcaggaccctcagctgcaggtctgttggagtttgctggaggtctactccagaccttgtttgcctgggtatcagcagcggtggctggagaacagcagatattggttaactgcaaatgttgctgcctgatcgttcctctggaagttttgtctcagaggagtacctggccgtgtgaggtgtcagtccgcccctactggggagtgcctcccagttaggctacttgggggtcagggacccacttgaggaggcagtctgcccgttctcagatctcaagctgcatgctgggagaaccactactctcttcaaagctgtcggacagggacatttaagtctgcagaggctattgctgtcttttgtttgtctgtgccctgcccccagaggtggagcctacagaggcaggcaggcctccttgatctgtggtaggctccacccagttcgagcttcctgacctctttgtttacctactcaagcctgggcaatggcgggcacccctcccgcagcctcactgccgccttgcagcttgatctcagactgctgtgctagcaatgagtgaggctctgtaggcataggaacctccgagccaggtgaggaatataatctcctggtgtgccgtttgttaagcccattggaaaagtgcagtattggggtgagagtgacccaattttccaggtgccatgtgtcacccctttctttgactaggaaagggaattccctgaccccttgcgcttcctgggtgaggtgatgcctcgccctgcttcggctcatgcacggtgcgctgcacccactgtcctgcacccactgtccagcactccccagtgagatgaacccggtacctcagttggaaatgcagaaatcacccgtcttctgcgtcgctcacgctgggagctgtagactggagctgttcctatttggccatcttggctccaccccacacccggctaatttttttgtatttttagttgagacgaggttttgccatgtgctggctaggttgttctcgaactcctgacttcaggtgatccacctgccttggcctcccgaagtgctgcgattacaggtctgagccactgcacccagccatttgggttgttgtaagccttcaagtttgtgayaccttgttagagaagcaataggaaactaatacaagttctattcactgcatcttaagagaagaaagctgggcaggtaaggcagggacagtttgttgattccttatttaataagtagctattgagcacccctcctcacttttttggtggaacagtgtgtagtaatatgaggtaaagaacataatttgtgctctcagaagcttactagttagcagctacagctatggctagtgaatggccagcsttgaattcaagggggtaggatttgcacctgactcgagaccaatgcttagacttccagatgcaacagctgggagcctccttccaggatttgatctcaacacagacaagagtgtttattcactcatttattagttgactcaaccaccatttagtgtatacgttgatatatccattttagcaaagaaaacagggaggacatgaaaggggaacttttacatcttaatgtaatttttttaaaaaagcagtaggattaagtgtgtgtgtgtaatttaatttgaagatttccagtattttttcatgttttaattaattgttttgagacaaggtctcactgtctcacccaggctagagtgcacaggtaaaatcakagctcactgtagcctcaatctcctggcctcaagtagaatctcccaccttagcctcccaaayagctatgactacaggcatgtgccaccacacccaggcaatttattttattttatttttttattttagaaaagggttctcactgtgtttcccaggctgatcatgatctcttggcatcaagcagtcctcccacctcagcctccaaagtgctgggattacaggtcatcaagcagtcctccagcctcagcctccaaagtgctgggattacaggtgtgtgccatggcatccagcccagtatttttttttttttttaattaaaaaaatggtggctcacgcctgtaatcccaacactttgggaggccgaggtgggtggaccacgaggtcaggagtttgagaccagcctggccaacatggtgacaccccatctctaccaaaatacaaaaaaattagccaggcatggtggcgtgcacctgtaatcccagctactctggaggctgaggcagaagaattgcttaaatcccaggggcagaggttgcatgagccaagatcatgccactgcactccagcctgggcgacagagcaagactccgtctcaggggaaaaaaaaaaaaaggaaatattttccgaaagctagtctgagccaggcagtatgaaagacactgaagataaaagagcagtcttgaactctacacacttacagctaaataggagtgacaagtgaacaggggattgccccacctgaagctcttgtgaccagagagagaaacaaggtttctgtggaggcccagaggggtccttcaaccctgcttggaggacagtactggggtggagagggtcaagtagagattcccaaaagtaacatctcaactgagcagtctgatccttagcaaggttcrggccctttggccttgcctaccctggccttggttgttttgctaaccagagccagctgtgttgtgggtgtcttttcctctctcctggtgtccccgcctggacccttcactctttgcctcccacgccctggcattacacaggcattttcagaccctttcccaggattctgtttatagccagcatcctgtgcagctcatgaggagtcataagcccatgatgagataagaggaggaacttggaagaaaacatgatgaacatggacaaagccaaggggaaaaatatgcatgttttcatttgcttttcccaaacaggatgctttcacaccactgtctataattcaaacagtatgtttctgcttaacatactgtgaagatgtgaagccacatgagaaatgttctcccaagatggagttagtgtccctcctggagctccctcagcaccctgtgctcccacatttcaaaggatcactcacaccctagcccatttcctcactgtctaatgttctccacagacccctaagatccttctagagccatgaccagccttgcttgaggttgtatggcatataccctgtgcacagtgaatgctgaataaataactgctccgttgaactgaatagaataaaacagcatagatactagtttggtcaaattttaaaacatcagaacttcaactctcattttggaaggtggggatgtgattaaaattcaattttaattgattatttctcagaaaacataaaaatgttcctacaattctcaaatagctatttaccaatttcattttcaacctgatttgacactctgatgaggggggaaggttgagtacatcataaaaacttcagtttacctctaacttgtgattgtgtgkgaagaaagagcacaggatatagaagagggaaaaatgctttgaaaactctaaaagtgggttgcaaatgttagtttgttttcacacaatggacacaaaaatcgcccgtgcattcagtcacttgcagactgaagcaaacagctgtatttggatgaggcagaggaatggtgggaggaactgtttcttgttgcactgagcattcagttgttctgggctttgcccaaggaaaaacaratggttttccttgctggaattggtcagggagggcakgggaagtgcccaggctttgctttcccataattgacagtacagagttttaagaaatatttgaacagtagcactgttctggtacctacttgggaaagccaattcttgattttaaaaaatcaaatcaaagcagtgacagtgacatattctgcttccatttcataccattcctgacttcttagaagcagttgatgctagtggtcttctctggcagggattgctagccctggctttgcagcagcccatggagctgccagttctccagggtaattgcaaaatactgctaagtattctaaaaatgaaattaaatattcattttattttaatttacatgtgccatccaatacttttagaagatgtcagtaccatggaatgacatgaccaacaataatatgttgcaactctgagatacagctagaaattctccgaataagatgctgatggtcctgcagtccaatgctgtgtgattttcactgtggccagctatacaagacttagcgtatacttctctctgtgtaactgtaaaaaattttgtaagtctaagagggtaatatattctttcataaaacctcaatctagtgagttctaatcattcttgatctttctcaaataaatactagtcaaatctttcccaataactaagtaactaagcattcacgttttacaactgtaatgtagttttggtatgagaaaactatttcctggtctccaggatctagaaagtaaacatgtaacaaacaattaggaatgtggtatcgggtagtcagatgttctacacgtctccagcctaagctgtccacttcggatttcttgctcttttcctttttgcttaagcatatcttggtatgttgcctggaagtttatgtgtgttactacagcagaacaaagaattatgtaatataaagcccaacttgtttttcttttccctaccagctgtactataacttagacaaaactcaaccattttctttcattatgtacagtggctattaaaaagaaaggatgtagaaaaatttttttcaggaaacagtggaaaactaatgcgtcatgatctgcttaacaggggactgtaaatagaagacaagtccagatcatggaaattgcttctttaaaatattttttttcaattttaaaaggaatacattcacatggtttaaaaaaacccctcaaactaaagaagaatacagaataagaagtaaaagttctaccctccaacctactaccccaactcctgaatcccactgccaagagaaacagtcatttgttgtgcatctttctagaagaattctatgcatattacagaggtgtcacaaatacccacatgctttcttcccttacaagctctgtgacttgatttttctctttactgtgctttaagcatctttgcatattagtaaacatatacacctcagttaaaaaaaatcaacagctgggtgtagtggtgcatacctgtagtcccagcwatttgggaggcagagaggcaggaagatcccctgagcccaggaattctaatctaccctgggcatcttggcaagaccctgtctcttaagaaaaaaactatcgcaagaacaaaaaaccaaacaccgcatattctcactcataggtgggaattgaacagtgagatcacatggacacaggaaggggaatatcacactctggcgactgttgtggggtggggggaggggggagggatagcatcgggggatatacctaatgctagatgacgagttagtgggtgcagcgcaccagcatggcacgtgtatacatatgtaactaacctgcacaatgtgcacatgtaccctaaaacttaaagtataataaaaaaaaaagaaaaaaatcaaaagctttatagtattctgttgagtaagagtattattatttgtttatacaacctctttttggtgaacatttgaattgtgtttagatagttactaatgcaaacaatacttccagtgaacttttgtaaatatatatttgtatatataagagaataaatcttatacctgcagagtaaatttctaaaagtgaatcactaattctgagattatgtgcatctccagagatgttaacaaacatacacacccagcaacagtgcaagacagtgtatttcccaactgctccctcactgagatttttaaaaaacatataaatactattataagttacctctggagttaaagaataacttttgctttttactttcatagacatctgtactatgtaaacttgatatagtgaggatgttttcttttgtaattaaaagattaaagagattcagaatacttgtttgtaattggttttggaatgaaatttcacttggaaaataaaggcctagaatatgagactattcatcaatagaaaaccattgtagggagcagttaacaggtaaagctctatttaataagggcaagctgatggcagggaaaggaacagaccttaaaaaggactcacctgtgagaattggagacggtaaccctgtggtatcaaaatgcaggagaccagagatagctataaatctcttgcagtgttactgcctccgcatgaagtcataatccctagaatgagaatttatttttcatgatacaccgataatgcaagggacaatgatcaggaagtactgcacttagtctttctttctcatacctaaaatgtttttcattttatgcttttttagaatagagtgtacttacttcctctcttcctcacatagacttgaaaactcggcgactttaggatgcaactccaggttgacacattttcattagtttagaaaacccacgtgtcccactctcagaatcattattatagtagaggagatattcagggcaaggattccttgggaaacaacatccagattcaagggaagacatctgagtcacgacaacttaaaatccatcctggcctgccacaaagtgtttctgtaacattaagtacctcatatgcaattcttgaaaaggaaaattatgtcaatataacgtgaaatttgtgaaactcaaacatgatcatctaggcaaggagagctgaaatagaagaaataaaattatagcctctaatatgaaaggaaatacttttagtgtggttgctgctaagcagtagtttttttcaactrtatttaaaaaaaataaaaagaagcacttgattgctggtgatagtgcaagcttgtataaacccaatgaagtgaatttaacaataccagcatttactctttgttaagaactgaattgtgttcctgtcacatttatatgttgacatctttacccccagtacctcagaatgtgactgtatccgtggacagagcctttaaagwggttaactaaggtaaagtgagatcatttgggtgggccctaatccaatcttgtagtaagagattaggacacagacaatacacagaggccaagtgaagagaagacacagggagaagttagccatctacaagccaaatgagagaggtctgagaagaaatcctatttgctgccaccttgatcttggaattccagcatccagaactgtgaaaaaatgcattcgaattatttaagccacatagtctctggtattttttttttttttagatggagtctcgctctgtcacccaggctggagtgcagtggcgctatcttggctcactgcaagctccacctcccgggttcacaccattctcctgcctcagcctccctaatagctgggactacaggcgcccatcaccacgcccggcatggtctcaatctgctgacctcacgatccgcccacctcggcctcccaaagtgctgggattacaggcgtgagccactgcgcctggcccaatctgtggtatttttttatggcagccctagcagactcagacactcatggacacgtaactccggaaacatatttccacaaaacagatgcttgtaatcccaacactttgtgagtccgaggtgggtggatcacctgaggtcagaggtttgacaccagcctgaccaatatggtgaaacttcgtctctactaaaaatacaaaaattagccaggtgtggtggcaggtgcctgtagttccggctactcgggaggctgagacaggagaactgcttggacctgggaggcaaaggttgcagtgagccgagattgctccactgcactccagcctgggcgacagagcgagactctgtctcaaaaaaattatatatatacacacacacacacacacacatatatatacacacatatatatacacacatatatatacacacatatatatataattaaaattattcacaaaaattattcacaaaaaaggaacgaaaatggaaacaaactaatttcttgccataggagaatggtgaactatgatatattcacacagtggagtatgatgtacccacaaaaaaactgaggaaagctggctgggcatggtggcacaccagcattttgggatgccaaggagggaggatggcttgagctcaggagttcgagaccagcctggccaacatggcaaaaccccatctgtactaaaaataccaaaattagccagaggtggtggcatgggcctgtagtcgcagctacttggcaggggccgaggcaggaggatggcttgaacattggaggtcgaggctgcagtgaactgagatggcaccactgtattctggcctgggtgacaaagtgagactctgtctcagaaaaaaaatactgtggaaagcctctatgtcccaatatgaaacaatctcctggatatactcttgtggaaaaaagcaacgttccacagagtatatgtagtaagttttatctatgtcagaaagaaggagaaataaaaatatgtgtatgtatttgcatatttttgtaaaaggtaaacacaggaaggataaaccaaaaatgcaaataatgacctgaggtgactgggcggtggggtggggggtggggggcggggtaatgagctagataagacagggaggggagtgtgatatccttgagtatatctttttatgcagtttgaatttttgagtcatatgaatgttttacaatttcagaaataaattgaaaagttgaaagaagcaaaccgtacaattgaatacattcagaaaaaaaaaaaaccacttgacaagttgataacacaatgatgtaggtgaaaagaatgaaagtaacttttgaagatagtaatgtgaatgggatccatcactcaaagatctgcaataaaatctgaaatagtagatttgttattagaagtggcattagagtactgaaattattttatttgtattgcaggctggagaaaaaattgtgttcaggcagttgggaacttaggtttttccctgtttaagaaaagagatttaaatacaaatggggaaaagttaggaggaactctgaaactggaggataccatgatgagctctgtaccagtagcattaagcacatctggaaattagatcttggtttccagatatcattcttcactaaagacaacaggactttttgggcaaatggctaattctaagtttggagaaaggaaaccacaagacaaccctggaatatttagtgtcagaaatcaagggagtgctcaaagattggaaaagacatgtctaggtaggatgcggtggctcacgcctgtaatcccagcattttgtgaggcttagatgggcagatcgcttgagtccaggagttcaagaccagcctggacaacatggcaaggccccatctctacaaaaaatacaaaatatttagccaggcatggtagtgcgtgcctgtagtcacagctactagggaagctgaggtgggaggatggcttgagcccaggagctggaggctgcagtgagccaagatcatgccactgcactccagcgaggatgacagagccagactctgtctcaaaaaaaaaaaaaaaaaaaaaaaaaaaagatgtctaaagaacacaggaacaggcttgatgggatggggctccgagtggccacatttcagacagtttgagaatctcaataacatataacacattaattataatgtgtgattacttattatatataatgataatataattggatataatgcattgaatttttaaaaatccatgtgtatagtgatactaaagaaaagacaggaggacggaggaaaattctcctttacaaaagaataccaactaatatatgtagaagggtgataaatttacagatatatcattttgcaacgtttatgcaataacagattcaggtaaaaatcatcaatgataaattgctaatagagagcagagtattatccatacatctcaaagtgttacatcacagatagctatcaattacaaatggaaaaggcatattccaaatggagacattcagcagatgccacctaaataaatgattaacacttagcattaccaatgggacaaactgatgttaggtgtattggctgggatgaaatgggaagtgtacaacatcacttatgtagtatacttgctgaaatatttaacctgcatccaaacagcaataaccagtcagacaaatccagattgttgagcactctttaagactacagatatgggcttttgaaaaatgtccatgtcataaagtgagtaaaggttggaaggagggaactgtcctatattacaagagataaagaaacatgaaaaataaattcgtccgtaaccctgggtttgatcttgggttgaaatagcaagaaaagaatattactgggtcaattaagggaatttgagtatagactgtatattaggtaatgttacggtgtcagttttaactttattggatataacaataacatgaataaatacagtaatcaatttttcagatatatgctgaagtacttagggttgaaatgttacatttgtaaatgacttagcaaacaaatacttcttaaagttttgtaattgtaggttttacatttaggtgtataatccaaattgagttattttttgtagtatgttgtgagttatggattgaagttcactttttttgcctatgaatatacaattgttccagaaccatttattggaaaactctcctttgtctatttaattgcctttgctcctttgttaaaaatcagttgactctctattctgttctatacatctatttatctttctgacatcaataccgcagtgtcgtgattgttacaactttataatgtcttgaagtcaggtagtatattctccaactttattctactttttcaaagtgtgttgagtattccagtgcctttctattgtcatataaattttagaatcaccttgtcaatttctccaaaaaaatgcctatgtagatttttattgggtatgcattgaatccatagatcaatctggggagtactgtttacatcttaacaatatagaatcttgctattcattaatgcaatgtatcacttcatttacttagatcttctttaatttttctcagcaatattttgtagtttgcagtaaccaaatattaaacatctattgtcaagtttatccctgtttcatactttttgatgttttgtacatttacaaatttaatagtatttatatacaayagaagcaattagaaattgaaattttttattttaaaaattgaaatttttgtattttagtagaggtgaggtttcaccatgttggccaggctggtcttgaactcctgacctcaagtgattcacccgcctcagcctcccaaagtgctggggttacaggcatgagccactgtgtccagcgaagctcaacttttttagattcacatatgagtgagatcatgtggtatttgtctttctgtgtctggcttatttcacttaacatagtatcctctaggttcatctacgttgtagcaattgacagaatttccttctttttaaagagtgtatactattccattgtgtatatgtaccccattttctttatctattcatctgttgatggacagttaagttggtttcatagctgggttattgtgaataatgctgcagtgaacatgggagtgcagatatctcttcaccattctgatttcatatcctttggatatatactcagtggtaagattgctggctcatatggtagttttgtttttaattttgtgagggaccttcatactgtttttttgttttgttttgtttttgtttttttgcagttgcaagatttaatagagtgaaaacagagctctcataaaatgggaggggacccaaagggggttgccgttgctggctcaaatgcctgggcttgtatcctgatcattgtccctcccctgtgctctcaggcgatagatgactggctatttctttacctcctgtttttgcctaattagcattttagtgagctctctttactaccttactggttgggtgtgagctaagttgcaagccccgtgtttaaaggtggatgtggtcaccttcccagctaggcttagggattcttagtcagcctaggaaacccagctagtcctgtctctcagtcccccctctcaacaggaaaatgcaagcgctgttggggaggttggccgatgaccgctgtaactgcttcctgctgaattggggcatagtgggggtcgtgcagttgagatttcctcaggargggtgcctttgatgtcatcaacatyrgagcatgggctagcaggctggtccaggggtctgcggtagatcttagtcatggactacatctggggctccatttgaagatttgtagttttacagcttcgattctggaatagacaaacttaacaaggaggttaaagatacagggattgaaatgtgtggcctgaagttcaggggattatttctttggcccacttcacaggccctgcctatctgcttcaaagttttgaaaaggcctggtccagtaaataataatttggccatctgatgggtgctatcaatgcctaagtgaaaggttaggtgaagggttttaagtaatttccatyggttagctgcaggcaaaagtatttttccttcttcggtggctagccatcctgaggggaggaaactatgtccttgtgaggttccccattctatttctcctgctgagtactggagcttggtttcccggaggggattaccccatactaggtgtccttctataagcatttctaatggagggtcctgcattgcggctcttttggcttcaatatccgcttggcagttcccttctatttccctttcctttcctttctgatgaccctgtcagtgtaagactgccacctctttaggtttctgtacagccaataataatctcctaatggcttcctgatgtttgataggtgttccctcggaagttaggaattccttttctctccatattgctgtgtgggcatggaggactaggtaagcatacttagagtctgtatatatatttaccctttttctttctcctaattctagtgcctgaatgagggctattagttctgccagctgagcgctagttcctgaagtgaggggattactttcaagtactccattatcactgaccactgcataccccacttttagaagtcctttttctacaaaggaacttccatcagtatacaagttgaggtcaggatcagtcaaggaaacctctagaaggtcccctcgagtggcataggtttgagcaatcatctgttaacagttatgttctatctttcctttattgtctagaagaaatgtggctgggttaagagttgcacaagtgcacagttgcagcactggcccttcaggtaatagagcctgatattttagcaaacggttgtctgacagccacaagtttcctttagcagtcagtatgccatttacatcatgagatgtccacacagtaagatctcttccctgtattattttaactgcttcagatactaagactgctactgccgccactacccgtaaacagtgaggccaaccctttgccgctacatcagtttccttactcaggtatgccacgggttgcaagctggtccctcggacctgtgtaaggactcctagatctattccttttttttctgtgacatataaagaaaagtcttgccccgttggcaagcttaacactagggcttgggttagggccttctttagggcctggaaagccacttctgcttcaggtgtccatcttactaaatgggtattggctttctgagtttccttaattagtgtatataatggcctggctatttcgccatacctgggaatccatattcggcagaagcctgttatgccaaggaaccctcttggttgctttaaggttttgggatgaggataagccagtatagactggatacattcctcactgagggccctggtgcctttggataattttagccctaagtatttaacctgctgtgagcagagctgagcctttggtttggaaaccgtgtagccatggaaaggaaatttggcgaggaaatttaagagcgcttgggtggcttgatggcataaggtttctgaacgggtggctaaaagtaaatcatccacttatcaaaggacaagagtgtccaggtattagaactggctcaagtcttgggctaatgcctggccaaatagatgggggctatccctgaactcttggggtaaaacagtccaggtgggttgagacgttgagttcgaaggatcttcaaaggcaaacaagaatcgacagtcaggatgtacaggtatgcagaaaaaggtatccttaaggtccaggactgtaaaccactctgcttcctctggtatttgggaaagcagagtataagggttaggtacagctgggtatagagggacaacagcctcattggtaatcctgagatcttgcactaacctccactgtccgttaggtttctgtactcctaaaattggagtattgcaggggctattgcatggttttactaggctttgggcttttaggtccttaacaatcttttggagtccttgttgggccttgtgtctaaggcagtactgcctttggtagggaaaggaggtggaatcctttaacttgaacaggatgggcattctttgctcatccatattgtccttctgttgcccagacttcaggattaattttttcctcaagcaggggacaacaaatgggtgttccttctcctatgttcaggtggataatggcccctgcttttgctagaatgtctctccctaacaagagagtgaggctttcaggcataattagaaaagcatgtgaaaagttccccagtcacaacttagtggctgggagaagtatctagtgactggctgtcctagtaagaggtgacagcatgctgctagccttcgcagccctcgctcgctctcagtgcctcctctgcctgggctcccactttggcggcacttgaggagcccttcagcccaccgctgcactgtgggagcccctttctgggctggccaaggccggagctggctccctctgcttgcagggaggtgtggagggagaggcgcgagcgggaatcggggctgcgcgcggcgcttgtgggccagcgtgagttccaggtgggcrtgggcttggcgggcccccaaactcagagcggccagctggccccacctgccccaggcagtgaggggcttagcatctgtgccagcagctgctgtgctctacttctctccgggccttagctgcctccctgcggggcagggcttgggacctgcagcccgccatgcctgagcctcccccgcctccatggtctcctgcgcggcccaagcctccctgacgagcgccgccccctgctccacggcacccagtcccatcgaccacccaagggctgaggagtgcgggcgcacggcatgggactggcaggcagctccacctgcggccccggtgygggatccactgggtgaagccagctgggctcctgactctggtggggaccaggagaacctttatgtctagctaagggattgtaaatacaccaatcggcactctgtatctagctcaaggtttgtaaacacaccaatcagcaccctgtgtctagctcagggtttgtgaatgcaccaatcgacactctgtatctagctactccagtggggacgtggagaacctttgtgtctagctcagggattgtaaacgcaccaatcagtgctctgtcaaaacagaccactcagctctctgtaaaatggaccaatcagcaggatgtgggtggggccagatagaataaaagcaggctgccccagccagcagtggcaacccacttgggtccccttccacactgtggaagctttgttctttcgctctttgcaataagtcttgctgctgctcactctttgggtccacactgcctttatgagctgtaacactcaccgcaaaagtctgcagcttcactcctgaagccagcaagaccacgaacccaccgggaggaatgaacaactcccgatgcgccgccttaagagctgtaacactcaccgcaaaggtccgcagcttcactcctgagccagcgagaccacgaaccccaccagaaggaagaaactccaaacacatccaaacatcagaaggaacaaactccggacacaccacctttaagaactgtaacactcaccgtgagggtccgcagcttcattcttgaagtcagtgagaccaagaacccaccaattctggacacattttggcgacccagatgggacttttgcttatcgccaagcagtgagactatcgccgagtggtgacaccaacgcctatcgctgagcggtgagactgtcacctatcgccaagcagtgagtaccatcggacccctttcgcttgctactctgttgtatttttccttagaattcgggggctaaatactgggcacctgtcggccagttaaaagcgactagtgtggctgccagactaaagacactggtgtccggctttctgggaaagggctctctaacaacccccaactcttcggagttgggaccattggtttgcctagaaccagcttccgcttttcctgtacttctgggctgagccgagggtcaacagagaggaaagccgtgcagctcccgggtcccaacaagttggttgaccctgtggccatgagcggaactctcaaaggcatgtcgcccaagcgagactcacccatctatcctatctatcctgacccttgcctcctgggtcctaatgcctgccagacaaacttcctctcacctctcttctccgaggttagtcccacttctaaaaattgctgcctgtctctggtgcttttctagtttctcctgtaagaatgatttctagtattaactccaagactctgttaccttctttaggcacccgggctcaccaatcagaaagacataatttttgcccaaagccccatcgtagtggggactacctggaatttyaggatcccttctcagactaacaggcctaacaaaagctgttcctgaagctaggatatggggagccttagaaattgtatccttcctattcatataagtgaggacaaaaggtgtcactcttccaaccctggagatcccttccctccctcagggtatggccctccacttcatttttggggcataacatctttataggacaggggtatagtcccattactaacaggagaatgcttaggactctaacaggtttttgagaatgcgtcggtaagagccactaaatccgatttttctcggtcggtcctccttgtggtctaggaggacaggcaagggtgcaggtttttgagaatkcatcrgtaagggccactaaatccaaccttcctcggtcctccatgtggtctgggaggaaaactagtgtttctgctgctgcgtcagtgagcgcaactattctgatcagcagggtccagggaccgttgcgggttcttgggcaggggttgtttctgctgctgcatcagtgagtgcagctattccgatcagcagggtccagggaccgttgtgggttcttgggcagggggagmaacaaaccaaaaccgcaggcggttttgtctttcagatgggaaacactcaggcatcagcaggctcacccttgaaatgcatcctaagccactgggaccaatttgacccamaaaccctgaaaaagaggtggctcatttttttctgcactacggcttggccccaatattctccttctgatggggaaaaatggccacctgagggaagtacaaattacaatactaccctgcagcttgaccttttctgtaagagggaaggcaaatggagtgaaataccttatgtccragctttcttttcattgagggagaatacacaactatggaaagcttacaatttacatcccacaggaggacctcagcttgcccccatatcctagcctccctatagctccccttcctattaatgataatcctcctctaatctcccctgcccagaaggaaataagcaaagaaatctccaaaggtccacaaaagcccccgggctatcggttatgtccccttcaagctgtagggtgagaggaatttggcccaacccgggtacatgtccccttctccctctgtgatttaaagccaatcaaggcagacctgggkaagttttcagatgatcctgataggtacatagatgtcctacagggtccagggcaaacctttgacctcacttggagagatgtcatgctactgttagatcaaaccctggcctttaatgaaaaagaatgtggctttagctgcagcctgagagtttggagatacctggtatcttagtcaagtaaatgatagaatgacagctgaagaaagggacaaattccctaccggtcagcaagccatccccagtatggatccccactgggaccttgactcagatcatgggggctggagtcataaacatatgttgacctgtgttctagaaggactaaggagaattagagaaaagcccatgaattattcagtgatgtccaccatatctcagggaaaggaagaaaatccttctgccttcctcgagcggctacgggaggccttaagaaaatatactcccctgtcacccaaatcactcgagggtcaattgattctaaaagataagtttattacccagtcagctgcaggcatcaggagaaagctccaaaagcaagccctgggccctggacaaaatctagagacatttttaaacctggcaacctcggtgttctataatasggaccaagaggaacaggcccaaaaggaaaagcaagatcagagaaaggccgcagccttagtcattgccctcggacagacaaaccttggtggttcagagaggacagaaaatggagcaggccaatcacctggtagggcttgttatcagtgtggtttactaggacactttaaaaaagattgtccaatgagaaacaagctgccccctcatccatgtccactatgccgaggcaatcactggaaggtgcactgcctcagaggacaaaggttccctgggtcagaagcccccaactagatgatccaacaacaggactgagggtgcccggggcaagcgccggctcatgtcatcaccctcagtgagccccaggtatgtttaactattgagggccaggaaattgacttcctcctggacaccggcacggacttctcagtgttaatctactgtcctggatgactgttctcaaggtccattaccatctgargaatcccaggacagcctgtaaccaggtatttctcccacctcctcagttgtamttgggagactttgtttttttcacttgcctttcttgttatgcctgaaagtcgcacacccttattagggagggatatattagccaaggctggagctattatctacatgaatatggggaacaaggtacccatttgttgtcccctacttgaggagggaatcaaccctgaagtctgggcattggaaggacaatttggaagggcaaaaaatgccctcccagtccaaatcaggttaaaagatcccaccacttattccttatcaaaggcaatatcccttaaggcctgaagctcataaaggattaaagaatattgttaaacatttgaaagctcaaggcctagtaaggaaatgcagcagttcctgcaacaccccaattctaggagtacaaaaaccgaatggtcagtggggagtagtgcaagatcttagactcattaatgaggcagtaattcctctatatccagttgtacccaacccctataccctgctccctcaaataccagaggaagcagaatggttcatagttctggacctcaaggatgccatcttctgtattcccctgcactctgactcccagtttctctttgcctttgaggatcccacagaccacactccccaacttatgtggacggtcttgccccaagggtttagggatagccctcatctgtttggttaggcactggcccaagatctaggccacttctcaagtccaggcactctggtccttcaatatgtggatgatttacttttggctacctgttcagaagcctcgtgccagcaggttactccagatctcttgaactttctagctcatcaagggtacaaggtgtctaggtcgaaggcccagctttgcctacagcaggtcaaatatctaggcctaatcttagccagagggaccagggccctcagcaaggaacgaatacagcctatactggctcatcctcgccctaagacattaaaacagttgcgggggttccttggaattactggcttttgctgactatggatccccagatacagagagatagccaggcccctctatactctaattaaggaaacccagagggcaaatactcatctagtagaatgggaaccagaggcagaaacagccttcaaaaccttaaagcaggccctagtacaagctccagctttaagccttcccacaggacaaaacttctctttatacatcacagagagagccaggatagcccctggagtccttactgagactcgtgggacaaccccacaaccaatggcgtacctaagtaaggaaattgatatagtagaaaaaggctggcctcactgtttaagggtagttgcagcaatgsccgtcttagtgtcagaggctatcaaaataatacaaggaaaggatctcactgtctggactactcatgatgtaaatggcatactaggtgccaaaggaagtttatggctatcagacaaccgcctacttagataccaggtgctactcctcgagggaccggtgcttcaaatacacacgtgcatggccctcaaccctgccacttttctcccagaggatggggaaccaattgagcatgactgccaacaaattatagtccagacttacgccacccgagatgatctcttagaagtccccttaagtaattctgaccttaacctatataccgatggaagttcatttgtggagaatgggatacaaagggcaggttatgccatagttagtgatgtaaccatacttgaaagtaagcctcttccccagggaccagtgcccagttagcggaactagtggcacttacccgagccttagaactgggaaagggaaaaagaataaatgtgtatacagatagcaagtatgcttatctaatcctacatgcccatgctgcaatatggaaagagagggagttcctaacctctgggggaacccccattaaataccacaaggaaattatagagttattgcacgcaatgcaaaaacccaaagaggtgggagtcttatactgccaaagccatcaaaatgggaaggagaggggagaacagcagcataagcagctggcagaggcagaaaggaaagagagaaagagacaggaagtcaaagagacagagaaagagacagagagaggaagaaacagagagtcaaagagaaagagacaaagagaaggagtcagagagaaagagggacagacacagaaagtcagagagtcagaaagagaggaagagacaaagaagaagtcaaagagaaagagagatggaagtagtaaggaaaaaacagtgtatcccattcctttaaaagccagagtaaatttctgtctacccagccaaggcatgtttttcttaggtggaacatcaacctatatctgcctccccactaaytggacgggcacctgcaccttagtctttctaagtcccaacattaacattgccccaggaaatcagaccttatcagtacccctcaaagctcaagtccatcagtgcagagccatacaactaatacccctacttatagggttaggaatggctactgctacaggaaccagaatagccggtttatctacttcattatcctactaccacactctctcaaaggatttctcagacagtttgcaagaaataacgaaatctgttcttactttacaatcccaaatagactatttggcagcagtgactctccaaaactgccaaggcctagacctcctcactgctgagaaaggaggactctgcaccttcttgggggaagagtgctgtttgtacactaaccagttggggatagtacaagatgccgcccagcgtttacaggaaaagacttctgaaatcagacaatgcctttcaaactcttacaccaacctctggagttgggcaacatggcttctcccctttctaggtcccgtgacagccatcttgctgttatttgcgtttggaccctgtatttttaacccggttgtcaaatttgtttcctctagaatcaaggccatcaagcgacagatgttcttacaaatggaacaccaattgagttcaacttacaacttctactgaggacccctggaccgacgtgctggcacttcccctggcctagagagttcccctctgaaagacactacaactgcagggccccttctttgcccctatccagcaggaagtagctagagcggtcatcagccaaattcccaacagcagttggggtgtcctgtttagaggggggattgagaggtgacagcgtgctggcagccctcgcaaccctcgcttgctcttggtgcctcctctgcctggctcccactttggcagcacttgaggagctcttcagcccaccgctgcactgtgggagcccctttctgggctggccaaggctggagctggctccctcagcttgcagggaggtgtggagggagaggcatgggcgggaaccagggctgcgcatggcgcttgctggccagtgagagttccgggtgggcgtgggctcggcgggtccccgcactcagagcagccagctggccccgcctgccccgggcagtgaggggcttagcacctgtgccagcagctgctgtgctctacttctcgccgggccttagctgcctccccgtggggcagggcttgggacctgcagcccaccatgcctgagcctccctcgcctctgtgggcttctgtgtggcccgagccccccygacgagcaccaccctctgctccatggcgcccagtcccatcgaccacccaagggctgaggagtgcggttacacagcgtgggactgacaggcagctccacctgcggccctggtgcrggatccactgggtgaagccagctgggctcctgactctggtggggagttggagaacctttatgtctagctaagggattgtaaatacaccaataggcactctgtatctagctcaaggtttgtaaacacaccaatcagcaccctgtgtctagctcagggtttgtgaatgtaacaattgacactatgtatccagctactctggtggggacttggagaacctttgtatctagctaggggattgtaaatacaccaatcggcattctgtatctagctcaaggtttgtaaacacaccaatcagcaccctgtgtctagctcagggtttgtgaatacaccaattgacactgtgtatctagctactctagtggggacgtggagaacctttgtgtctagctcagggattgtaaacgcaccaatcagtgccctgtcaaaacagaccactcggctctctgtaaaatggaccaatcagcaggatgtgggtggggccagataagagaataaaagcaggctgccccagccagcagtggcaacccgcttgggtccccttccacactgtggaagctttgttcttttgctctttgcagtaagtcttgctgctgctcactctttgggtccacactgcctttatgagctgtaacactcacggcgaaggtctgcagctttactcctgaagccagcaagaccacaaacccaccgggaggaacaaacacctccagatgcactgccttaagagctgtaacactcaccgcaaaggtccgcagcttcactcctgagccagcgagaccatgaaccccaccagaaggaagaaactccaaacacatccaaacatcagaaggaacaaactctggacacgctgcctttaagaactgtaacactcaccgcgagggtctgcggcttcattcttgaagtcagtgagaccaagaacccaccaaccagacacattaggacccctcggatagtgacagatctggaggacggttgtctgggacaggagagtaagactgagaaggccacgtcaatgtccaggagacagttaatctcctggccctcaatgatcaagcatacctggggctctgtgagggtgatggcatgggctggcacttgccctgggcaccctcagtcctgctgctggatcatcgggttagtggcttctgactcagaggacctttgtcccctggggcagcggccttccattgagtcccttgacataaggggcacggatgaggaggcggcttacttctattctgacaatctttttaaaagtgtccttgtagaccacactggaagcaagtcctattaggcattcaatttgcccagactttccgtgttccaaagcctccaatgtctgcttgcctaagggccatgactaaagcggtggcctttttcttatctcatttgtccccttcctcctgctcctcctgatctctattataaaaaaccgaggttgtgaaatcaatagggttcctaagttttgctccgggcctaaggtggacttttgatgttttttctaatgtctgcagctaactgagtgataaacttatcctttaagattagttggccttcaatagagtccggtgacagagtggtatgcttcctcaatgcctcccttagtctctccagaaaggcagtaggattttcttcctttccctgtgtgatagtggacaccattgaataatgtataggcttcttcctacttttccttagtccttctagcatgcaagttagtaaatgtctgtggcaccaatctccatgtattctgcgtcccagtgagggtctacactgggctttttgattctgtaagtactttaagggttggccgagtgcaaacagctcccatgtttgagcagaccaattattaggcaattttcctaactctgcttccgcaagagtctccctatcaattactgcatacccattgtgtttttttttttttccctcagtcacccgggaggaaccatctatcatcctgccttgaaggtagtttctgctggatctggtcagacctttgtatggtaatgaggatttaaatcccctgttaggaaatctgctaggttaatgtaatttgctgtggttaatgttaaatcacctttttctagcagaatagccccatactttaagatttttgagttagtaagctccctttttgctttttgacttaggatagttctgaactggtgaggtgtgctcacaatgaggtttcctctaaaggttatttttctgctttcttctgttagcaaagcagttgctgctacagattgaatgcatttgggccatccacgggttcctgggttaaggatttttgatagaaaggctactggttgtcagtggcttcagtgctttcgggctaggcctttgtttacactgacaacaaaatggtattggagtgttatggggtcacagagaagaccttcaattatcaattataggttttaaatttaccctggcttttaaagaaatagggtacacttttttctttactacttctatctttctctttctctctttctttctcctttctgtctttgtagatggattttggaaacccagtggaaggatgttcgctcattgcccccatttgccactataggactatgcgcctcccttttatttactcaatttgcttttatcctgatctattatgttgttgtagacccagttccagttgttacaatactgggttatcagttctaaggccctggcaagggtggtgtggaacaggtcccacataactgcccatgtcgagagctctaagcctaaattgggagggacaccagggacaagactcctgggttcatagcctaggggcctaaggtcgcagcatagagcttccttagatccctttggagatactaatacttgggagaggaagtgaaagtctgaagcattagtatctaggaggcagggatcagaggaagtagattcagaggtaaggagaattttggggctacactttcaagaaagttgtggtcaggacccaggaggtatgggtcagaaggaaaggtagaggcacacgcacgggtgactgttgagtagggacttctggctgcgccatgatctcaaccggctaatgccgagagtttgggatgacagctttctgcctctagtcggcccccggcttccccagggaaattgaaagtggaagctggttccaggtagaccagcgcttccaacccagaagcgttgggggttgttagaaagccattccccagacagcctcacacttgagtcttaagtctggtggccgccctatcgtttttaaccgtccgacaggtgcctggtattttcctccaattctaaggaagggtagaacagaatagcaagcgaaagcgctttggaggtcccttcatgattgccaaaatgttaccagggagtccttgttcttagagctccaaagatgatggtgggccgcttccatgatggcggcaagcctcttgttctctgacctggggttcctggcctcacggatactaaggaatggaatcttgggccatgcattgagtgttatagctctattcagcccaattaggatgaaccccaggcacttagcccgcgcaggaacaatggcaagcctctagcccgattgggagcagcaatggacactgcctcgctggatcacaagtgcagcagatccacccctgccagatccagagggttggaagtcagctgcgggtctgcaatgacggcaaacagtggtggacggcgagtgaaagctcagctcgagccataaaaaacacagaccagaagagtgtgcagttgcaagatttaatagagtgaaaacagagctcccataaaatgggaggggacacaaagggggttgcccttcattctgtttttcataaggactgtactaatttacactcccaccaacagtgaataagggttccattttttgcacgtccttgccaacacatcttatcttctgtgtttttgatagtagtcattctaataggcatgaagtgatatctcattgtggttttaatttgcatttccctgatgatttgtgatgttgaatatttttttcatatacctactagccatttgtatgtcttcatttgagaaattctattcaagtcgtctgaccagtttttaattaggttatttgctttcttactattgagttgtttcaattccttatatattttggatattaaccccttgtcagatgtttggtttgcaaatatattttctcattctgcaggttgtctccttactctgttcattatttttgtagttatgcagaagctttgtagtttgatgtaatcccagttgtccaattttgcttttgttgcttgtcatttggggacatacccataattgatcttagccaaaaggctgagaagtgatttgggtcatattaaaaaatatcattgccaagaccaatataatggagtttttttctaggttttcttctggtaagtttatagtttcaggtcttatgtttaagtctttaatccattttgagttgacttttttacaaagtgtgagatgagggtctagttaatttttttttttttgtaaattgacaaattatagttgtatatatttatggggtacaaagcaatgttttggtttattaatacaatgtggaataattaaatctaggttgatattaaatcaataaaattgacatccatcactttaaatacttatttttttgtcatgaaacatttgaagtttactgttttagtgattttgaattgcacagtacactagaattaactatatacgtcatgctgatgtaatagatttcaaaaaacaaacacttattcctcctgttcaactgaggctttgtaccttttgacagtcatctcccattcacccaaacccctagcctctggtagccatcattctactctctgcgtctataaatttgattgctttagattccacatataagtgagaacctatggtatttgtctttgtgtgtctggcttattccacttagcacagtgttctccagttccatccatgttgttgcagatgacaaaatctctttctttttagtttccattattttattttattttattttattttatttatatgtttgttatgttatgttatgtcatgttatgttatgttatgtttgttatgttatgttatgttatgtatgttatgttattttttgagacagggtcttcttgttcctttgccctggctggagtgcagtgacatgatcacagctcactgcagccttgacctcccaagctcaactgtccttctgcctcagcctcctgagtagctgggactacagatggttgccaccacacctggccaatttttttattttttgtagagctgggggtcccactatgttgccatgctggtctcaaactcctgggctcaagtgatcctcccccctcagcttctcaaagtgctgggattacagatgtgagcccctgcatctggccagcatttccttttagtgttctattgtgtacatatactacattttctctgtccattaatctatcagtggaaacttaggttggttccataactgccaagtgaataatgctgcaatgaacatgggagtgcagacatctcttcaacataagatttcagatcttttgggttaatacccagaagtgggattgctggatcatatggtaattctatttttagttttttgaagaatctccatacagtttttcataatggctgcaataatttatatctccaccgggaacatacaagggttatattttctccacattctcaccaacacttatcttttgtcttttaataatggtcatcctgacaagtgtgacatgatagctcactgtggttttaatttgcattttcctaatgattagtgatgttgagcatttttcaatatacctgtttgccttcttttaagaaatatctatttcttttaagatatgtcttctttggagaaatatccattcaggtcccttgcccatttttttttctttttatttactttcattgttttcttcaaaggcatgatcattaacttttgccatttttcaacccaattatttgttttctttttagagttatttgagttccttatatattttagatattaaccattttttctaatgtatgaaggtctaatgtaattattctgtcagtagatagccggttgtcccagcagcatttattgaagagactgtgccttccccattgtttgttcttagcacctttgtcgaaaattaagtgaccgtaaatgtatggatttatttctgagctctctattctattccattggtgtgtctgttattatgtcagtaccatgctgttttgattactagagatttgtagtagattttgaaatcaggtaatgtgatacctgaagctttgttcttttttatcaggactgctttggctatcagggtcttttgtggttccaagcaaattttaggattgtttttatatttctgtgaaaaatgtcattgtaatttggcaaggattgcattcaatctgtagatcaccttgggtagtatggacattttaacaatattttcctaatccatgaacacaaaatgtttttgccttcttcaatctttgtcatcaatgttattcctacacatttttttttttttttttttttggtgactattgtagttgggattgttttcttgatttctttttcagatagttcattgttagaacatggaaatgctacatttttttattgttattgattttgtatcctgcaactttgctgaaattttttattagtgccaacatttttggtagagtctttagagttttcatgtcatctgcaaacagagacagtttaacttcttcctttccaatttgagggcctttttttttttaaggaaaatatttgtgtctttttattttcctttccttttgtttttggttgacgtgtaataattgtagatatttatgggatacagagtgatattttgatacatctgtgtaatgatcaaattagagtaattagcatatccatcacctcaaacacttattatttctttgttagaaaccttcaaaatcctttcttctagctttttgaaaatatacaataaattgttaactctaatcaccctacagtactatataaaactagaatttatctagtgttaccctatctagctgtaatttagtattcattaacctacctctctatcctcccctcccccatgccctacccagcctctaataactacagttttactctctacttctatgagctcaacctttttttttagctcccacatatgagtaagaacatgtggtgtttatcttattatgcctgacttatttcacttaacatgatatcatccaggcttattcatgttcccacaaatgacaagatttcattcttttttacagctgaatagtattccactgtacgtacgtatcacattttaaaaatccattcattcatttatggacatttggtttgactccatatctttgctgttgtaataacaataaacatgggcatgcagattatctcttcaatatactgatttcctttcatttgaataaatattcagtggcattgctggatcatatgatagctgtaattttatttttttgaaaaacctccatactgttttttcataatgattctacaaatttacatttccaccaagagtatataaaagttccattttctccacatcctttccaatatttgttattttaaaattttttttatcatagccattttaactggagtaggatgatatctcattccagttttgatttgcgtttctctgatgattactggtgttgagaatttctttatatatgtgttggtaatttgtatatcttcttttgagaaatgtctattcagatcctttatctactttttaatgggatttttgggatttttttttgctcttgagttgtttcagtttcttatatgttatggatattagtcccttgtcacataaatagtttgcaaatatttttttttcattgtatacattgtctcttcactctgctatttcctttcttgtgcagaagctttttagtttgatatagtcctatttatctgttttgttttagtggcctatgcttttgaagtgttgcccataaaatctttgcctacaccaatgtcctaaagcatttcctctgttttctcctagtataatagttttatagttttgggccctttgtgtgcctttcatgtctctctcttggctaattgttttggctaggacttccagtactatgttgaacaggatcggtgacagtgagcttccttgtattgttcttttttttctcttttcctttttatttattttttattattttttttttccagtcagggtctcactttgtcactcaggctggaatgcagcattgcgatcttagctcattgcaacctctgcctcctggattcaagcaatccttccacctcagcctttcgagtagctgggactacaggcatgtgccaccatgccctgataatttttgtactttttggtagagacagggtttcaccatgttggccaggctggtctcaaactcctgacctcaagtgatccacctgcctctgcctcccaaagtgctgagattacaggtgtgagccattgcgtctggcccttgtattgttcttgatcttagaggaaaagctttcatcttttcactgttgatgaaagctatggactttcatcaatatgatgttagctatgg

SEQ ID NO: 97028 - DNA, 123016 bp, Homo sapiens
  misc_feature (1)...(123016): n = A,T,C or G
gattcagaaaaagcatctgacaaaatccagcacatctttgtgattaaaaccctcagcaaaatcggcatacaagaggcatacctcaatgtaataaaagccatctatgacaaatccacagccaacataatactgaacagggaaaagttgaaagcattccatgagagaactggaacaagacaaggaagcccactctgaccacttctattcaacatagtactgaaagtcctagccagagcaatcagacaagagaaagaaataaaggggatccagagtaataaagagagagttgaactgtcactgtttgctgatgatatgactgtataccgagaaaacactaaagactcctccagaaagctcctagaactgataaatgaattcagtaaagtttcaggatacaagattaagtacacaaatcagtagctctgctatacaccaacagataccaagctgaggaccaaatcaagaactcaaccctctttacaatggctgcaaaataaataaataaacaaacaaaatacttagaagtatacctaaccaaggaggtgaaagtcctttacaaggaaaactacaaaatactgctgaaagaaatcatagatgatactaataaatggaaacacatcccaggatcatggatgggtaaaatcaatattgtgaaaatgaccatactgccaaagcaagtacaaattcaacgcaattcccatccaaataacaccaacattcttcacagaaagaaaaaccaattctaaagttcatatgtaactaaaaaagagcccacatagccaaaacaagactaagcaaaaaatacaaatcccgagacatcacattacctgacttcaaactatactataatgccacagtcaccaaaacagcatggtactagtataagaataggcacagagaccaatggaacagaatagagaatccagaaataaacccgaatacttacccccaactgatcttcgacaaagcaaacaaaaacatgaagtgggaaaagggcaccctaatcaacaaatggtgctgggataattggcaagccacatgtaggaaagtggaactgtatcctcatctctcaggttatacaaaaatccaattaagatggatcaaggacttaaatctaagacctgaaactataaaaattctagaagatggctgggtgcggtggcttacgcctgtaatgacagcaccatggaggccaaggtgggtggattacctgaggtcgggagtttgagaccagcctgaccaacatggagaaatcctttctctactaaaaatacaaaaaattagccgagggtggtggcgcatgcctgtaatcccagctactcgggagtctcaggcaggaaaatcgcttgaaaccgggtggcagaggttgcagtgagccgagatcacgctattgcacgccagcctgggcaacaagagcaaaactccgtctcaaaaaaaaaaaatgtatatatatagaaggtaacattgataaaatccgtctatactttggcttaggcaaagaattcatgaccaagaatccaaaagcaaatgcgacaaaagcaaagataaataggttggactaaatacaaagataataggtgggactattaaaacaaaagccaagataataggtgggactattaaactaaagagcctctgcacagcaaaaggaagagcgaacagagtagacagacaacccagagagtgggaggcagtcttcacaatctatgcatctgacaatggactaatacccagaatctacaatgaaatcaaacaaatcagtaagaagaaataacaaaaaatcccatcaaaaagtgggctgaggacacgaatagacaattctcaaaagaagatatacaaatggccaacaaacatataaaaaactgctcaacatcactaatgatcagggaaatgcaagtcaaaaccacaatgtgataccaccttactcctgcaggaatggccataatcaaaaaatcaaaaaaataatagatgttggtgtggatgccattgaaaaggaacacttctacaatgctggagggaatgtaaactagtataaacactatgaaaaacagtgtgaagattcctgaaagaactaatagaagaactacaattcgatccagcaatcctcccactactgcatatctacccagaggaaaagtcattatacgaaaaagatacttgcatatgcaagtgtatagcagcacaattcacaattgcaaaactatggaaccagcccaaatgcccatcacacgagaggataacaaaattgttatacatatatatatatatgtgtgtgtgtgtgtgtaacaatattgttatattgttatatatacatataacaatattgttatattgttatatatacatataacaatattgttatattgttatatatacatataacaatattgttatattgttatatatacatataacaatattgttatattgttatatatacatataacaatattgttatattgttatatatacatataacaatatatgtatatatacatatataacatatatacacatatatacacatatacacatatatacacatatatataacatatatacatatatacacatatacacatatatgtatatacacatatacacatatatgtatatatacacatatatgtacatatatgtgtgtacatatatgtgtatatatacatatacacatatatgggtatatagacacatatgcatatatatatttatacatatatacatatatatgtataaatatatacatatatatgtataaacatatacacatatatgtataaatatatacactataacaatattgttatatatatgtataacaaaattgttatatatatgtataacaatatatgtataacaatatatgttatatatataacaatatatgtattgttatatatatataacaatatatgtattgttatatatatataacaatattgttatatatatatgtatgtgtgtgtgtgtgtgtgtgtgtatatatatatatatgattgaatactactcagccttaaaaacaaacgaattaatggcatttgcagcaacctggacggaactggacagtattattctaagtgaaataactcaggaatggaaaacaaagcatcgtatgttttcactcataagtgggatctaagatatgaggacgcaaaggcatcagaatgataaaatagactttgaggactcagggaacgggtgggaggggcatgagggataaaagactacaaactgggttcagtgtatactgctcgagtgatgggtgcaccaaaatctcacgaatcaccactaaagcacttactcatgtagctaaataccacctgttccccaaaaaacctatagaaataaaaaaatttaaaaattaagaaaattttaaaaagaaaagctaattttcaaaagaaatcaaattaatcacccaacttctcaatttaaaaaactaaatgaaaaccatttactatcactcagaggtgggtttagttttattttctattgtcatcttttgatcattgtaaattatgagagttggagctgtagcacttctcaaattggcctctatgttcctccaacctaacagtgccctcttctggcttcatgattcacattcagctggttcactgatgttgaaaaaaaaaagatgatggaaaaaaaacctgttttgaaacctggaataataaaggctttagatctccgttttaatataatgaaaacaaacaaaattccagttgcaagtataatggtggtttccagcagctggaaggagggtaaaatggagagttgtttgataggtatggaaaagttctcgagattggttgtacaacaatgagaatatactttaccttattgaactgtacacttaaaaaatgttaagatggtaaagtttatgttatgtatgctttaccacaaagcatataaacaaataaataaataaatctaattgtggtataaatagtcaatgttgatagaagcaactctaagttgggactgttttcacctcaagtcaaatgtttaccgtaaattaaacctagctggagttgataaaatttttaattcctgttactttactaacgaggcacatatttctcttaatttgctaaaactatagctatagaacgacttaactgcaactcttaatgtctttagtcgtgaagatttagagacctatgtaaaaagactgtgaaattgttacttcatttacttgaataaataataaaatattcttcagtttctaaaaataaagactccaaagtttgacttgtatatctgagtggaaggcataacatttcactgagatgaaagaaaaaaaaaactaggaaaggagcaaatttggtggattaaggatagaccagtggttctcaactggggacaattgtgtacccgaggggacatctggcaatgtttggaaatctttttggttatcacaacttgaggagtagggagtagtactggcatatagttggtagaggcttagcttaggacattgctaaacggtaaactctggcaaccactacaaagattgatttggcctcaaatgtcaatagcaccaagattgagaaactctgggttagaatcttcttcgctgactttgaccactctttctcagcctttgcagcagacttcttttcttctatctgtctctaattactcaatattctgtttttagctcaattatttttcctttagattttctcttggggatataatccattcccttgtctttaactatcacctctatgttgctgtctcccacatcagtatgtctagttccaactactcttctagctctaaaatattgcctctctcaatgcctccctcacatcttttcattaagctacagctacatctgacttttctgtctttattagtagcatttggcacaaaaccacggggtcatttatttcccaaatatttactgagtacctaatttgtgtaaagggctgtgctggttacttggaggaaggtagaagggtggagataagagatagttatagtagtaaatgctttacatgtattatccctggttatggaaacacctttgcaaggaaaaaattatggcctagaaaccaaagttccaagaatttaaataattactcaaagagctcagagcttgtaaacagcagagtttaacaggcacttctactctggcattaaggactaagctctctccatttaaaaaaacaaaaaacaaacaaaaagcactgagaacaaagctgaagaagtgtgatctagtttgtccatagctaaagggagatggatgtgtaggctattttaataatgaaggtctaagaagttccagaagccttttcttctgagacacgtggtactttcttctggttaccataaatcatagaatataacatatcatcactggtaagatgggtcattattttccatacctacaagaaagaaaaaaaaaagctgccaactaaagtatagtgtaccatcaattgttaggtcgcagagatttcctagatattcaaatttggggaaaaacataataagccttcaaaaattacaaatttgcttaaaaaataaagaaaaaatgatcttagattctatgacatacggtgaattcattttccacattcaatttccatggtttgtgctagtgtgctattctgcactctagtcaacttacatgtttgcatattgctttttaaatgtttgtagctagtttcacagctctgtgatgtgcatctgcagctggcttgtaaagctcttcaataatttatttggttaccgcccacccccgcgtccctcccacacatataagccattcagagtttaccacttaaaggtaaacttgaatttcttctcatcttaaaattgcataaattatattaaattctcaataaatttatttacatttagtgggggtggggcgcgatggaaaaacactatattaaataacgacatcggtttttaacacccatcctaatagaaacattaaaatagaatggggtagggaggaggggtggaggcggagaagggatgtacgtctcaggatacaggaaatacggtaagagcgaaacaggaggaagccagctctgtgcctggaggggactcgccgccatctcaggtctcttggctttgccagggcccaccggagaaaactgacgacccgtttctgtaatccttatgggagaccaaccttgtgcctccgggagatccactctcccacctggaaacgcacgggaagccaagcctccaaaaaagcgctgcctcctcgctccgcgttgggattatccggaaggaactcccaacggaggtagtaccactctaccctccgcacctcctcctgcatcagccggcctgaagtcgcaccctcctcctccggagaagtagagaaataaatttctcccaccctaaaccaggtcagattctttctcatctaggacatctaggctctttgaaacttatttatgcattctcacaaatttccttccccttttccctgttctttccatgatttcaaaatagaaaaaataacatgcagggattaagcagctctttcacaaaatatgcttgaatgaaatgatggatatttaacgacattaaataattatttgtaatattttagatgaaataattgtagttatattttctaagaaatagacttgaatcttttgatttgcttgaaagtaagtcattggtgccaaggtggagggaaagtgtaataaaaatgctcatgagttgataatttaaagctgggtgatgtatatgtagggatttattatattattctctctacttttgcgtgcattggaaaatttttttgttaaaaaaaaaaaggctggttcaaggccaataaaaagcatctgttgaaggccagccttcagaagtgtatgtctttctctgtgtaaggcaggagagttgaatttttttttttaaagctacaatgtgatagtcaaatccaagtgccataatgtttgcttgttcaaggtattcaggaagggtggaggatggaccaagtcactgcctggtagtaatcatgagccatcaaaaaggaggagtaggggggcggacgcggtggctcacgcctattatcctagcactttgggatgccgaggtgagcagatcaggtcaggagttcgagaccagcctggccaacacggtgaaaccccgtttctactaaagttacaaaaattagccaggcgtgatggtggacgcctgtaatctcagcaactcgggaggctaaggcaggacaatcatttgaacctggaaggcagaggttgcagtgagccgagatcgcgccattgctctccagcctgggcgacaatagcaaaaaactacgtctcaaaaaaaaaaaaaaaaaaaaaaaaaaaaaaaaaggaaggaggaactttgggtgggccttaaaggttgagtgacatctgccatgtggaggggcagggaatgcttttcaggccgagggtttccagagaaaaggcagaattcttctggaaacagcttggctataattttgaatctacaagaaggactaggaggtgaagataaagtgcttcagggccttaaatgttatgctgagcatatacttcattccaatatccatcaagtgctactatttgtattttaagattcctattcttactatcagraaaggaatctctgatatttagatgaactttatagaatgcaaattataaaactgaatctgacccaagttttatagatccttttaattcaaaggagagaagcatcttttcttcattcgtgcagtaaacctttatgaagcccttgcaatgggtaggaattattctgagagctgtaggggatggatggccaaggcatagtgcctagtacataataggagtgaaacagatatttcaataaataaatcaatgaatgatgggacaactttggcgaccaaaaaagttttagacattgggtttggtggtaatgcatagaaaaaaaaaaatagaaatctattttacttgaaagcatctccctgtcattccatacagttttacttctcacatgtttacctctattcaaaggggtagtggagtggaaggttgcagggagtagggagaaaattgctcagatagaaaacaaaagagcagccgggcgcagtggctcacgcctgtaatcccagcactttgtgccgctgaggtgggcagatcacctaaggtcaggagttcgagaccagcctggccaatatggcgaaaccccatctctactaaaagtaaaaaaaaaaaaaaaaaaaatagccggtcatggtgttgtgtgcctataatcccagctactcgggacgctgaattaggagaatcgcttgaatccaggaggcagagattgcagtgagccgagatcatgccactgcactccagcctgggcgacagaccgggactcggtgtaaaaaataaataaataaataattttaaaaaataaaaaggaaaaagaaaagaaaacaaaagaacaaaacaataagtgcagtagctacataatttcccctccaagtgattcaaatcactgataattgtaataatagccaatatttactgaagatttatgtgccaattttctaaagggctttgcatgttataatttatttaatcacaactctactagagaagtttgtataggccaagggaagttgtatgacttgccacaagttacacagcaagaagtagctgagctgagctttgaacccagaacacctgattccagagtttatgctctaaacttctatataatacatcccttctaatactatgtatacaactgttttataggaataaatcattgaaatagaggtatgggaaggataatgatttgaggagaccaagggacaaagagatggacaaaaacagaaaaaatgatgccacaatattttttactatttttcagtctttgagtgattgcagtatgactccatttccctggtgcattcatataatagttcacctggtgaaaacaatgaagattatttacaatgctaccctgctttttctggtgtcctgaacctggaagttgtgctttttaaggtaatctctttaccaaaaattattaagaggaggaagagaaaaaaaagagttggttttgacacattaaaaagtagccaaacaaaactcaaaaagatagcagcaaatgataaaattgaaactatattctacattatatgaaaacatattcataataatagtgtaatctgaagaaatgttttgttagattcacttgtacttatagtttctattattactgtgaaatatatcatctttttaactacattttctaattgtttctagtaaatgggaacatgattgatatttttgtatatttattttatatgctggagccttcttaaattctgtttattctaataatgtatagattttcttggattatctgttaattaattatattttgaataatgacagtttctttacaatatttctttaccttatattactgtgctagctaggatcttcagtacaaagaggaacaacagcattggtagaggatttccttattttgttcctaaattctacaaaagtttcaccttttttagtagattgtctttctcaagttaaggaactttcttaatgttcctagtttgctgagaggttttattacaaatattatgaagttttttcccgtctatatgtactgccactttcatatcctttcttcaccattaatatcacagtgtgaccatgtgataaattacaataatcaattttctaatgtatttcttgcttttgctttcatcgagcctcgtcattkgatatttggttcctattttaatcattttgacttttatttttatattgaactttcttctactttccttttattgttctttttctaatttattgagttgaatctttagcatcttaattttcaatgttcttctgtaaaataagaatttagaactataaattttcttctaccactttagaaatatttcacagacttttatatatagtatttttatcattcaatatttattatttttaaatttctcttatgatttttttgacccatggtttgttttttttcaatttctaatcatatgggattccttttttaaaaaatatattatgaaatcattacattattcccattctagtttaactttatcttatttttcttttttaattttttttacatctatagactttattagatgttctttatacagtcatctggtatgtataaagagtgaacaatcatataaaaggaaatatggtcataactgattgaattaataaaatcctgaaactaaataactcataattcattgcacaacatatattaggtttcattagatcagtatatagcttagtagtaaactctcctgatggccataaacctctaaggtgttgtcatcctgaaaaatgaaggaggggagggagttggtggggtgcagaatggagaaaccttccatagtgctggtgtgatgtaccctaagttgtaaagttatagggcatcgccacctagtggcagaatttcatgccttgttctaattaagggactttccttgttttccaaagagcaatgtgtcttgttcactttctaaccatccctctctgatgctgtccttcctaaaatccatgcctcctcccatacagtgtaaacccatctgcttttcatccatcaagctgtcaaggatttggttatgacaatttttatgttcacctaactttttagttccaagtacttcggttattttcaaagctacacacaggatgcccatatttttataactccatcttatttgtgaaggattattactttgtgctttggcctagtttttattcttactgctgaatcttttcataagttaaagttattgcagagttaatgctttaaaaggcagtccttagagtaaatagctaaatgaaatcattaccaaaatgtacactttggatttattaagattctagaatttaaaaacaggaaaaggtgccattagtgaaaattccatcactaacattttggtaccactcgtagagcatcacataaatattcagaccgtgataactcagtgcaggaatgttatcaaatatgtccatgcaatctggaactaggaccagagttggcaattgggggtctgaaggcccaacatcccttacactgcttcctacaccttgacaacaggaaggctgagtgatactaggtagtgcactacaacagtgaacataagccagccatctgttttttgcaaagtataataaaatagaaaaacagaacatagaccacttcagagcaaacaaacatatccttcttcaagatgtaggaaaaccatatattcaaaaccaatctcaaactttaaacaataaaagatatcaaacattttaaactgtacaaagcaaattagcaagattttaatgttggcagttttaaaatgtcacccatccaaaacacaaaacagggagataaccaagtcttagctccatcctaatcaaagctgtcatgcagatccagttccactcttctcatctccagcaggtacttcactcaaggaggtaacacccaaggggagtagatggaccaaaaacaagagtgccacatagaaggaagagaggggaccttggactttagctactggttagctattcaactttgatgatattcagtgttttcccaagttattttttctcgcttctcatcacataatttacattatgcatactatgtgccagagactgtttgacatgtagtcagttaattttcacaactgtgtaaagttggtttctatcattagctctatcttagggccaaagaaactgaagcacggagaggttaaattgtattcctaaagcactacacagtgagcaaatagattcagacctgtgcagtctaacccagaattagctctgaatcactctaccattctgtctacaggacaacaagcctgtgtgtttcaggtactttcatggtgatttttcacacaggacagcttttgataatagaaaggccctctctttcaaatgaaaggacttcactgatggattaacaaattctcaccttttcacctatgtgagccaaatactagatctactttcttagtcttcataacaagcaggacgataaccataatttataatgaacacaaaacattgatatagtgttcaaagaacttttgcacacttggtctcgtttggaagaatgaagtaatctggaaacatagaataggcatacactgtgactttaggaagaactctcacaaaatcagaggttgccctatgtaatatcacactttttaccttgagcaggtggatagcctgggagttcttgttatacctcaatcttggtccattctatttgttcscctgtccttcagcagtgcccttaggcttgctttaaacattaacagcattcataagcatggtttctagggtcagagcccagcctccctccacccacccggctccctacacaccttgacagtgctctttgagatgcctcagttctagtctccttgtaattgtgcacagtagatgtctgaacaaatagaccagagtcctgcaaaagtgatcttgaaatcacaattaaaagagactttggagagatctactcaggaaaattttctgaatagacaaatgcttttaaagggggttctagacagtccgtcttttctgcctccttctgcgaagtagggctacactaaaaccttgtcacaatgtgacctgagcaaaaccattatcaagtgatttagttgtcttgaaccagacaaaagaaaattgacatgatttcaagataggtttagaaaaataatctgactagcaaaaaaaaaaaaaaaaatggggggtggttcctagggaatatgagacttgatattttagcaaaaatttaaatatgctctttatgatacacacatttctcgttgctttacaaattttaaatgtaacacaaatttgtttttcacactgttttgttagttgaggtaaggcattcctgccgcacgcagcaatgactcgtcctggaaaaccagggaggctgcatatcctactgttccttctctactagctgtggctccacactctcacctccaccaaagaaagcatttcagaatttaggggtggaaatgatgacaacattgaataattctatttttttcttttttttgagacagagccactgtcgctcaggctgaagtgcagtggcgcaatctaggcccactgcagcctccgccccccggggtcaagcaattctcctgccgcagcctcccaaacagctgggaccaccggtgcccgccaccatgcccggccaattttccgcatccctagtagagacggggtttcaccatgttggtcaggctgatctcaaattcctgacctcaggagatctgcctgcctcggcctcccaaagtgctgggaccacaggcgtgagccaccacgcccggccaatgattctaatttatatttttaaaaattaccttataatcttaaaacttttaactgatgagtatccaacccttaaactttataacaatcatttccaaagtggaaaagtcactgggatatggggaaaagtatgatttgtttttgtacttctatttttctaatgtctactttttgttttctagtctacatgttagcacaggagtatatatattacttaagtatacctatgttggagtgcatacagaatttctttttaaatgataggatgcaaaatcaaatctatttggatagcagtgaagaggctgtttttcaatcctggcaaactagggggtgcatacccccttttttatttagtagcttccataaggctataactcatggaagttacatccttacataaactgatgggctatccaaccagtgaggaaaactgataaagtggcctctgagctccaggaagtagttaaacactactaaaaacatcttgaaaatttggaaaaaaatttaacagtaaatggattcagtagttattcagtataaggtttggaataactccagccattacaatagacatttatttaaagtaaaacatctgcagaccaaataattcttaaaattgtttgtttcaagtttaaccatcttcataacagctgcatccacagacttcaactacatgattacttctttgcccattcttctctttcttttctttcccgaataacctcttgcacatacagttcaaggtagaaattttcctcttcatatttggtccactgctctttaggcaagatctgatgcttcatggtcaggtccaatgcactcttaatgtgacacatcctgtcattatraaggttctcaggaagccttcttatggcttcttttatgtcttcatcctcatatattgtatcatctctcattwaccccagtttattgaatcctrcagtattgtaataccattttcgaataccatccagccacttgcctgatgctgaaatggcctgcttgccagccattttgacctgcttyaattttttttaatccttcttataacaagatacaaaaattatacactggctgctcatcccaacagaatttggcaatataaaacattttctttcattaaatacatagaaaaagtgtggttattgatatttattgatgtagttattattgaattttatatttgtgtttttaaaatttttatttttatttaatttcacacttgaaaaaccaggaatattacaaagaactcccagaatgtcctttacccagattcaccaattaacattttatcacgtttgccttatcattctgtttttctcttcctctcctccttctcctatttgacagtagtttgcaaatatcattctcctttacctcttaatatgtcagtgtgtatttcctcagaatgatgatttcctcttatacatcctcagtaaatgtgtcacaatcaagaaatttgacattgtttcaatatcataatctacgccatattccaatgttatcagttgtcccaataatgtcttttgtggttattttctttccttggtcaaagtgctaatccaagatgatgcattacatttacttgtcatgtctcttcagtttttaatatggaacaattccttgacctttctttgtcttttatgtttatagaaaaacaaacttagtttctctcattatattctcacaaccccacttctgacactgattgtgtggaaaaaaagtttttctttggctcttgtaccacagcaaccaacacagaaagcttgtgaacaaatgtattgggattttttctcaccgacaggcaagtaaacaattctgcagtggacaccagctgggtgttctccartccaattcaattctgaagctatctccctacagaaagtatcagatcccacagattgagggcttagtcccacgagactgcctcaactttagacatcagtttcaaatctgggcctctggaacttttaactgaccagcttcaagttagggttcccgcaacctctctctttaggctcaaataatttgctagaacaacacacagaactcagggaaacacttacttacatttacccattaacagccagatgaagagatacatagagtgaggtctggaaggctactgagcacaggagcttccattcctgtggagttagggtgtgccaccctcctggcatgtggatgagttatttgtcacctttctgaaatcctccacaaattcagctgtactttgtcctcttgtgctttttatgaagactttatctgataggcactaatgaagcatgaacaaccatgtagaaatgtgactggactaaagggtatgatctaataccaatagacttggtggagaaacccagcaaggcttgtctgttcagattcttcttggtttctctgtgcagcattccttcctcctgggtatggggcaggactctttctgaaatgggagtcttatgacccacagtcaaactaggtaggtcagagaatttctttacgaccagctccaagccagaaagctgggtgaagattagagtatatttttagtttctatggcttgcctttgggagaaaaaaaaagcaggtaaaaggagggcaggagaaagtcagagagagattctgttttgtgaagcctaaagtgccccaacattatacatatatatgtgtgtttgtgtgtrtatatatatatatatatatatatatatatgtatgtatatatatatatttttatatatatatatatakakagagagagagagagagaaactgtctctcacttttatttctctgaagctgtttcaaagctgcttcaggaaccaaagacaaaagaccaaatactttaacaagagatatgcttatttctttagtcacttaggaaataacaagagatttgggagttataagccaggaaccatggacaaaaaccaatatatatatatcacaatatcacacatcgacaattgacacttgggtaaatacaggacacttatttcatagattgtcctttaatttaaatttgtgtgccatttccccattattcagagtacgcatattagcaaaagcaccacagaagtaatgtattgttctcagggcatcataatggtggtacatgatgctggtttgaccctttagtagtaaagttaactttgattacttggttaatgtggtgaatagttgctagattaatccactttacagttatcattttcctctttataattaatgattttgctggggatactttgagactatgtaaatatcctgttcctcattaaattatcatccactggttttcaaatccattgataattcttgactgaatcagatattgctatgatgaatgcaaaatggtaattttcaaactccatcatttttagtacatttattagtttatattctacatcaaggtagagctttttctccatttatttgtttattaattactttggacacatagatttttactttattttaaaaataccctattgttattatttattttaatacccaaattgtctcagatttagtgactggctgcccattcaagttggctcccctgtcttttgacatgtgtcatcattcttaaacacactttttacttactttaaaatttttttacttccttactttcaagcttgtcttgtacttcctaccccattaatcatttctctatagacctctgttatcttttatggagacagtatttagaaactaagtcattgtatatagctgttttttagcttaacattttgtcattgttttccatttaaaagacaatattgcttatgtgataatgattatttagtgtttgttgaaacttgctttatgtcctagagaacatgatcaactagtgttttatgtgtgcctggaaagattgtgtatctaatttttgcgtgtagtgttctgttcattaaatttaactgtgttgtttaaatcttctctattcctaagttttttgtttgctggacctatcagttaccaagagagttaaaatctcccactgtatttgtgtatttgtcaaattcttacacttttgacaatttttgctttgtatacttgaggcattgttagtatgtacatacaagtctagaatagatacatattttacaattttaggaactctttttatctttttgaatgtaaattttttttgtttgctgggtctttttaattttgtaaaatctttctgggtacctagtagttgtatacatttatggggtatatgagatgttttgatacatgcaaagtgtaataatcacatcatgtacaatggggtatccatcatttcaagcatttatcctttgtgttacagacaatttaattatacagttatattattattgactatagtcaccctgctgtcctatcaaataataggtcttattcattctttttgtatacccgttaaccatccccactctcccccaccacccattacccttcccagcctctggtaaccatctttctactctccatctccatgagttcaattgttttgatttttagattccacaaataagtgagaacatgtgatgtttgtctttctgtgcctggcccatttcacttagcataatgatatccagttccatccatgctgttgtaaataactagatctcattcttttttatgactgattagtactccactatgtatatataccacattttcttcgttcatgtatctgttgatgaacccttaggttgcttctaaatcttagctgttgtaagcagtgctgcaacaaacatgggagtgcagatatctctttgataatactgatttcctttgtttggggtatatacccagcagtgggattgctgggtcatatggtagctcaatttttagttttttgaggaatcttcaaatcgttctccattgtggttgtactaatttacattcccatcaacagtgtacaagcattccctcttctccgcattcttgccagcatttgttattgcctgtcacttggatataagccattttaattgaagtgagataatatcccattgtagttttgatttgcatttccctgatgatcaactacaatgagtactttttcacatgcctgtttgccatttgtatatcttcttttgagaaaggtctattcaaatctttgtcacaattttgatcaaattattagattttttcctattgagttgtttgagctccttatatattttggttattaatttcttgtcaaaagtgtagtttgcaaatattttctcccattgcacctatactttgtagactgtttgctttgctgtgcagaagctttttacttgatgtgatcccatttgttcatatttgctttgattgcctttgcttgtggggtattaattaagaaatttttgcccagatcaatgtcctggagatttttcccatattttcttgttgtagtttcatagtttgaggtctttgacttaagtctttaatacattttgatttgatttttgtgtatggcaaaagatagctatctagtttcattcttctgcatatggatatccagttttcccagcaccaattattgaagagactgtcttttccatagtgtatgttcttggcacctttgtggaaaatgagtttgttaggtgtgtggatttgtttctgggttctcagttatctttcattggtctatgtgtctgtttttgtgacaataccatgctgttttgattactgtagttctgtagtataatttgaagtcaggtaatatgattcctccagttttgttctttttgcttaggatagctttggttattctgggtcttttgtggctccatataaattttaggattgttttttctatttctgtgaagaatgttttttgtatttttataagtattgcattgaacctgtagattgctttttgtggtatggacgttttaacaatattgattctttcaattcatgaacatggactatctttccattttttggtgtcctcttcaatttctttcatcagtgttctacagtttttattaaagagatctcccacttctttggttgagttaattgctaggtatttaattttatgtttggccattgtaagtggaattacttttaaatttctttttcagattgcccaatgttggcatgtggaaatgctactgattttcgtatgttgattttgtatcctgcaactttactgaatttatcagttcttatagtttttgtggaatctttatgcttttccaaacacaagatcaaatcctctgcaaacaayggtaatttgacttcttcctttccaatttggatgcccttaatttctttctcttgtctgattgctctaactaggacttgcagtactatgttgaataacagtggtgacaatgggcgtccttgtcatgtttcagatcttagaggaaaagctttcagtttttccctatttggtatgatactagctgtgggtctgttatatatgggttttattatgttgaggtatgttccttctatacccatttttgaaggtttttatcatgacggcatgttgaactttatccaatgctttttcagcatcaagtgaaatgaccatatggtttttgtcctccattgtgttgatactatgtatcaccactgttgaaccatccttccatcccagggataaatcccacttggtcatgatgaataatctttttaatgtattgttgaatttgatttgctagtagtgtgttgaagatgtttgcatcaatatttatcagagatattggcctgtttttttttaatttgtttctgtctgattttggtatcaggcctcatggaattagtttggaagtatcccttcctcctgtatttttcagaatagttcaggtaggattgatattagttcttctttaaatatttggtagaattcagcagtgatgccatcaggtcccaggcttttctttactgggagactttttattatggctttttattggtcttttcaggttttggattatcttcatggttcagtcttgatatgtcatatgtgtagaggagtttctctatttagtctagattttccactttattggcatatagttgctcatagttgccattaatgatcctttgaatttctgcagtatcagttgtaatgtgtcctttttcatctctggttttatttatttggatcttccctctttttttcttagtctgggtaaaggtttgycaaatttgtttcacatttcaaaacaccaactttttatttcatttacttatttattttgtattgttttcttcattccaatttcatttatttcggctctggtgtttattatttcttttcttcctctaattttgagtttagttttctcttgcttttctagttctttaagattcattattggtttctttattttaagttttactttttttttatttaggcactaaataactaaacttatatataactaaactttatagctataaacttccctcttagtactgcttttgctttatcccgtaggtttttgtatgttgtgtttccattatcatttgtttcaagaaatttttcaattttcttcttggtttcttcattgacccactgcttattcaggaacatactgtttaatttccaggtatttgtatagtttccaaaattcttcttgttattgatttctatttttattccattgtggtcaaagatgcttcatattatttcaatttttttgaatgttttaagacttgtattgtgacctaacatatggtcatgtgacctaacatggtggctttagagaatgatccatgtgctgaggaaaagaatgtatattctgcagccgttggatgaaatgttctgtaaatatctgttaggtccatttggtctacagtacagattaagtgtgatgtttctttgttgattttctgttcggaagacctgtccaatgtttccttgctgttaacatagctactccacctttccttttttggtggtatttctttttccattgttttactcattcacttttttctttcttttatcttttacaaaatgttctgccaaaaaatcaatgcattgatttgtttgtttctgaatttaccaatagaatttataattagtattaaggataagctttatatatccaaacattatctttctttactaattttttattttatagaatttaaactctacagaaaagtcaaaagatatctttcatgtattgtagtgccattcttttccaagggagatacattccaaaatccccagtggatgcctggtaacatgaagagtaattaatcctatataaactatgtttttttcctatacatacatatgtatgataaagttaaatttataagttaggcacaatacaagattaacaacaacagtaataaaatagaacaattattacaatattcatagtttcatggatagaagactcattcttaccataggtcttagcaacttcaacacatgatttttttcttcccttattaagttgaaaacttcctccttttcacttaaaggaagcattttacagcttctctttagcatatgtgaactgccagcattatcattcttgcactttggggttactattaagtaaaataaggattacgtgaacataagcactgtgatactgcaacagtttattggataaccaagatggctagcaagtgactgatgggcgggtaaggaatacagcgttgatgtgctggacaaagggatgattcacatctggagcaaacatgagatttcatcacactactcacagtggtgtgaaatttaaaacttatgagtcgtttatggaattttccatttactgttttcagactgcagttaatcatgggtaactgaaactgtggatgaggggggaccactttagattcatcagggcatcaatttggctacatatggcttatctctttttctaaatactatatacatatatgtatatatacrtacacagatttttttgctgagccattgggaagtaacttgcagatatcatgacacttcaaccctaaacactaaatcatatatctcttaagaacaattaaattactattacacccagagaaatttaacattgatacaatactattatctaatatactatccatatcaagttctcacaattttcctaacaatatcctttatagctttttatttgttttggtccaggatccagtcaggggtcatgcattgtatttagttgtcatgctcctttttagtctttttaaatctagaatagcaccctccctttttttttcttgtcctttttttgtgacgttgccatttttgatgagtccaggtagttttcctctatatgtctcacagtatgaaatgtgtctgattgttttcccatgattagtttaagcgtttttagcaagaagactacatgggcgatgttctgtccttcttaggcacaaaattctagtttatcccaagagcatagatacctttggggattttacagatagctaggtgggtattttttacttcccccttaagaaagttacttttctggacacgggtcaaattatggtttataatttgcaccatattccatgtctaggttacctgtttacagaaatgctcagcatgaagaggagtttctatatctgttctgccatcacattttcctacttcagagcatttacttagtccggttggttgtctgtctgtgtattcacaaactttcacaatcaactcaatagggaataaagttttttttttcagcagcttcatgtgcagtctccttaagtactttttcctatgacttggtcacttttctccctctcattgtataaagactttctcatactactctatattgatcatttttaagaggcaaatatgatatgatcgagttcctctcctgttattcttacctcctgacatgttatcatagcatctgggtcttctgtctctgggaagataagccagattttattgcatggattctgtattagttttatatttctaccataacaaaatgatcacaaatttagaaatttaaaagaacatatttattatagttctggaggccagaagcctgctatgggtctcatcagacctgatgagaagtcaagctgttggctggctgcattcctttctagaggctctggggggatatgtcctgctcatttggttattggcagaattccgttccttgccactgtagatctgagatctgtagatctcagttccttgccactgtagatctgtagatctgagatccctttcttgctggctatgagctaagagctgttcctagcttctagaggccacccaaattccttagattgtcatctcttttctccatcttcaaagccaaccatggcaaattgagtccctctcatacttagaatttctccattttcttttgtcattacatctttcactgactcagatgatatgcttttaaagatatatgcaattagagtatgcccacccaaataattcagaatattctcccccatctcaagatccttaacttaatcacatcagtaaagttccttttgccttgtaaaataacatagtcatggattcttgtaattgtggtgtggacatctttgggtggccatcattttgcctaccacagattttattatagcagcaagccataacctgacaccgagtgtgtgattcatccattcttttattcaaccaacacaaatattaaagaatgcctattaaattgagcatgtattaaattccaggcattgttttatgtgccagggttacaaaaatataacatctaactcaccaaggagttcataaactggtttggtaagttctgtagatagagattggcacagagttctataagagaatacaagaaggcacatgagcaagactagaagagccaggaatggcctcctgtattgatcaatatctaagctcagtctttgaaatgaaatgaggtactaagtaaggatggatgattgtagatgggtaaagaacttcaagcagtgagaaaataatgaccaaagttacagaactcgaggtaggctggtttttggaggaggtgagatgtatggtaggtagttttcctggagtggagagatggagctagatcagcaagctgaagcataaacatgaagactttgtgcactacaaaggctcaagatagatctgtaggaaatgggatgtgactgacaatcttgaaagagagtgctgtgttcacatttatattttatataggtcatactagtggccatgtggaggatagtatagtagagcaagattggggtaagaagatcatttaagatgcttgtatgaaaatcccgacaaaaagtgatgaaggcttgaactcagccaatggtagttgggatggagcacagatcagtggatttgagaaagttttatgaagtattattgattagatggtgtatcaatcagggttcaaccagagaaatagaaccagtaggagatatatattaagaaatgtattataaagaattggcttgtgggggctgtgtaggcaagcctgaaatctgtggagtgggctttcaggaaggacagactggaactcctggacatgggctgaagctgatgtcctcaggttaaatttattcagggagaccttagctctggtcttaaggtccatcagctgattgaatcaggtctacccaaattatttaggataatctcctttacttaaagttaactgattatagacagtaatcacatctacaaaatagcttcacagcaaaacctagttaaattgaataactgaggactctagcctagccaaattaacacatcaaaagacaatcacagatgggatgtcaagggaaacagaataatagagggtagttctcaagtatgtggcttgagtattacatgaaatcactaactgagttatagaatacaagaaaaagagcaggttttcaacattttcagtaagatacctaggtggaggttcctggcaagcaggtaaagatctgagattgcaagagaagtgttgtccatataaatatatttagataaccatcagcataaaggtgatagataaaaccaggagagtaaattaaataatctagaagaaggtatatatagagaaaagttatggattgagaaggaaattctggggaccactaacatttaaggattatctagagaaagatgaacagataaaggagtaataggatgagggggaaacctgaaaaagtctgatgccgattaagaaaaatgtagtgaacagcaacataatatacattagagggttcagtactgaaaaatatttattaatttgtaaattaagtttattggtgaatttagcattaacggtttccgtgttgtgagagcagaggccagattacagtgggttgaagagttactaggaagtgccaagttgagggtagctggcatacgagatgggatgagaatggaggataaaaattggacaatattttataattaaatgataactgtaagaagattaagagccaagggagtattaaaaaataatggtaggaacttgcagttttattgacttaaagtaacaagaaaaggggtagagactgaagatataggacataagagaattcaaagttactgagaaataaaagaaataggcctggttgttagagagggtgcagtgacaagagaaggacttgttttattctttggataagactagggtattggtactcaatggaggtagtataatcctgagagggtgattggaaagtttgtgaaaggcatttaagataatcattattgaagtgcttcctgacatattgtgggcagggtcagtattgctaaataacctgcaatatgcaagacagcctgcacaatgaaattttctatatcccatacaacttttaaatatatcatcagattaaacacttatttttgttaatctagaccttgaattgaactccattctatatatatataagcaagtttttaatacacactaacttttccaggaatgtaactaccatgtaatccaaggtaaaaacctttgttttgttcagaatcttatcaagaatgtttatcattttggaaaatcgtgatacctacaaaaacgctgctcttggatatttgaaatccagataacaacacacatgcatcagtcagtaattatagctgccacctttacaggcattctctgtatattttttgcatacttcattgtcttctagtgttgtcatgtccccacatttgcatccttttttttttttttgagacagggtctcactctgacacccaggctygagtagagtgtcacagtcccatctcactgcagcctcgacctcccgggttcaagcgatcctcctgcctcaaccccccaagtagctgggaccacaggcacatgccgtcatgcccagctaatttttgcgtttgttgtagaaacggggttttgccatgttacccaggctggtctcaaactcctgagcttaagtgattgtccgattcagcctcccaaagtgctaggattacaggcatgaacctccatgcctggctgcacatttacgtcttaaaatacattatattttattataaattactttcttgttatttctatttcatattatagatgttttgaaatttttatcttaatataataaagcattaaaatatttaagaaagggagccagatagaattggaaaccattggcacaggagaaataagataagaatgagtgaaaatgccgatttttaaacaacaatgaagagatttgtgagaatggctaatgcattatgctttgtggaagaggttaccatagttctaattcccaaatccaatgactggattttgggttttatcttgatccttctgcaacgtttaaaattctctgctttcttccattctacaacattcttctcttctagttctccttttacatatctggccattgtttctaactatttttttctgagtacctcctcagcctagatccttaaattgagtggttcctgaatcttcctatttcaatcctcacttcttcttggcaatctcacccactgtcctgggttaaataaaaaaaatatatgcagacgacttccaaatctgtatttctagcacaagctttatgccaggctcaaactcatatagtcacctgcctgctctttctgtgtgattgccttatcaccttagactgaatgttaccaaaactgaactcttcatcaccccaccagcagcaccacaaacctctttattctttattgtttgtactagtacttctaaggcaaaaactagggtatatgtcatgtttcttctctcttacctccactttttaatctgtcaccaagtcataatggttatttcttcaaaatattccatgattttttcttctatctttcatttccaaaactctagtcccattccccggtttggaccctcaacatttttctcctgaatgacaataatagttttctaactgatctcctgcctccagtactgtgtactgactcttggcacagcctttagaatagcctctaaaataaatayctgatcacattgctcccctacttaaaatcctttaatgattttttgcttcctatgaaaatcctttaatgatttcttgctttctatgataatgtctaaagtcttagcatgacctaaaagattctgtatggcatacctcttaatcaagccttatctgttgccaccaattcctacacctcatcccaaactcacacaactttttttttttttggattttatgtgccactagggttttcttgaacatactattatttcatgcagatttctttgtacatttgactccctctaacatctttacacccttgtttacctagtgaacttcattcttcaaattcctgctcatttgtcatagcctcaatattttttttcctcatcctctgtcttcagcctctaaaaataattgcttcctctttactatttctgtgcctggtatttgtctattattgcacatgtcaaacaataacttggtgaatgtacattgaattctcagtgtagtacctttccatctggttgattaggaattttaaaaagaattacaatgcacaacagaagttacttcatttgtttctaggtttttgctttttatggtggtataagtcatagtaaagtacataaatcttaagtatatagctcaatgaatttgtacatatacttatatactagtgtaaacaacacctagatcaaaatataaaacacttccaataccctagaaagcacatttgtgtccttttcaagttaacattcacaaaaagtaaccactattctaacatctgtcaccattgattagtttcgcatattcttgaactttatttaagtggaatcacagaatatgtactctttttaaaattttaactattattttacttgtaggggctacatacgcaggtttattacatggatgtattgcactgacatccattccctcctgcctctagtaatctgcagtgtttattgctcccaagtttatgtccatatgtgttcaatgtttagatcccacttataagtgagaacatgtggtattaggttttctgtttctgcattaattcatttaggattatggactccagctccatccatattgctgcagaggacataatttcattgttttctgtggctgcatagtattccatggtgtacatgaaacacattttcttcatccagtctaccactaatgggcacctaggttgatttaatgtctttgctattgtgaatagtacagtagtgaacatacgagtgcttgtgtctttttggtataatgatctatttattatcagttatgtatacagtaatgggattgctggatcaattggtagctctgttttaaaaatttctttgagaaatctaaactgctttccacagtggctgaactaatttacattcacaccagcaatgtatacgtgttcccattgctccacagcctcaccagtagctattgttttttgactttttatagtagccatcctgattggtgtgagattttttttattgtggttttgatttgcacttcacaagactgtactcttttgtcagataggtttttatttgaagccttatcagtaccttagaactctgctgcaccctaatgatatctgtgaggaaagagatattgaaacagctcttgaggggatgctccaagaggaaggcaagacttcaacaactctttttatttttattttatttatttatttttttgagatggagtctcactctgttgcccactctggagtgcagtggcaagatctcagctcactgcaacctccacctcccaggttcaagtgattctcctgcctcagcctccgagtagctgggattacaggtgcacaccactatgcccagataatctcttgtatttttagtagagacgggggtttcaccatgatggccaagctggtttcgaactcctgacctcaagtgatccacctgcctcggcctcccaaagtgctaggattacaggcatgagccaccgtacccagccagcaactattgaatcataaaaatcagaaagcctatgattatttggatgggtgtcctcacagtgaaatagaatgtttatctaatgtgttatctacttgaaggcaaaatgaaatatccagaaatttgaagagactgtggaagaagagatcttaaacgtttccaagaaagaaagggtgttaatttgaaattaactcagttctattcagtcaacacttactgaacacttgctgtgttaggcactatatgagacaaaggggacacccagattactaaaccatgcacctgttcttgaagactactcagtctaatgctggagacaagatctttctgtaaggaagaagctaaagctaggaagcacaaaggatagatagtgatcccagacacagaaggcttcttggaagatatagggcttgaattaaacttacattataaataggaggcattcaggtgaagaaagttggcaaggtatttagttttcagtcatgtgaatttgaggtacctgtgagacattcaagtgaagatgtccactagaatgtcagaaatataggcaaagaatgcagacttgaatgataatcagcatataggtgagagttgtcatcatatagatgagagttgaagccatgggaaagtgtatattgtgagaagaaaaagtggtcaagaagaaaattttgaagaacacaaacattgaaatgactgggagaggaagtgggtcctggaaaggaaactgaattgacaaaaaaaagtaaaaaaggtaagcagaaaatgaggattcctgaaacctaagggaagaaactatctcaagaaagagggtgtggttaacagtgtcaaatatttttataagagaaggatttaaaagcatccattggtgatggggacagaagggaaggaaaaaaaaacattgagtctatcaaaggaggtcctgtattagtgactttggtaagagaagatttattggcatagaagggacagaaaaaagattgtagtggattgaagagtgcatggaggagtgtgaggaagtgggtgaagatagggaagacattgcttccaggaatttgagctgtgatgagtagcaaaaggggaagaaagttataataggaggggaacaaggttaaaggaaccatcttttaagatggaaaagacttaaacttgtttaaatgtcagtaggaaagatcaaataaagaggaatagctgaagagagaggaaaaagtgagtataatgaatagttcgaaggaagtgagattatatgggatccagagcagaggtggaagagtatgccttaggagaggaggagaattgaagggagaaataaacagttccacaataatagttggagacttaaataccttaccttcaataatggataagacatgtaaacagaagatcaataaagcgatagtgaacttgaacagcactgtaaaccagtagatctaacagactgtaaagacctaacagcactgtcccatagacctaacaggcatgtatagaacacttcatctaacaacaggaatatacacatttttctcaagtgccatggaacattctccaggataggccatatattaggccacaaaacaagcttcaataaatttaaaaagatgaaagtcatacaatatcttctacaatgacaatggaaggaatctaaaaatcaataacagaggaaaactggaaaatcatataacatttttaataaatggttcaaagaagaaatcttaagggaaattagacaaaattgtgaaataaatgaaaatgaaaacatgccagaacttaagggacacagtaagatcagtgctcagagggaaatttgtagctgtaaatgtcaacattagaaaagcagaaagatcttgaaacctgactctacacctagaggaacaagaaaaataatagcaaaacaaacccaaaactagaagaaggaaggaaataataaagattagagtggagataaacaaaacagagaatagaaaaacaataaagggaaaaacaaaccaaaagttgatttttttgaaaatatcaacaaaattgacaaaacgttaccaaatacctgaaataataagtaaatcagaaatgagaatggagccacatatctacaaccatctgatctttgacaaacctaacaaaaacaagaaatggggaaacaattccctatttaataaatggtgctgggaaaactggctagccatatgtagaaaactgaaactggatcccttccttacaccttatacaaaagttaattcaagatggattaaagacttaaatgttagacctaaaaccataaaaaccctagaagaaaacttaggcaataccattcacgacataggcatgggcaaggacttcatgtctaaaacaccaaaagcaatggcaacaaaagccaaaattgacaaatgggatctaactaaactaaagagcttctgcacagcaaaagaaactaccatcagagtgaacaggcaacctacaaaatgggagaaaatttttgcaatctactcatgtgacaacgggctaatatccagaatctacaatgaactccaacaaatttacaaggaaaaaacaaacaaccccatcaaaaagtgggcaaaggatatgaacagacacttctcaaaagaagacatttatgcagccaaaagacacatgaaaaaatgctcatcatcactggccatcagagaaatgcaaatcaaaaccacaatgagataccgtctcacaccagttagaatggaaatcattaaaaagtcaggaaacaacaggtgctggagaggatgtggagaaataggaacacttttacactgttggtgggactgtaaactagttgaaccattgtggaagtcagtgtggtgattcctcagggatctagaactagaaataccatttgacccagccatcccattactgggtatatacccaaaggactataaatcatgccgctataaagacacatgcacacgtatgtttattgcggcactattcacaatagcaaagacttggaaccaacccaaatgtccaacaatgatagactggattaagaaaatgtggcacatatacaccatggaatactatgcagccataaaaaatgatgagttcatgtcctttgtagggacatggatgaaattggaaatcatcattctcagtaaactatcataaggacaaaaaaccaaacactgcatgttctcactcataggtgggaattgaacaatgagaacacatggacacaggaaggggaacatcacactctggggactgttgtgaggtggggggaggggggagggatagcattacgaaatatacctaatgctaaatgacgagttaatgggtgcagcacaccagcatggcacatgtatacatatgtaactaacctgcgcattgtgcacatataccctaaaacttgaagtataataataataaaataaataaataaataataaaatggttaaatttataatatattaatttatccacagctaaataaaaaacaattaaaagatccatttggaaaaggatacaccctattaaagtaagcctgatacatgagacaacagctaaaaaagaaaaaaaaaagtaacacaattgacaacctaaataaagaaaatacttacactgaaagaaaacataaacaagaccaagatcaggttataaaaaaagagttagtgtataatgtacttaaaaacattgcctctgtcaatgaataaaaagaataacatattagcgaagtgcattaaggaaggcaacagacgaataggaaaaataatgtgcaagatttagtaaataaatataggaaaactaaaatggccaggcacagttgctcactcctgtaatctcaatgttttgggagggcaagctgggcggatcacttgaggtcaggagttygagactaggctgtccaacatggtgaaaccctgtctctacaaaaaattagcggacttggtggtgcatgcctataatcccagtgaatmtggaggctgaggcatgagaatcacttgaaccaggaggcgggggttgtagtgagccgagattgcgccactccactccaccatgggtgacaaagtgagactctccctgaaaaaaagaaaagaaaagaaaagaaaatgaccctagacacattttagtatttacataatgtaaattatttaacacaacagtactgattaaactgtaataacaacgataaataatattgactggcttttgataagtataattctcaaatatgatcagaattagaatatattgctaaagaactttaggaaggtgttaattgaaaattctaattgtgagaattcagtgtccacaagagacatgttctatttcataatacattaatatatttccttatattagatttttctgaaggtttgtagaagtgcatcttgtactctgcagaggaataggatgacaaatgaactcagggttaattggaataattttaaaatgcacgttgattaaataagaaggcagcattgatttcacagcaactatatataactattcattgtggtttcataaacaacaaaaattgtaaccactaaacacactaattctgggcatcccttccttcgcttcgtgcaccatcaattcagtggccctttgcagtgagcacttgacatccgaaaaacaaaagaaaacctaaaaaacaaaatgaggaaccaactaaggtacacccttctcacttcagcagggctccccccacttgaccacattggggaaacctgcaaaagtaggaggattctctgcttccatcattccttctagattattctctcggaaagggaaaaagaagagaagagaagggaaagagaagggaacgggaggggaggggaggagaaagggagcggggaagggaaggtttgtcttcaaaaaatccaaccattggggctgtagcatggtggggggagcttgtaggaaggaaggaaggaatgcttgtcttcaaaaaatacaaccactggggctgtagtatggtgaggggagcttgtatttccgggaaacaggggaggtgtgtgtgggtattggaggagggtggctacagaatcctctatgaacctgctcaggtctcataaacaggaaaacaagccacttgcttgtgtgcaccacacttgtccctaggcagcacactccctcctgggaaagagatcaaagtttggattaaaagcagccaggtccgctaggcatggtggcccacacctgtaatctcagcactttgggaggccaaggtgggcagattgcttgaggccaggaatttgagaccagcctggcaaatatggtgaaaccctatctctactaaaattacaaaaattagcatgtaatctcagctactttgggaggctaaggcaagagaattgcttgaactcaggagacagaggtttcagggagccgagattgtgccactgcactccagcctgtgtgacagagtgagactctgtctcgaagaaaaaaaaaaaaagaaagaaaaaaagaaaggcagccaggtccaacaggcatctgcacattgttgacccatccagcagaacagggtcgagaaaggcatctgtcgggatggggcaggacaggacgagacagactattgtctgaggcatttggctacctctctgactggaacccaggcactcatatgtgcccaggaatgggtgggatattccggatgggttccacaggtggctctcctagagagacccacttggcatatttgatgatggagcatgcaggctccctggaacgtgatggctcactagttagtacccccggcatcttggtcattctgctgaagtgcatgggtagccaggcccccggcagtgctcagtttctcctgggcccctctgtgttcctgtggtgggtgtggaagtggaggttgaggctagagtgtctttgagggtggtggggcagctgtgccttgatttgatacagagctctctgggctcctcaagctaaactctggtgcttgccagatactcagctcagataatgaatgagacggtggaggacaaattattttgcccctttagggtctccaggcagacatgcaaaagcctggtgcagggccttcatacagagcccatgttgggtgcaaagccatgaccccgttgctctaaaggttgcatgtcctacccataccgcttggtacctggagagcagcatggaacacaatgctctcagaatattgaaaaggttttctgtgtctccactgagggatactcctgcctcaggccctgtggctgcctattgagccatcagcccattctggtgacctgcatgtgccaggacaatgtggtaatctcaaccaggagctccaggtttacataggcccccagtccttgggtaaatccttgtgtaagccagctgggtggctcccactttctcctggaatggcagccctatgatcccagtccacctgtggtgtcccagtggccatgattatgtgtcctttgtcattactttctgcactagaagcagccacaaaacctggagagggccaaaggaagggcaaaggctggatgccgaaacaggattcccacagggtctccagcctaccaggccttggtcattgggacccctgagtttggtggtcaacctgggacctagtggctgttttctttttctccccactttttctctttctccttcctatttttttttttcacatgggaaaaggcggaggacctcggggtggaggagcagggttacagttatagttagtgtttgtggagccctactgccatcaagcagaaacagtttctggcactgggatacagctgagcaccagtgctggggaaagcccaggagtgctaaacagatggcgacaagccgtccacaggctgaagcaggaggagagaggaactcctgactggcccttggcctgtgcttattcccaggatggcgccttggctccacagctctctctgaaagaaagggcaggcaggggcaccccaccatgggctcccctggcagtctccagggacttccaagcatgaatcgccccgcccccagcaccccgaagttcctttgttcccagggagaataagaaccccttggccccagcttggacccagccaatggcaccttggaactccccacaaaggagaccagagtaaacagccccagtctcgaccatcagtgcccagtggcttcccttatgcccatcacaagacagggtgtctctgcccactgggtagactggtcttgaggctgccgggttgttctgtcccagggcctctagagttgctgcttctccatgaggtcccaatggcaggtacacttccttcaagggctttgaaccccggtggggggaaaccctgccttgggctgagtctacccagcctggcacatcctcactgtttgttgtctgtgcctggaagaaggcaagtttccttgcagcctgtagttcagaaacaccttccactggatgtcactgtggctccacaaatggcagtcaccccttttctttcccccaccttgccttcctctccctccttttgctggcaaccaaacaaaacaaagaccagaaaacagaaacgggctgggtgcggtggctgacgcctgtaatcccagcactttgggaagccgaggcaggcagatcacttgaggtcaggagctcgagaccagcttgaccaacatggagaaaccctgtctctattaaaaatagaaaattagctgggcgtggtggcacatgcttgtaatcccaactacggggaggctgaggcaggagaatcgcttgaacccgggagacggaggttgtggtgagccgagattgcaccattgcactccagcctgggcaataagagtgaaactctgtctcaaaaaacaaacaaacaaacaaaacaaaataaaaaaaacaaagaaacaaaccggccaaagagcacccacctcatcttcagcattgctcctcacctacatggtcactttggggaaacttgccttcctccttccctctggattcttctttgtgcagggggtcccaatgaaccagcctatcctcaagaaatcccacccttggggctgtggcatgatgtggggaggttgcactggggaaggtgtgaggggctacagggtggcgggtgtgtgggtgtgtaggtctgcattccagccactgcagatttctctatgaatctgcataggcctcctaagaaggagactggcgcgtgcctagagaaaaagcaggaagataagaatgcaggaagatctggactgcatccttaggggtggcattgtgactctgattgtcagaggtctccgtttttaacgtttaactcccatcacatctcaactttttcctgtcttcacctgtgcttccaaatgtcctcaggcacatatatgtgtccctactcatactcactcacaagcgtctgcccaggcacctccactcataccygggtcctgttgtgcaggcaactctcagagggcagggttcttcagcttcccggttccatcttgttcatcttcctcatcccttgttgtctggctgcccaatatttgctggcggagggtgcgggatgtgttgggggtggagacagcagggagcagggcagcctcctggcccaacaggcctctgtgcacatgcagtgcagacctgggcataaggggctgacactttctcctggctggttggtggctcttcctctgtgaagccacagaaggtcactcgggttgccacctgtccatctgggacattctgcattcttgttcgctgtcatcctcattgctcacgttgattcttagtatacttttggagtttttcttccttcacttttttcttcttcactgtctttacttctcgtccacttctggtttggggaggtcaggattcgcctggaaggcagggtccggttggcaagcgaacatmtttagggagaacacgccttcttttcctcaggaaattagaaagacctcagttgactcctgccagatgtaatcggggtgcccctctcctttctgccctctctccctagtgccataggtggctgattacctcctttccctggtgtccttttcctctccgtttttcctctctcctcccatttctggggtcctacccttcattggccttgtagactaggggctcgtggccccttgcggtttgcagatgacatccagagggtatggtttagcctgcatctttgtcctctgtagcccctgcagacctatttgtggatcaaagcttttgatccgactcacaagggatcccatcaacaagaagcttcttggtggtgtgtcctttcactgggatgtcactgttgtctctttgtcactcgttatgtatgtcaccacgcattgaggcacccatgaactctatccttcaggacagctgaggtggcatgaagctgccatttcttgttctttttctccatctggttcttcttcctcttcctcctcttcctctttctttctcttttcttttcttttctttctttctttccacctcctcctcctttttcttcttcttttcttccctcctcctcctcctcctctctcttttcctttcactttcagatcttggcgagacaaatgttctatggagactgcttcttctgctccttggtaatgggggatgtccctctgcgtgctaggcaaggagaaagcttcacttttgttctgaaaggagcagagatgaaggtcacatgttcagttcctctggtcctctaaaaaaccacccatgtgttacttttaagtgaaatgtcattctgaatgcacttcctaccagtacctcacgattcatccttctaccttgttctccttgaagacgatctaataatgtaatcttggccagtaggagcctcagcaagttttcccccatttcctctccttccagtcaagccatgtgaacacaactatccggatttcagtgtatacaggcaggctgtctctgccatgtgccagtttacccactctcacacaggaaggcacccacaaaccatagacacagatacacatacacacactcactagggacctcagaaatgaaatcacaaacacacccgcacacagagacacatgcagacacacacaaacacacacatagacacacaaacaagaaacctcacaggggcacaggggtgcaggcccaagcattctcccacacagacacatacacaccaccacaggcacgagactgcctacaatttctcccacacaggttctaaatgtgcaaagggaacaggagacaggggagaattcctgactccaggcctgggccatcatgccattgattgatgggcaactctcgccttctcctgagaatcaatgtgggaagtctgttaacagataggatccagcagctggtgtaaaactggagcatcctgggtcaagctgcttaaaaaggaacctcactttgtgttagagacagagagagttcccttgggagccttggccctgtgtgatgccataagaatctgtggtgtgtggtggcattccccagcacccctgagccaccctcctcccacccccatctgtgtgaaacccaggacagcctgagcagagtcagacttgagcaagttgctgagtgtcctctctgagagatactcctgcttcaggccctgtggtttccagttgagcagtccacctattttgatgacctccatgtgtcagcccaaggcggtaaactctacctggagctccaggctttcgtaggacccccagtcctgcagcagaaccttgtgtaagccagctgggtgaccagcaccttgtcctggggcagtagccctatgatcctagtcctcctgtggtgtcccagtratgatcatgttttttgttgtttactttctgcacgggcaagagccatgaaacctgcagagagccaaaggaagggcaaaggctggctccctaaacaggattcccacaggatctccagcctactggtcctggtccttggtcacasggtcccatgagtttggtgatcaatctgggaccaggtgactgattcctttcactcctctgtctttttttttgtttctctttcctctttaccttttttcacatgggaaaaggcggaggccctggagttgaagtggcagggttacagttgtagttggcgtttgtggagccatactgccatcaagcggaaactgtatctagaaaccggaggcagctgggcacaagtgctggggaaaccccacgagcgcaaaagagatggcggcatggagcccccaggctgaagcaggacaagagaggaactccaagctggcccttggcctgtgctcattcccaggatgcctccctggttccacagctctctccgaaaaaaagggcaggtaggggcgacccaccatgggttcccctggtcatctccaggtactgctggtcctgggttgccacgtctccagtatcccgaagctcctttgttccccgggaggatcggggcccccttgccaacacgtggctccagccaagggaaccccggaactccccacaaaagacaccagagtaaacggcccccgtctcggccagtggcttcgtttatgtccatctcaacatggctgccgggccagctccgccctctgggctgactggtcttggggctgcctggctgttctgtcctggggcctctagagtagttgcttctccaaagcgtcccaatgccaggtacacttccttcaagggctcagaaccccggtgggggaaacccaggcttagacatagtctaagcacatcctcgctgatctctgttcctggcagaaggcaggtgtccgtgcatcctgttgtgttcagaaacaacttccactagatggcaatgtggctccacaaacagcagtcttgtctttcccttcccccattttctttccctctttctgtttttggtgccaaaaaccaaaacaaacaccaaaaaaaaaaaaaaaaaaaaaaaaagaaactggcctaggagcacccatctcacctacagcagggcttcccatctatgtggtcactttgggggaaccggcaacagtaggatggggtaggggtgggggccacagggagcagggcagcttcctggcccaacaggcctctgtgcccacgcggtgcagacccgggcttgaggggctgatgctttctcctggctggtggctcttcctctgtgaggccacaagaggccactcatagtgctgccagctgtccatctgaggcactttgcattgcagttcgctgtcaatctcattgctcactgattctttgtgtacttttggagtttttctcccttcacttttttcttcttcattctctttactttttctccacttctgctccaggagcagactggaaggcagggtcagctgggcgcggggacaccgttagggaaaacaggcttacttttcctaaggaaattagtaggactctagctgacccctgcgaggagaaattggcgtttccctctcctttctgccctgtctccatattgcagtgggtggctgattatctcttttctctggtgtccaattcctccccgtttttcatcttattcttttttgggcggtccttccctgccttggccttgtagccttggggcttggtagccccttgcagtcagctgatgacatcttcagggcaaggttcagccagcacctgtgttctctgtagcttctgcaggcctacttgtggatcaaagcttttgatcttactcaggaaataccccatcaacaagacgcttcctggttgtgtgtcctttaagccggatgtcagaagtggctccgtgcccctcgttgtatgtcaccacgcgttgaggccctcctaaactagatccttcgggacagctacagtggcatggacctctcacttcctgttctccttctgattcttcttcctcttcctcctcctacccctcttctttaattcttctccttctcctccttctcctcttgctcctcctcctccaactccttcttatcytcctactcctcctttttctttttcttctttttcctccttctactcctcctccccctccccctgcacttccttctcctttgcctctttttctttttttgcttttgcttctgcttctgattctgcttctgtttttcctttcacttgcggatctgggtgggcacgtgttctagcagactgcttcttcttttgctccttggtgatgtgggatgtccctctgcagaattaggcctggagaaagcttcacattcgttctttaaggagcacagatgaaggtcatgagtttagtccctctggtccaccaaaaggctacccacgtgttacttttaagtgaaatgtcatggtgaacgcaccctttacccaatacctcatggctcattgttatttcccattctccttctggatgctgtaagtgtaatcctgagccagtaggagccttggcaagttgtttcctaactcctttttttccagtcaagccatgtgaacacatcaatctgaatttcagtgtgtgcaggcagggtgtctctgccacgtgttcatttgcycacatttcagtgtgtgcaggcagggtgtctctgccacgtgttcatttgcccactctcactcacacagggaggcacacacagacacacatgcaggcacttacaagagacccccagaagaagaaataaaatcacaaacacacacacagagatamatgcacacccagacaaaaacacgcttacacatacccacacaaacacacacatacacacacataaagtaagctcacaaaatcaaaggggtaggggcccaagcattatgggacacaaacacacatcgccacaggcatgcgactgcccacattctcttcgacaggggttcgaaatatgcaaaggggaaagggagacagaggagcattcctgcctccaggcctgagtcattatgccatttattgggcaactagggccttctcctgagaatgaattcgggaagtctgttatcagataggctcaagcagcaggcatgaaactggagcatcctgggtcaagctgcttaaaaagggcccccaagccttgtscctgtgtgatgccatgagaagctgtggtacttggtggccttccccagcctctctgagccaccctcctcccaaccctacctctgtgaaagccgagacagcctgagcagagtcagtcttgagtgagttgctgaatgtccccgctgagggagactcctgcctcaggccctgtggctgcctgttgagctgtctatccgttcttcggacctccatgtgccatcccaaggtggtaaactctaactgcaactccaggctttgggaggacccccaattctccagcaaaaccttgtgtaagccagctgggtggccactgccttgtacttgggcggcagccctgtgatcccagtccttctgccgttttccagtagccatgattatacgtcctttctcttttactttctacaccagcgaaagcgatgaaacctggagaggtccaaaggaaagtcaaaggcttgctgcctccacagcgttccgacaaggtctccagcctactgatccttgatcctagggtccccttaagaggtgaaagtctgatggcagccctggcagccctcgctcgctctcggcgccccctcggcattggcgtccactctggccgcccttgaggagcccctcagcccgccgctacactgtgggagcccctgtctccactggccaaggtcggagccggctccctcagcttgcggggaggtgtggagggagagccgcgggcggtaacacgagctactcgccgcgcttgygggccaccrggagttgccggtcggcatgagctcggcgggccccgcactccgagcagccagttggacctgcctgcccagggcagtgaggggcttagcaactgggccagcagctactgtgctccacttctcgcctatctcttctccttaactttcttttataattatgttttctccttcctctttgcttttttcacacgagaaagggcggaggccctcggattggaggggcagggttgtggttgtacttggcatttgtggtgccatactgccatcaagcggaaaccgtttctggaaaccggaggctgtagggcacaagtactggggaaaggccaggagcccaaaagggagggtggtgtgggaccccagactgaagcgagacgagagaggaactcctcgctggcccttggcctgggctcattcccaggatggcgccctggctccgcagctgtatgtaagaacgggcaggcggggcggcccgccatggcttcccctggcagtctccaggaactgscaggcatgggtcgccccacactcagcactccgaaacttttttatttcccggcaagatagaggctttctggccccactgtggccccagccaagggcatcgcggagctgcccacaaaagcgaccagagtaaacggccccgttctctggctgtcagtggccagtggcttcccttatgcgtatctcaaaatggctgccggggcagctgcaccctgtgggctgactggtcttcgggatgcctggctgatctgtctcggggcctctagagtagctgcttctccaaggggtcccaatggcaggtccgctttgttctagggctctacgcccgggtcggggaaaccctggcttaggcagagtccaccccgccccgcccatcctcactcttctcggtgcctggcagaaggcaagtgtccctgtccctgcagcctgttgtcatgtccagaatcaccttccgctggatggcactgtggctccgccaatggcggtcacgtcttttccttcccccaccttgcctttatctttctccatctgctgccgacagaataaaacaaacgccaaaaacaaaaaaagccaagaaacaacgaaagataccggccaaggagcacccacctcacctacagcagggctctccacctaggtggtcactttggggaagcctgcaacggtaggagggttctctgcctccctccttccctctggattcttctccgggcagggttcccagtgaaccagagaacgtcaagaaattccacccttagggctgtggctcggtgggggtaggtcgcactgggggcagtgtgagggggtacagggggagggatatgtgggtgtgtgggtctgcatgcgggccgctgcagattcctctaggaatctgcgcaggccgcctgagcaagagaccaggctgcatgcctgtgcgcaccacacttgtccctaggtagcactcttcctcttggggaagggatcaaagttggatggaaagcagccaggtccagcaggcatccgcaccttgttgagccatggagctgcagggagtcgggccggatgtttcttgggatgatgggactggacgggacggactcctgtctgaggccttcagctccctccctctctggagcccaggcactcgtctgtgcacagtggtgggaggagcatgccgggtgggtttcacaggtggctctcctggagagagagcctcttggcatgtctgacggagcacgcgtgctcagtggaacgtggtggttcaccacttagttgccaggcatcttggtccttgtacccaagtgcatgggtagccagggcccagcctgccccacttcgcctggaccccgtctgatttcctgtgctgcgtgtggaggtggaggttgagccttgagtattttgggggagaaggggctcgggcggggggctgtgttttggtttggtagagggctcactgggctctcgagctaaaccctggtgcttgccggatattcagcccagaaaatgcatgagaccgtcaaggacaaattatgccgcccataattagggtctccaggcagacataagaaagcctgatgcgggacatcatacagtgcccatgttgggatgcgaagccgcgaccgccttgctctaaaggttgcataggctactcatgccgctgggtgcctggacagcagcatggaacacaacgctccccgaatattgcaaatgttttctgtcttggcttgttacaaatcttcctggatgtgtaggccaccctggggacgagcagcccttcttagggcagaaaattcaccccacgggtgatgattcccacgctgggggtgtgtgaaccactctcacaaggaggaatgtcaatctcgtgagcgggcctgcactctcacggcattccgggcagaagaaccacatgaccatggaacaggagtcaccccctttctgtcacttgtcaacaaatgcggatttttttttttttttttttttttttttcctcatatgtaggtagcatgcaccagggtgcgcctctggcggtgcctagggagaacgcgagaagaaaagaatgcaggaagatctggactgcgtctttagggttggcactgggactgtgagtgtcagaggtcctcggttttaacttttaactcccatcacatctcaannnnnnnnnnnnnnnnnnnnnnnnnnnnnnnnnnnnnnnnnnnnnnnnnnnnnnnnnnnnnnnnnnnnnnnnnnnnnnnnnnnnnnnnnnnnnnnnnnnnnnnnnnnnnnnnnnnnnnnnnnnnnnnnnnnnnnnnnnnnnnnnnnnnnnnnnnnnnnnnnnnnnnnnnnnnnnnnnnnnnnnnnnnnnnnnnnnnnnnnnnnnnnnnnnnnnnnnnnnnnnnnnnnnnnnnnnnnnnnnnnnnnnnnnnnnnnnnnnnnnnnnnnnnnnnnnnnnnnnnnnnnnnnnnnnnnnnnnnnnnnnnnnnnnnnnnnnnnnnnnnnnnnnnnnnnnnnnnnnnnnnnnnnnnnnnnnnnnnnnnnnnnnnnnnnnnnnnnnnnnnnnnnnnnnnnnnnnnnnnnnnnnnnnnnnnnnnnnnnnnnnnnnnnnnnnnnnnnnnnnnnnnnnnnnnnnnnnnnnnnnnnnnnnnnnnnnnnnnnnnnnnnnnnnnnnnnnnnnnnnnnnnnnnnnnnnnnnnnnnnnnnnnnnnnnnnnnnnnnnnnnnnnnnnnnnnnnnnnnnnnnnnnnnnnnnnnnnnnnnnnnnnnnnnnnnnnnnnnnnnnnnnnnnnnnnnnnnnnnnnnnnnnnnnnnnnnnnnnnnnnnnnnnnnnnnnnnnnnnnnnnnnnnnnnnnnnnnnnnnnnnnnnnnnnnnnnnnnnnnnnnnnnnnnnnnnnnnnnnnnnnnnnnnnnnnnnnnnnnnnnnnnnnnnnnnnnnnnnnnnnnnnnnnnnnnnnnnnnnnnnnnnnnnnnnnnnnnnnnnnnnnnnnnnnnnnnnnnnnnnnnnnnnnnnnnnnnnnnnnnnnnnnnnnnnnnnnnnnnnnnnnnnnnnnnnnnnnnnnnnnnnnnnnnnnnnnnnnnnnnnnnnnnnnnnnnnnnnnnnnnnnnnnnnnnnnnnnnnnnnnnnnnnnnnnnnnnnnnnnnnnnnnnnnnnnnnnnnnnnnnnnnnnnnnnnnnnnnnnnnnnnnnnnnnnnnnnnnnnnnnnnnnnnnnnnnnnnnnnnnnnnnnnnnnnnnnnnnnnnnnnnnnnnnnnnnnnnnnnnnnnnnnnnnnnnnnnnnnnnnnnnnnnnnnnnnnnnnnnnnnnnnnnnnnnnnnnnnnnnnnnnnnnnnnnnnnnnnnnnnnnnnnnnnnnnnnnnnnnnnnnnnnnnnnnnnnnnnnnnnnnnnnnnnnnnnnnnnnnnnnnnnnnnnnnnnnnnnnnnnnnnnnnnnnnnnnnnnnnnnnnnnnnnnnnnnnnnnnnnnnnnnnnnnnnnnnnnnnnnnnnnnnnnnnnnnnnnnnnnnnnnnnnnnnnnnnnnnnnnnnnnnnnnnnnnnnnnnnnnnnnnnnnnnnnnnnnnnnnnnnnnnnnnnnnnnnnnnnnnnnnnnnnnnnnnnnnnnnnnnnnnnnnnnnnnnnnnnnnnnnnnnnnnnnnnnnnnnnnnnnnnnnnnnnnnnnnnnnnnnnnnnnnnnnnnnnnnnnnnnnnnnnnnnnnnnnnnnnnnnnnnnnnnnnnnnnnnnnnnnnnnnnnnnnnnnnnnnnnnnnnnnnnnnnnnnnnnnnnnnnnnnnnnnnnnnnnnnnnnnnnnnnnnnnnnnnnnnnnnnnnnnnnnnnnnnnnnnnnnnnnnnnnnnnnnnnnnnnnnnnnnnnnnnnnnnnnnnnnnnnnnnnnnnnnnnnnnnnnnnnnnnnnnnnnnnnnnnnnnnnnnnnnnnnnnnnnnnnnnnnnnnnnnnnnnnnnnnnnnnnnnnnnnnnnnnnnnnnnnnnnnnnnnnnnnnnnnnnnnnnnnnnnnnnnnnnnnnnnnnnnnnnnnnnnnnnnnnnnnnnnnnnnnnnnnnnnnnnnnnnnnnnnnnnnnnnnnnnnnnnnnnnnnnnnnnnnnnnnnnnnnnnnnnnnnnnnnnnnnnnnnnnnnnnnnnnnnnnnnnnnnnnnnnnnnnnnnnnnnnnnnnnnnnnnnnnnnnnnnnnnnnnnnnnnnnnnnnnnnnnnnnnnnnnnnnnnnnnnnnnnnnnnnnnnnnnnnnnnnnnnnnnnnnnnnnnnnnnnnnnnnnnnnnnnnnnnnnnnnnnnnnnnnnnnnnnnnnnnnnnnnnnnnnnnnnnnnnnnnnnnnnnnnnnnnnnnnnnnnnnnnnnnnnnnnnnnnnnnnnnnnnnnnnnnnnnnnnnnnnnnnnnnnnnnnnnnnnnnnnnnnnnnnnnnnnnnnnnnnnnnnnnnnnnnnnnnnnnnnnnnnnnnnnnnnnnnnnnnnnnnnnnnnnnnnnnnnnnnnnnnnnnnnnnnnnnnnnnnnnnnnnnnnnnnnnnnnnnnnnnnnnnnnnnnnnnnnnnnnnnnnnnnnnnnnnnnnnnnnnnnnnnnnnnnnnnnnnnnnnnnnnnnnnnnnnnnnnnnnnnnnnnnnnnnnnnnnnnnnnnnnnnnnnnnnnnnnnnnnnnnnnnnnnnnnnnnnnnnnnnnnnnnnnnnnnnnnnnnnnnnnnnnnnnnnnnnnnnnnnnnnnnnnnnnnnnnnnnnnnnnnnnnnnnnnnnnnnnnnnnnnnnnnnnnnnnnnnnnnnnnnnnnnnnnnnnnnnnnnnnnnnnnnnnnnnnnnnnnnnnnnnnnnnnnnnnnnnnnnnnnnnnnnnnnnnnnnnnnnnnnnnnnnnnnnnnnnnnnnnnnnnnnnnnnnnnnnnnnnnnnnnnnnnnnnnnnnnnnnnnnnnnnnnnnnnnnnnnnnnnnnnnnnnnnnnnnnnnnnnnnnnnnnnnnnnnnnnnnnnnnnnnnnnnnnnnnnnnnnnnnnnnnnnnnnnnnnnnnnnnnnnnnnnnnnnnnnnnnnnnnnnnnnnnnnnnnnnnnnnnnnnnnnnnnnnnnnnnnnnnnnnnnnnnnnnnnnnnnnnnnnnnnnnnnnnnnnnnnnnnnnnnnnnnnnnnnnnnnnnnnnnnnnnnnnnnnnnnnnnnnnnnnnnnnnnnnnnnnnnnnnnnnnnnnnnnnnnnnnnnnnnnnnnnnnnnnnnnnnnnnnnnnnnnnnnnnnnnnnnnnnnnnnnnnnnnnnnnnnnnnnnnnnnnnnnnnnnnnnnnnnnnnnnnnnnnnnnnnnnnnnnnnnnnnnnnnnnnnnnnnnnnnnnnnnnnnnnnnnnnnnnnnnnnnnnnnnnnnnnnnnnnnnnnnnnnnnnnnnnnnnnnnnnnnnnnnnnnnnnnnnnnnnnnnnnnnnnnnnnnnnnnnnnnnnnnnnnnnnnnnnnnnnnnnnnnnnnnnnnnnnnnnnnnnnnnnnnnnnnnnnnnnnnnnnnnnnnnnnnnnnnnnnnnnnnnnnnnnnnnnnnnnnnnnnnnnnnnnnnnnnnnnnnnnnnnnnnnnnnnnnnnnnnnnnnnnnnnnnnnnnnnnnnnnnnnnnnnnnnnnnnnnnnnnnnnnnnnnnnnnnnnnnnnnnnnnnnnnnnnnnnnnnnnnnnnnnnnnnnnnnnnnnnnnnnnnnnnnnnnnnnnnnnnnnnnnnnnnnnnnnnnnnnnnnnnnnnnnnnnnnnnnnnnnnnnnnnnnnnnnnnnnnnnnnnnnnnnnnnnnnnnnnnnnnnnnnnnnnnnnnnnnnnnnnnnnnnnnnnnnnnnnnnnnnnnnnnnnnnnnnnnnnnnnnnnnnnnnnnnnnnnnnnnnnnnnnnnnnnnnnnnnnnnnnnnnnnnnnnnnnnnnnnnnnnnnnnnnnnnnnnnnnnnnnnnnnnnnnnnnnnnnnnnnnnnnnnnnnnnnnnnnnnnnnnnnnnnnnnnnnnnnnnnnnnnnnnnnnnnnnnnnnnnnnnnnnnnnnnnnnnnnnnnnnnnnnnnnnnnnnnnnnnnnnnnnnnnnnnnnnnnnnnnnnnnnnnnnnnnnnnnnnnnnnnnnnnnnnnnnnnnnnnnnnnnnnnnnnnnnnnnnnnnnnnnnnnnnnnnnnnnnnnnnnnnnnnnnnnnnnnnnnnnnnnnnnnnnnnnnnnnnnnnnnnnnnnnnnnnnnnnnnnnnnnnnnnnnnnnnnnnnnnnnnnnnnnnnnnnnnnnnnnnnnnnnnnnnnnnnnnnnnnnnnnnnnnnnnnnnnnnnnnnnnnnnnnnnnnnnnnnnnnnnnnnnnnnnnnnnnnnnnnnnnnnnnnnnnnnnnnnnnnnnnnnnnnnnnnnnnnnnnnnnnnnnnnnnnnnnnnnnnnnnnnnnnnnnnnnnnnnnnnnnnnnnnnnnnnnnnnnnnnnnnnnnnnnnnnnnnnnnnnnnnnnnnnnnnnnnnnnnnnnnnnnnnnnnnnnnnnnnnnnnnnnnnnnnnnnnnnnnnnnnnnnnnnnnnnnnnnnnnnnnnnnnnnnnnnnnnnnnnnnnnnnnnnnnnnnnnnnnnnnnnnnnnnnnnnnnnnnnnnnnnnnnnnnnnnnnnnnnnnnnnnnnnnnnnnnnnnnnnnnnnnnnnnnnnnnnnnnnnnnnnnnnnnnnnnnnnnnnnnnnnnnnnnnnnnnnnnnnnnnnnnnnnnnnnnnnnnnnnnnnnnnnnnnnnnnnnnnnnnnnnnnnnnnnnnnnnnnnnnnnnnnnnnnnnnnnnnnnnnnnnnnnnnnnnnnnnnnnnnnnnnnnnnnnnnnnnnnnnnnnnnnnnnnnnnnnnnnnnnnnnnnnnnnnnnnnnnnnnnnnnnnnnnnnnnnnnnnnnnnnnnnnnnnnnnnnnnnnnnnnnnnnnnnnnnnnnnnnnnnnnnnnnnnnnnnnnnnnnnnnnnnnnnnnnnnnnnnnnnnnnnnnnnnnnnnnnnnnnnnnnnnnnnnnnnnnnnnnnnnnnnnnnnnnnnnnnnnnnnnnnnnnnnnnnnnnnnnnnnnnnnnnnnnnnnnnnnnnnnnnnnnnnnnnnnnnnnnnnnnnnnnnnnnnnnnnnnnnnnnnnnnnnnnnnnnnnnnnnnnnnnnnnnnnnnnnnnnnnnnnnnnnnnnnnnnnnnnnnnnnnnnnnnnnnnnnnnnnnnnnnnnnnnnnnnnnnnnnnnnnnnnnnnnnnnnnnnnnnnnnnnnnnnnnnnnnnnnnnnnnnnnnnnnnnnnnnnnnnnnnnnnnnnnnnnnnnnnnnnnnnnnnnnnnnnnnnnnnnnnnnnnnnnnnnnnnnnnnnnnnnnnnnnnnnnnnnnnnnnnnnnnnnnnnnnnnnnnnnnnnnnnnnnnnnnnnnnnnnnnnnnnnnnnnnnnnnnnnnnnnnnnnnnnnnnnnnnnnnnnnnnnnnnnnnnnnnnnnnnnnnnnnnnnnnnnnnnnnnnnnnnnnnnnnnnnnnnnnnnnnnnnnnnnnnnnnnnnnnnnnnnnnnnnnnnnnnnnnnnnnnnnnnnnnnnnnnnnnnnnnnnnnnnnnnnnnnnnnnnnnnnnnnnnnnnnnnnnnnnnnnnnnnnnnnnnnnnnnnnnnnnnnnnnnnnnnnnnnnnnnnnnnnnnnnnnnnnnnnnnnnnnnnnnnnnnnnnnnnnnnnnnnnnnnnnnnnnnnnnnnnnnnnnnnnnnnnnnnnnnnnnnnnnnnnnnnnnnnnnnnnnnnnnnnnnnnnnnnnnnnnnnnnnnnnnnnnnnnnnnnnnnnnnnnnnnnnnnnnnnnnnnnnnnnnnnnnnnnnnnnnnnnnnnnnnnnnnnnnnnnnnnnnnnnnnnnnnnnnnnnnnnnnnnnnnnnnnnnnnnnnnnnnnnnnnnnnnnnnnnnnnnnnnnnnnnnnnnnnnnnnnnnnnnnnnnnnnnnnnnnnnnnnnnnnnnnnnnnnnnnnnnnnnnnnnnnnnnnnnnnnnnnnnnnnnnnnnnnnnnnnnnnnnnnnnnnnnnnnnnnnnnnnnnnnnnnnnnnnnnnnnnnnnnnnnnnnnnnnnnnnnnnnnnnnnnnnnnnnnnnnnnnnnnnnnnnnnnnnnnnnnnnnnnnnnnnnnnnnnnnnnnnnnnnnnnnnnnnnnnnnnnnnnnnnnnnnnnnnnnnnnnnnnnnnnnnnnnnnnnnnnnnnnnnnnnnnnnnnnnnnnnnnnnnnnnnnnnnnnnnnnnnnnnnnnnnnnnnnnnnnnnnnnnnnnnnnnnnnnnnnnnnnnnnnnnnnnnnnnnnnnnnnnnnnnnnnnnnnnnnnnnnnnnnnnnnnnnnnnnnnnnnnnnnnnnnnnnnnnnnnnnnnnnnnnnnnnnnnnnnnnnnnnnnnnnnnnnnnnnnnnnnnnnnnnnnnnnnnnnnnnnnnnnnnnnnnnnnnnnnnnnnnnnnnnnnnnnnnnnnnnnnnnnnnnnnnnnnnnnnnnnnnnnnnnnnnnnnnnnnnnnnnnnnnnnnnnnnnnnnnnnnnnnnnnnnnnnnnnnnnnnnnnnnnnnnnnnnnnnnnnnnnnnnnnnnnnnnnnnnnnnnnnnnnnnnnnnnnnnnnnnnnnnnnnnnnnnnnnnnnnnnnnnnnnnnnnnnnnnnnnnnnnnnnnnnnnnnnnnnnnnnnnnnnnnnnnnnnnnnnnnnnnnnnnnnnnnnnnnnnnnnnnnnnnnnnnnnnnnnnnnnnnnnnnnnnnnnnnnnnnnnnnnnnnnnnnnnnnnnnnnnnnnnnnnnnnnnnnnnnnnnnnnnnnnnnnnnnnnnnnnnnnnnnnnnnnnnnnnnnnnnnnnnnnnnnnnnnnnnnnnnnnnnnnnnnnnnnnnnnnnnnnnnnnnnnnnnnnnnnnnnnnnnnnnnnnnnnnnnnnnnnnnnnnnnnnnnnnnnnnnnnnnnnnnnnnnnnnnnnnnnnnnnnnnnnnnnnnnnnnnnnnnnnnnnnnnnnnnnnnnnnnnnnnnnnnnnnnnnnnnnnnnnnnnnnnnnnnnnnnnnnnnnnnnnnnnnnnnnnnnnnnnnnnnnnnnnnnnnnnnnnnnnnnnnnnnnnnnnnnnnnnnnnnnnnnnnnnnnnnnnnnnnnnnnnnnnnnnnnnnnnnnnnnnnnnnnnnnnnnnnnnnnnnnnnnnnnnnnnnnnnnnnnnnnnnnnnnnnnnnnnnnnnnnnnnnnnnnnnnnnnnnnnnnnnnnnnnnnnnnnnnnnnnnnnnnnnnnnnnnnnnnnnnnnnnnnnnnnnnnnnnnnnnnnnnnnnnnnnnnnnnnnnnnnnnnnnnnnnnnnnnnnnnnnnnnnnnnnnnnnnnnnnnnnnnnnnnnnnnnnnnnnnnnnnnnnnnnnnnnnnnnnnnnnnnnnnnnnnnnnnnnnnnnnnnnnnnnnnnnnnnnnnnnnnnnnnnnnnnnnnnnnnnnnnnnnnnnnnnnnnnnnnnnnnnnnnnnnnnnnnnnnnnnnnnnnnnnnnnnnnnnnnnnnnnnnnnnnnnnnnnnnnnnnnnnnnnnnnnnnnnnnnnnnnnnnnnnnnnnnnnnnnnnnnnnnnnnnnnnnnnnnnnnnnnnnnnnnnnnnnnnnnnnnnnnnnnnnnnnnnnnnnnnnnnnnnnnnnnnnnnnnnnnnnnnnnnnnnnnnnnnnnnnnnnnnnnnnnnnnnnnnnnnnnnnnnnnnnnnnnnnnnnnnnnnnnnnnnnnnnnnnnnnnnnnnnnnnnnnnnnnnnnnnnnnnnnnnnnnnnnnnnnnnnnnnnnnnnnnnnnnnnnnnnnnnnnnnnnnnnnnnnnnnnnnnnnnnnnnnnnnnnnnnnnnnnnnnnnnnnnnnnnnnnnnnnnnnnnnnnnnnnnnnnnnnnnnnnnnnnnnnnnnnnnnnnnnnnnnnnnnnnnnnnnnnnnnnnnnnnnnnnnnnnnnnnnnnnnnnnnnnnnnnnnnnnnnnnnnnnnnnnnnnnnnnnnnnnnnnnnnnnnnnnnnnnnnnnnnnnnnnnnnnnnnnnnnnnnnnnnnnnnnnnnnnnnnnnnnnnnnnnnnnnnnnnnnnnnnnnnnnnnnnnnnnnnnnnnnnnnnnnnnnnnnnnnnnnnnnnnnnnnnnnnnnnnnnnnnnnnnnnnnnnnnnnnnnnnnnnnnnnnnnnnnnnnnnnnnnnnnnnnnnnnnnnnnnnnnnnnnnnnnnnnnnnnnnnnnnnnnnnnnnnnnnnnnnnnnnnnnnnnnnnnnnnnnnnnnnnnnnnnnnnnnnnnnnnnnnnnnnnnnnnnnnnnnnnnnnnnnnnnnnnnnnnnnnnnnnnnnnnnnnnnnnnnnnnnnnnnnnnnnnnnnnnnnnnnnnnnnnnnnnnnnnnnnnnnnnnnnnnnnnnnnnnnnnnnnnnnnnnnnnnnnnnnnnnnnnnnnnnnnnnnnnnnnnnnnnnnnnnnnnnnnnnnnnnnnnnnnnnnnnnnnnnnnnnnnnnnnnnnnnnnnnnnnnnnnnnnnnnnnnnnnnnnnnnnnnnnnnnnnnnnnnnnnnnnnnnnnnnnnnnnnnnnnnnnnnnnnnnnnnnnnnnnnnnnnnnnnnnnnnnnnnnnnnnnnnnnnnnnnnnnnnnnnnnnnnnnnnnnnnnnnnnnnnnnnnnnnnnnnnnnnnnnnnnnnnnnnnnnnnnnnnnnnnnnnnnnnnnnnnnnnnnnnnnnnnnnnnnnnnnnnnnnnnnnnnnnnnnnnnnnnnnnnnnnnnnnnnnnnnnnnnnnnnnnnnnnnnnnnnnnnnnnnnnnnnnnnnnnnnnnnnnnnnnnnnnnnnnnnnnnnnnnnnnnnnnnnnnnnnnnnnnnnnnnnnnnnnnnnnnnnnnnnnnnnnnnnnnnnnnnnnnnnnnnnnnnnnnnnnnnnnnnnnnnnnnnnnnnnnnnnnnnnnnnnnnnnnnnnnnnnnnnnnnnnnnnnnnnnnnnnnnnnnnnnnnnnnnnnnnnnnnnnnnnnnnnnnnnnnnnnnnnnnnnnnnnnnnnnnnnnnnnnnnnnnnnnnnnnnnnnnnnnnnnnnnnnnnnnnnnnnnnnnnnnnnnnnnnnnnnnnnnnnnnnnnnnnnnnnnnnnnnnnnnnnnnnnnnnnnnnnnnnnnnnnnnnnnnnnnnnnnnnnnnnnnnnnnnnnnnnnnnnnnnnnnnnnnnnnnnnnnnnnnnnnnnnnnnnnnnnnnnnnnnnnnnnnnnnnnnnnnnnnnnnnnnnnnnnnnnnnnnnnnnnnnnnnnnnnnnnnnnnnnnnnnnnnnnnnnnnnnnnnnnnnnnnnnnnnnnnnnnnnnnnnnnnnnnnnnnnnnnnnnnnnnnnnnnnnnnnnnnnnnnnnnnnnnnnnnnnnnnnnnnnnnnnnnnnnnnnnnnnnnnnnnnnnnnnnnnnnnnnnnnnnnnnnnnnnnnnnnnnnnnnnnnnnnnnnnnnnnnnnnnnnnnnnnnnnnnnnnnnnnnnnnnnnnnnnnnnnnnnnnnnnnnnnnnnnnnnnnnnnnnnnnnnnnnnnnnnnnnnnnnnnnnnnnnnnnnnnnnnnnnnnnnnnnnnnnnnnnnnnnnnnnnnnnnnnnnnnnnnnnnnnnnnnnnnnnnnnnnnnnnnnnnnnnnnnnnnnnnnnnnnnnnnnnnnnnnnnnnnnnnnnnnnnnnnnnnnnnnnnnnnnnnnnnnnnnnnnnnnnnnnnnnnnnnnnnnnnnnnnnnnnnnnnnnnnnnnnnnnnnnnnnnnnnnnnnnnnnnnnnnnnnnnnnnnnnnnnnnnnnnnnnnnnnnnnnnnnnnnnnnnnnnnnnnnnnnnnnnnnnnnnnnnnnnnnnnnnnnnnnnnnnnnnnnnnnnnnnnnnnnnnnnnnnnnnnnnnnnnnnnnnnnnnnnnnnnnnnnnnnnnnnnnnnnnnnnnnnnnnnnnnnnnnnnnnnnnnnnnnnnnnnnnnnnnnnnnnnnnnnnnnnnnnnnnnnnnnnnnnnnnnnnnnnnnnnnnnnnnnnnnnnnnnnnnnnnnnnnnnnnnnnnnnnnnnnnnnnnnnnnnnnnnnnnnnnnnnnnnnnnnnnnnnnnnnnnnnnnnnnnnnnnnnnnnnnnnnnnnnnnnnnnnnnnnnnnnnnnnnnnnnnnnnnnnnnnnnnnnnnnnnnnnnnnnnnnnnnnnnnnnnnnnnnnnnnnnnnnnnnnnnnnnnnnnnnnnnnnnnnnnnnnnnnnnnnnnnnnnnnnnnnnnnnnnnnnnnnnnnnnnnnnnnnnnnnnnnnnnnnnnnnnnnnnnnnnnnnnnnnnnnnnnnnnnnnnnnnnnnnnnnnnnnnnnnnnnnnnnnnnnnnnnnnnnnnnnnnnnnnnnnnnnnnnnnnnnnnnnnnnnnnnnnnnnnnnnnnnnnnnnnnnnnnnnnnnnnnnnnnnnnnnnnnnnnnnnnnnnnnnnnnnnnnnnnnnnnnnnnnnnnnnnnnnnnnnnnnnnnnnnnnnnnnnnnnnnnnnnnnnnnnnnnnnnnnnnnnnnnnnnnnnnnnnnnnnnnnnnnnnnnnnnnnnnnnnnnnnnnnnnnnnnnnnnnnnnnnnnnnnnnnnnnnnnnnnnnnnnnnnnnnnnnnnnnnnnnnnnnnnnnnnnnnnnnnnnnnnnnnnnnnnnnnnnnnnnnnnnnnnnnnnnnnnnnnnnnnnnnnnnnnnnnnnnnnnnnnnnnnnnnnnnnnnnnnnnnnnnnnnnnnnnnnnnnnnnnnnnnnnnnnnnnnnnnnnnnnnnnnnnnnnnnnnnnnnnnnnnnnnnnnnnnnnnnnnnnnnnnnnnnnnnnnnnnnnnnnnnnnnnnnnnnnnnnnnnnnnnnnnnnnnnnnnnnnnnnnnnnnnnnnnnnnnnnnnnnnnnnnnnnnnnnnnnnnnnnnnnnnnnnnnnnnnnnnnnnnnnnnnnnnnnnnnnnnnnnnnnnnnnnnnnnnnnnnnnnnnnnnnnnnnnnnnnnnnnnnnnnnnnnnnnnnnnnnnnnnnnnnnnnnnnnnnnnnnnnnnnnnnnnnnnnnnnnnnnnnnnnnnnnnnnnnnnnnnnnnnnnnnnnnnnnnnnnnnnnnnnnnnnnnnnnnnnnnnnnnnnnnnnnnnnnnnnnnnnnnnnnnnnnnnnnnnnnnnnnnnnnnnnnnnnnnnnnnnnnnnnnnnnnnnnnnnnnnnnnnnnnnnnnnnnnnnnnnnnnnnnnnnnnnnnnnnnnnnnnnnnnnnnnnnnnnnnnnnnnnnnnnnnnnnnnnnnnnnnnnnnnnnnnnnnnnnnnnnnnnnnnnnnnnnnnnnnnnnnnnnnnnnnnnnnnnnnnnnnnnnnnnnnnnnnnnnnnnnnnnnnnnnnnnnnnnnnnnnnnnnnnnnnnnnnnnnnnnnnnnnnnnnnnnnnnnnnnnnnnnnnnnnnnnnnnnnnnnnnnnnnnnnnnnnnnnnnnnnnnnnnnnnnnnnnnnnnnnnnnnnnnnnnnnnnnnnnnnnnnnnnnnnnnnnnnnnnnnnnnnnnnnnnnnnnnnnnnnnnnnnnnnnnnnnnnnnnnnnnnnnnnnnnnnnnnnnnnnnnnnnnnnnnnnnnnnnnnnnnnnnnnnnnnnnnnnnnnnnnnnnnnnnnnnnnnnnnnnnnnnnnnnnnnnnnnnnnnnnnnnnnnnnnnnnnnnnnnnnnnnnnnnnnnnnnnnnnnnnnnnnnnnnnnnnnnnnnnnnnnnnnnnnnnnnnnnnnnnnnnnnnnnnnnnnnnnnnnnnnnnnnnnnnnnnnnnnnnnnnnnnnnnnnnnnnnnnnnnnnnnnnnnnnnnnnnnnnnnnnnnnnnnnnnnnnnnnnnnnnnnnnnnnnnnnnnnnnnnnnnnnnnnnnnnnnnnnnnnnnnnnnnnnnnnnnnnnnnnnnnnnnnnnnnnnnnnnnnnnnnnnnnnnnnnnnnnnnnnnnnnnnnnnnnnnnnnnnnnnnnnnnnnnnnnnnnnnnnnnnnnnnnnnnnnnnnnnnnnnnnnnnnnnnnnnnnnnnnnnnnnnnnnnnnnnnnnnnnnnnnnnnnnnnnnnnnnnnnnnnnnnnnnnnnnnnnnnnnnnnnnnnnnnnnnnnnnnnnnnnnnnnnnnnnnnnnnnnnnnnnnnnnnnnnnnnnnnnnnnnnnnnnnnnnnnnnnnnnnnnnnnnnnnnnnnnnnnnnnnnnnnnnnnnnnnnnnnnnnnnnnnnnnnnnnnnnnnnnnnnnnnnnnnnnnnnnnnnnnnnnnnnnnnnnnnnnnnnnnnnnnnnnnnnnnnnnnnnnnnnnnnnnnnnnnnnnnnnnnnnnnnnnnnnnnnnnnnnnnnnnnnnnnnnnnnnnnnnnnnnnnnnnnnnnnnnnnnnnnnnnnnnnnnnnnnnnnnnnnnnnnnnnnnnnnnnnnnnnnnnnnnnnnnnnnnnnnnnnnnnnnnnnnnnnnnnnnnnnnnnnnnnnnnnnnnnnnnnnnnnnnnnnnnnnnnnnnnnnnnnnnnnnnnnnnnnnnnnnnnnnnnnnnnnnnnnnnnnnnnnnnnnnnnnnnnnnnnnnnnnnnnnnnnnnnnnnnnnnnnnnnnnnnnnnnnnnnnnnnnnnnnnnnnnnnnnnnnnnnnnnnnnnnnnnnnnnnnnnnnnnnnnnnnnnnnnnnnnnnnnnnnnnnnnnnnnnnnnnnnnnnnnnnnnnnnnnnnnnnnnnnnnnnnnnnnnnnnnnnnnnnnnnnnnnnnnnnnnnnnnnnnnnnnnnnnnnnnnnnnnnnnnnnnnnnnnnnnnnnnnnnnnnnnnnnnnnnnnnnnnnnnnnnnnnnnnnnnnnnnnnnnnnnnnnnnnnnnnnnnnnnnnnnnnnnnnnnnnnnnnnnnnnnnnnnnnnnnnnnnnnnnnnnnnnnnnnnnnnnnnnnnnnnnnnnnnnnnnnnnnnnnnnnnnnnnnnnnnnnnnnnnnnnnnnnnnnnnnnnnnnnnnnnnnnnnnnnnnnnnnnnnnnnnnnnnnnnnnnnnnnnnnnnnnnnnnnnnnnnnnnnnnnnnnnnnnnnnnnnnnnnnnnnnnnnnnnnnnnnnnnnnnnnnnnnnnnnnnnnnnnnnnnnnnnnnnnnnnnnnnnnnnnnnnnnnnnnnnnnnnnnnnnnnnnnnnnnnnnnnnnnnnnnnnnnnnnnnnnnnnnnnnnnnnnnnnnnnnnnnnnnnnnnnnnnnnnnnnnnnnnnnnnnnnnnnnnnnnnnnnnnnnnnnnnnnnnnnnnnnnnnnnnnnnnnnnnnnnnnnnnnnnnnnnnnnnnnnnnnnnnnnnnnnnnnnnnnnnnnnnnnnnnnnnnnnnnnnnnnnnnnnnnnnnnnnnnnnnnnnnnnnnnnnnnnnnnnnnnnnnnnnnnnnnnnnnnnnnnnnnnnnnnnnnnnnnnnnnnnnnnnnnnnnnnnnnnnnnnnnnnnnnnnnnnnnnnnnnnnnnnnnnnnnnnnnnnnnnnnnnnnnnnnnnnnnnnnnnnnnnnnnnnnnnnnnnnnnnnnnnnnnnnnnnnnnnnnnnnnnnnnnnnnnnnnnnnnnnnnnnnnnnnnnnnnnnnnnnnnnnnnnnnnnnnnnnnnnnnnnnnnnnnnnnnnnnnnnnnnnnnnnnnnnnnnnnnnnnnnnnnnnnnnnnnnnnnnnnnnnnnnnnnnnnnnnnnnnnnnnnnnnnnnnnnnnnnnnnnnnnnnnnnnnnnnnnnnnnnnnnnnnnnnnnnnnnnnnnnnnnnnnnnnnnnnnnnnnnnnnnnnnnnnnnnnnnnnnnnnnnnnnnnnnnnnnnnnnnnnnnnnnnnnnnnnnnnnnnnnnnnnnnnnnnnnnnnnnnnnnnnnnnnnnnnnnnnnnnnnnnnnnnnnnnnnnnnnnnnnnnnnnnnnnnnnnnnnnnnnnnnnnnnnnnnnnnnnnnnnnnnnnnnnnnnnnnnnnnnnnnnnnnnnnnnnnnnnnnnnnnnnnnnnnnnnnnnnnnnnnnnnnnnnnnnnnnnnnnnnnnnnnnnnnnnnnnnnnnnnnnnnnnnnnnnnnnnnnnnnnnnnnnnnnnnnnnnnnnnnnnnnnnnnnnnnnnnnnnnnnnnnnnnnnnnnnnnnnnnnnnnnnnnnnnnnnnnnnnnnnnnnnnnnnnnnnnnnnnnnnnnnnnnnnnnnnnnnnnnnnnnnnnnnnnnnnnnnnnnnnnnnnnnnnnnnnnnnnnnnnnnnnnnnnnnnnnnnnnnnnnnnnnnnnnnnnnnnnnnnnnnnnnnnnnnnnnnnnnnnnnnnnnnnnnnnnnnnnnnnnnnnnnnnnnnnnnnnnnnnnnnnnnnnnnnnnnnnnnnnnnnnnnnnnnnnnnnnnnnnnnnnnnnnnnnnnnnnnnnnnnnnnnnnnnnnnnnnnnnnnnnnnnnnnnnnnnnnnnnnnnnnnnnnnnnnnnnnnnnnnnnnnnnnnnnnnnnnnnnnnnnnnnnnnnnnnnnnnnnnnnnnnnnnnnnnnnnnnnnnnnnnnnnnnnnnnnnnnnnnnnnnnnnnnnnnnnnnnnnnnnnnnnnnnnnnnnnnnnnnnnnnnnnnnnnnnnnnnnnnnnnnnnnnnnnnnnnnnnnnnnnnnnnnnnnnnnnnnnnnnnnnnnnnnnnnnnnnnnnnnnnnnnnnnnnnnnnnnnnnnnnnnnnnnnnnnnnnnnnnnnnnnnnnnnnnnnnnnnnnnnnnnnnnnnnnnnnnnnnnnnnnnnnnnnnnnnnnnnnnnnnnnnnnnnnnnnnnnnnnnnnnnnnnnnnnnnnnnnnnnnnnnnnnnnnnnnnnnnnnnnnnnnnnnnnnnnnnnnnnnnnnnnnnnnnnnnnnnnnnnnnnnnnnnnnnnnnnnnnnnnnnnnnnnnnnnnnnnnnnnnnnnnnnnnnnnnnnnnnnnnnnnnnnnnnnnnnnnnnnnnnnnnnnnnnnnnnnnnnnnnnnnnnnnnnnnnnnnnnnnnnnnnnnnnnnnnnnnnnnnnnnnnnnnnnnnnnnnnnnnnnnnnnnnnnnnnnnnnnnnnnnnnnnnnnnnnnnnnnnnnnnnnnnnnnnnnnnnnnnnnnnnnnnnnnnnnnnnnnnnnnnnnnnnnnnnnnnnnnnnnnnnnnnnnnnnnnnnnnnnnnnnnnnnnnnnnnnnnnnnnnnnnnnnnnnnnnnnnnnnnnnnnnnnnnnnnnnnnnnnnnnnnnnnnnnnnnnnnnnnnnnnnnnnnnnnnnnnnnnnnnnnnnnnnnnnnnnnnnnnnnnnnnnnnnnnnnnnnnnnnnnnnnnnnnnnnnnnnnnnnnnnnnnnnnnnnnnnnnnnnnnnnnnnnnnnnnnnnnnnnnnnnnnnnnnnnnnnnnnnnnnnnnnnnnnnnnnnnnnnnnnnnnnnnnnnnnnnnnnnnnnnnnnnnnnnnnnnnnnnnnnnnnnnnnnnnnnnnnnnnnnnnnnnnnnnnnnnnnnnnnnnnnnnnnnnnnnnnnnnnnnnnnnnnnnnnnnnnnnnnnnnnnnnnnnnnnnnnnnnnnnnnnnnnnnnnnnnnnnnnnnnnnnnnnnnnnnnnnnnnnnnnnnnnnnnnnnnnnnnnnnnnnnnnnnnnnnnnnnnnnnnnnnnnnnnnnnnnnnnnnnnnnnnnnnnnnnnnnnnnnnnnnnnnnnnnnnnnnnnnnnnnnnnnnnnnnnnnnnnnnnnnnnnnnnnnnnnnnnnnnnnnnnnnnnnnnnnnnnnnnnnnnnnnnnnnnnnnnnnnnnnnnnnnnnnnnnnnnnnnnnnnnnnnnnnnnnnnnnnnnnnnnnnnnnnnnnnnnnnnnnnnnnnnnnnnnnnnnnnnnnnnnnnnnnnnnnnnnnnnnnnnnnnnnnnnnnnnnnnnnnnnnnnnnnnnnnnnnnnnnnnnnnnnnnnnnnnnnnnnnnnnnnnnnnnnnnnnnnnnnnnnnnnnnnnnnnnnnnnnnnnnnnnnnnnnnnnnnnnnnnnnnnnnnnnnnnnnnnnnnnnnnnnnnnnnnnnnnnnnnnnnnnnnnnnnnnnnnnnnnnnnnnnnnnnnnnnnnnnnnnnnnnnnnnnnnnnnnnnnnnnnnnnnnnnnnnnnnnnnnnnnnnnnnnnnnnnnnnnnnnnnnnnnnnnnnnnnnnnnnnnnnnnnnnnnnnnnnnnnnnnnnnnnnnnnnnnnnnnnnnnnnnnnnnnnnnnnnnnnnnnnnnnnnnnnnnnnnnnnnnnnnnnnnnnnnnnnnnnnnnnnnnnnnnnnnnnnnnnnnnnnnnnnnnnnnnnnnnnnnnnnnnnnnnnnnnnnnnnnnnnnnnnnnnnnnnnnnnnnnnnnnnnnnnnnnnnnnnnnnnnnnnnnnnnnnnnnnnnnnnnnnnnnnnnnnnnnnnnnnnnnnnnnnnnnnnnnnnnnnnnnnnnnnnnnnnnnnnnnnnnnnnnnnnnnnnnnnnnnnnnnnnnnnnnnnnnnnnnnnnnnnnnnnnnnnnnnnnnnnnnnnnnnnnnnnnnnnnnnnnnnnnnnnnnnnnnnnnnnnnnnnnnnnnnnnnnnnnnnnnnnnnnnnnnnnnnnnnnnnnnnnnnnnnnnnnnnnnnnnnnnnnnnnnnnnnnnnnnnnnnnnnnnnnnnnnnnnnnnnnnnnnnnnnnnnnnnnnnnnnnnnnnnnnnnnnnnnnnnnnnnnnnnnnnnnnnnnnnnnnnnnnnnnnnnnnnnnnnnnnnnnnnnnnnnnnnnnnnnnnnnnnnnnnnnnnnnnnnnnnnnnnnnnnnnnnnnnnnnnnnnnnnnnnnnnnnnnnnnnnnnnnnnnnnnnnnnnnnnnnnnnnnnnnnnnnnnnnnnnnnnnnnnnnnnnnnnnnnnnnnnnnnnnnnnnnnnnnnnnnnnnnnnnnnnnnnnnnnnnnnnnnnnnnnnnnnnnnnnnnnnnnnnnnnnnnnnnnnnnnnnnnnnnnnnnnnnnnnnnnnnnnnnnnnnnnnnnnnnnnnnnnnnnnnnnnnnnnnnnnnnnnnnnnnnnnnnnnnnnnnnnnnnnnnnnnnnnnnnnnnnnnnnnnnnnnnnnnnnnnnnnnnnnnnnnnnnnnnnnnnnnnnnnnnnnnnnnnnnnnnnnnnnnnnnnnnnnnnnnnnnnnnnnnnnnnnnnnnnnnnnnnnnnnnnnnnnnnnnnnnnnnnnnnnnnnnnnnnnnnnnnnnnnnnnnnnnnnnnnnnnnnnnnnnnnnnnnnnnnnnnnnnnnnnnnnnnnnnnnnnnnnnnnnnnnnnnnnnnnnnnnnnnnnnnnnnnnnnnnnnnnnnnnnnnnnnnnnnnnnnnnnnnnnnnnnnnnnnnnnnnnnnnnnnnnnnnnnnnnnnnnnnnnnnnnnnnnnnnnnnnnnnnnnnnnnnnnnnnnnnnnnnnnnnnnnnnnnnnnnnnnnnnnnnnnnnnnnnnnnnnnnnnnnnnnnnnnnnnnnnnnnnnnnnnnnnnnnnnnnnnnnnnnnnnnnnnnnnnnnnnnnnnnnnnnnnnnnnnnnnnnnnnnnnnnnnnnnnnnnnnnnnnnnnnnnnnnnnnnnnnnnnnnnnnnnnnnnnnnnnnnnnnnnnnnnnnnnnnnnnnnnnnnnnnnnnnnnnnnnnnnnnnnnnnnnnnnnnnnnnnnnnnnnnnnnnnnnnnnnnnnnnnnnnnnnnnnnnnnnnnnnnnnnnnnnnnnnnnnnnnnnnnnnnnnnnnnnnnnnnnnnnnnnnnnnnnnnnnnnnnnnnnnnnnnnnnnnnnnnnnnnnnnnnnnnnnnnnnnnnnnnnnnnnnnnnnnnnnnnnnnnnnnnnnnnnnnnnnnnnnnnnnnnnnnnnnnnnnnnnnnnnnnnnnnnnnnnnnnnnnnnnnnnnnnnnnnnnnnnnnnnnnnnnnnnnnnnnnnnnnnnnnnnnnnnnnnnnnnnnnnnnnnnnnnnnnnnnnnnnnnnnnnnnnnnnnnnnnnnnnnnnnnnnnnnnnnnnnnnnnnnnnnnnnnnnnnnnnnnnnnnnnnnnnnnnnnnnnnnnnnnnnnnnnnnnnnnnnnnnnnnnnnnnnnnnnnnnnnnnnnnnnnnnnnnnnnnnnnnnnnnnnnnnnnnnnnnnnnnnnnnnnnnnnnnnnnnnnnnnnnnnnnnnnnnnnnnnnnnnnnnnnnnnnnnnnnnnnnnnnnnnnnnnnnnnnnnnnnnnnnnnnnnnnnnnnnnnnnnnnnnnnnnnnnnnnnnnnnnnnnnnnnnnnnnnnnnnnnnnnnnnnnnnnnnnnnnnnnnnnnnnnnnnnnnnnnnnnnnnnnnnnnnnnnnnnnnnnnnnnnnnnnnnnnnnnnnnnnnnnnnnnnnnnnnnnnnnnnnnnnnnnnnnnnnnnnnnnnnnnnnnnnnnnnnnnnnnnnnnnnnnnnnnnnnnnnnnnnnnnnnnnnnnnnnnnnnnnnnnnnnnnnnnnnnnnnnnnnnnnnnnnnnnnnnnnnnnnnnnnnnnnnnnnnnnnnnnnnnnnnnnnnnnnnnnnnnnnnnnnnnnnnnnnnnnnnnnnnnnnnnnnnnnnnnnnnnnnnnnnnnnnnnnnnnnnnnnnnnnnnnnnnnnnnnnnnnnnnnnnnnnnnnnnnnnnnnnnnnnnnnnnnnnnnnnnnnnnnnnnnnnnnnnnnnnnnnnnnnnnnnnnnnnnnnnnnnnnnnnnnnnnnnnnnnnnnnnnnnnnnnnnnnnnnnnnnnnnnnnnnnnnnnnnnnnnnnnnnnnnnnnnnnnnnnnnnnnnnnnnnnnnnnnnnnnnnnnnnnnnnnnnnnnnnnnnnnnnnnnnnnnnnnnnnnnnnnnnnnnnnnnnnnnnnnnnnnnnnnnnnnnnnnnnnnnnnnnnnnnnnnnnnnnnnnnnnnnnnnnnnnnnnnnnnnnnnnnnnnnnnnnnnnnnnnnnnnnnnnnnnnnnnnnnnnnnnnnnnnnnnnnnnnnnnnnnnnnnnnnnnnnnnnnnnnnnnnnnnnnnnnnnnnnnnnnnnnnnnnnnnnnnnnnnnnnnnnnnnnnnnnnnnnnnnnnnnnnnnnnnnnnnnnnnnnnnnnnnnnnnnnnnnnnnnnnnnnnnnnnnnnnnnnnnnnnnnnnnnnnnnnnnnnnnnnnnnnnnnnnnnnnnnnnnnnnnnnnnnnnnnnnnnnnnnnnnnnnnnnnnnnnnnnnnnnnnnnnnnnnnnnnnnnnnnnnnnnnnnnnnnnnnnnnnnnnnnnnnnnnnnnnnnnnnnnnnnnnnnnnnnnnnnnnnnnnnnnnnnnnnnnnnnnnnnnnnnnnnnnnnnnnnnnnnnnnnnnnnnnnnnnnnnnnnnnnnnnnnnnnnnnnnnnnnnnnnnnnnnnnnnnnnnnnnnnnnnnnnnnnnnnnnnnnnnnnnnnnnnnnnnnnnnnnnnnnnnnnnnnnnnnnnnnnnnnnnnnnnnnnnnnnnnnnnnnnnnnnnnnnnnnnnnnnnnnnnnnnnnnnnnnnnnnnnnnnnnnnnnnnnnnnnnnnnnnnnnnnnnnnnnnnnnnnnnnnnnnnnnnnnnnnnnnnnnnnnnnnnnnnnnnnnnnnnnnnnnnnnnnnnnnnnnnnnnnnnnnnnnnnnnnnnnnnnnnnnnnnnnnnnnnnnnnnnnnnnnnnnnnnnnnnnnnnnnnnnnnnnnnnnnnnnnnnnnnnnnnnnnnnnnnnnnnnnnnnnnnnnnnnnnnnnnnnnnnnnnnnnnnnnnnnnnnnnnnnnnnnnnnnnnnnnnnnnnnnnnnnnnnnnnnnnnnnnnnnnnnnnnnnnnnnnnnnnnnnnnnnnnnnnnnnnnnnnnnnnnnnnnnnnnnnnnnnnnnnnnnnnnnnnnnnnnnnnnnnnnnnnnnnnnnnnnnnnnnnnnnnnnnnnnnnnnnnnnnnnnnnnnnnnnnnnnnnnnnnnnnnnnnnnnnnnnnnnnnnnnnnnnnnnnnnnnnnnnnnnnnnnnnnnnnnnnnnnnnnnnnnnnnnnnnnnnnnnnnnnnnnnnnnnnnnnnnnnnnnnnnnnnnnnnnnnnnnnnnnnnnnnnnnnnnnnnnnnnnnnnnnnnnnnnnnnnnnnnnnnnnnnnnnnnnnnnnnnnnnnnnnnnnnnnnnnnnnnnnnnnnnnnnnnnnnnnnnnnnnnnnnnnnnnnnnnnnnnnnnnnnnnnnnnnnnnnnnnnnnnnnnnnnnnnnnnnnnnnnnnnnnnnnnnnnnnnnnnnnnnnnnnnnnnnnnnnnnnnnnnnnnnnnnnnnnnnnnnnnnnnnnnnnnnnnnnnnnnnnnnnnnnnnnnnnnnnnnnnnnnnnnnnnnnnnnnnnnnnnnnnnnnnnnnnnnnnnnnnnnnnnnnnnnnnnnnnnnnnnnnnnnnnnnnnnnnnnnnnnnnnnnnnnnnnnnnnnnnnnnnnnnnnnnnnnnnnnnnnnnnnnnnnnnnnnnnnnnnnnnnnnnnnnnnnnnnnnnnnnnnnnnnnnnnnnnnnnnnnnnnnnnnnnnnnnnnnnnnnnnnnnnnnnnnnnnnnnnnnnnnnnnnnnnnnnnnnnnnnnnnnnnnnnnnnnnnnnnnnnnnnnnnnnnnnnnnnnnnnnnnnnnnnnnnnnnnnnnnnnnnnnnnnnnnnnnnnnnnnnnnnnnnnnnnnnnnnnnnnnnnnnnnnnnnnnnnnnnnnnnnnnnnnnnnnnnnnnnnnnnnnnnnnnnnnnnnnnnnnnnnnnnnnnnnnnnnnnnnnnnnnnnnnnnnnnnnnnnnnnnnnnnnnnnnnnnnnnnnnnnnnnnnnnnnnnnnnnnnnnnnnnnnnnnnnnnnnnnnnnnnnnnnnnnnnnnnnnnnnnnnnnnnnnnnnnnnnnnnnnnnnnnnnnnnnnnnnnnnnnnnnnnnnnnnnnnnnnnnnnnnnnnnnnnnnnnnnnnnnnnnnnnnnnnnnnnnnnnnnnnnnnnnnnnnnnnnnnnnnnnnnnnnnnnnnnnnnnnnnnnnnnnnnnnnnnnnnnnnnnnnnnnnnnnnnnnnnnnnnnnnnnnnnnnnnnnnnnnnnnnnnnnnnnnnnnnnnnnnnnnnnnnnnnnnnnnnnnnnnnnnnnnnnnnnnnnnnnnnnnnnnnnnnnnnnnnnnnnnnnnnnnnnnnnnnnnnnnnnnnnnnnnnnnnnnnnnnnnnnnnnnnnnnnnnnnnnnnnnnnnnnnnnnnnnnnnnnnnnnnnnnnnnnnnnnnnnnnnnnnnnnnnnnnnnnnnnnnnnnnnnnnnnnnnnnnnnnnnnnnnnnnnnnnnnnnnnnnnnnnnnnnnnnnnnnnnnnnnnnnnnnnnnnnnnnnnnnnnnnnnnnnnnnnnnnnnnnnnnnnnnnnnnnnnnnnnnnnnnnnnnnnnnnnnnnnnnnnnnnnnnnnnnnnnnnnnnnnnnnnnnnnnnnnnnnnnnnnnnnnnnnnnnnnnnnnnnnnnnnnnnnnnnnnnnnnnnnnnnnnnnnnnnnnnnnnnnnnnnnnnnnnnnnnnnnnnnnnnnnnnnnnnnnnnnnnnnnnnnnnnnnnnnnnnnnnnnnnnnnnnnnnnnnnnnnnnnnnnnnnnnnnnnnnnnnnnnnnnnnnnnnnnnnnnnnnnnnnnnnnnnnnnnnnnnnnnnnnnnnnnnnnnnnnnnnnnnnnnnnnnnnnnnnnnnnnnnnnnnnnnnnnnnnnnnnnnnnnnnnnnnnnnnnnnnnnnnnnnnnnnnnnnnnnnnnnnnnnnnnnnnnnnnnnnnnnnnnnnnnnnnnnnnnnnnnnnnnnnnnnnnnnnnnnnnnnnnnnnnnnnnnnnnnnnnnnnnnnnnnnnnnnnnnnnnnnnnnnnnnnnnnnnnnnnnnnnnnnnnnnnnnnnnnnnnnnnnnnnnnnnnnnnnnnnnnnnnnnnnnnnnnnnnnnnnnnnnnnnnnnnnnnnnnnnnnnnnnnnnnnnnnnnnnnnnnnnnnnnnnnnnnnnnnnnnnnnnnnnnnnnnnnnnnnnnnnnnnnnnnnnnnnnnnnnnnnnnnnnnnnnnnnnnnnnnnnnnnnnnnnnnnnnnnnnnnnnnnnnnnnnnnnnnnnnnnnnnnnnnnnnnnnnnnnnnnnnnnnnnnnnnnnnnnnnnnnnnnnnnnnnnnnnnnnnnnnnnnnnnnnnnnnnnnnnnnnnnnnnnnnnnnnnnnnnnnnnnnnnnnnnnnnnnnnnnnnnnnnnnnnnnnnnnnnnnnnnnnnnnnnnnnnnnnnnnnnnnnnnnnnnnnnnnnnnnnnnnnnnnnnnnnnnnnnnnnnnnnnnnnnnnnnnnnnnnnnnnnnnnnnnnnnnnnnnnnnnnnnnnnnnnnnnnnnnnnnnnnnnnnnnnnnnnnnnnnnnnnnnnnnnnnnnnnnnnnnnnnnnnnnnnnnnnnnnnnnnnnnnnnnnnnnnnnnnnnnnnnnnnnnnnnnnnnnnnnnnnnnnnnnnnnnnnnnnnnnnnnnnnnnnnnnnnnnnnnnnnnnnnnnnnnnnnnnnnnnnnnnnnnnnnnnnnnnnnnnnnnnnnnnnnnnnnnnnnnnnnnnnnnnnnnnnnnnnnnnnnnnnnnnnnnnnnnnnnnnnnnnnnnnnnnnnnnnnnnnnnnnnnnnnnnnnnnnnnnnnnnnnnnnnnnnnnnnnnnnnnnnnnnnnnnnnnnnnnnnnnnnnnnnnnnnnnnnnnnnnnnnnnnnnnnnnnnnnnnnnnnnnnnnnnnnnnnnnnnnnnnnnnnnnnnnnnnnnnnnnnnnnnnnnnnnnnnnnnnnnnnnnnnnnnnnnnnnnnnnnnnnnnnnnnnnnnnnnnnnnnnnnnnnnnnnnnnnnnnnnnnnnnnnnnnnnnnnnnnnnnnnnnnnnnnnnnnnnnnnnnnnnnnnnnnnnnnnnnnnnnnnnnnnnnnnnnnnnnnnnnnnnnnnnnnnnnnnnnnnnnnnnnnnnnnnnnnnnnnnnnnnnnnnnnnnnnnnnnnnnnnnnnnnnnnnnnnnnnnnnnnnnnnnnnnnnnnnnnnnnnnnnnnnnnnnnnnnnnnnnnnnnnnnnnnnnnnnnnnnnnnnnnnnnnnnnnnnnnnnnnnnnnnnnnnnnnnnnnnnnnnnnnnnnnnnnnnnnnnnnnnnnnnnnnnnnnnnnnnnnnnnnnnnnnnnnnnnnnnnnnnnnnnnnnnnnnnnnnnnnnnnnnnnnnnnnnnnnnnnnnnnnnnnnnnnnnnnnnnnnnnnnnnnnnnnnnnnnnnnnnnnnnnnnnnnnnnnnnnnnnnnnnnnnnnnnnnnnnnnnnnnnnnnnnnnnnnnnnnnnnnnnnnnnnnnnnnnnnnnnnnnnnnnnnnnnnnnnnnnnnnnnnnnnnnnnnnnnnnnnnnnnnnnnnnnnnnnnnnnnnnnnnnnnnnnnnnnnnnnnnnnnnnnnnnnnnnnnnnnnnnnnnnnnnnnnnnnnnnnnnnnnnnnnnnnnnnnnnnnnnnnnnnnnnnnnnnnnnnnnnnnnnnnnnnnnnnnnnnnnnnnnnnnnnnnnnnnnnnnnnnnnnnnnnnnnnnnnnnnnnnnnnnnnnnnnnnnnnnnnnnnnnnnnnnnnnnnnnnnnnnnnnnnnnnnnnnnnnnnnnnnnnnnnnnnnnnnnnnnnnnnnnnnnnnnnnnnnnnnnnnnnnnnnnnnnnnnnnnnnnnnnnnnnnnnnnnnnnnnnnnnnnnnnnnnnnnnnnnnnnnnnnnnnnnnnnnnnnnnnnnnnnnnnnnnnnnnnnnnnnnnnnnnnnnnnnnnnnnnnnnnnnnnnnnnnnnnnnnnnnnnnnnnnnnnnnnnnnnnnnnnnnnnnnnnnnnnnnnnnnnnnnnnnnnnnnnnnnnnnnnnnnnnnnnnnnnnnnnnnnnnnnnnnnnnnnnnnnnnnnnnnnnnnnnnnnnnnnnnnnnnnnnnnnnnnnnnnnnnnnnnnnnnnnnnnnnnnnnnnnnnnnnnnnnnnnnnnnnnnnnnnnnnnnnnnnnnnnnnnnnnnnnnnnnnnnnnnnnnnnnnnnnnnnnnnnnnnnnnnnnnnnnnnnnnnnnnnnnnnnnnnnnnnnnnnnnnnnnnnnnnnnnnnnnnnnnnnnnnnnnnnnnnnnnnnnnnnnnnnnnnnnnnnnnnnnnnnnnnnnnnnnnnnnnnnnnnnnnnnnnnnnnnnnnnnnnnnnnnnnnnnnnnnnnnnnnnnnnnnnnnnnnnnnnnnnnnnnnnnnnnnnnnnnnnnnnnnnnnnnnnnnnnnnnnnnnnnnnnnnnnnnnnnnnnnnnnnnnnnnnnnnnnnnnnnnnnnnnnnnnnnnnnnnnnnnnnnnnnnnnnnnnnnnnnnnnnnnnnnnnnnnnnnnnnnnnnnnnnnnnnnnnnnnnnnnnnnnnnnnnnnnnnnnnnnnnnnnnnnnnnnnnnnnnnnnnnnnnnnnnnnnnnnnnnnnnnnnnnnnnnnnnnnnnnnnnnnnnnnnnnnnnnnnnnnnnnnnnnnnnnnnnnnnnnnnnnnnnnnnnnnnnnnnnnnnnnnnnnnnnnnnnnnnnnnnnnnnnnnnnnnnnnnnnnnnnnnnnnnnnnnnnnnnnnnnnnnnnnnnnnnnnnnnnnnnnnnnnnnnnnnnnnnnnnnnnnnnnnnnnnnnnnnnnnnnnnnnnnnnnnnnnnnnnnnnnnnnnnnnnnnnnnnnnnnnnnnnnnnnnnnnnnnnnnnnnnnnnnnnnnnnnnnnnnnnnnnnnnnnnnnnnnnnnnnnnnnnnnnnnnnnnnnnnnnnnnnnnnnnnnnnnnnnnnnnnnnnnnnnnnnnnnnnnnnnnnnnnnnnnnnnnnnnnnnnnnnnnnnnnnnnnnnnnnnnnnnnnnnnnnnnnnnnnnnnnnnnnnnnnnnnnnnnnnnnnnnnnnnnnnnnnnnnnnnnnnnnnnnnnnnnnnnnnnnnnnnnnnnnnnnnnnnnnnnnnnnnnnnnnnnnnnnnnnnnnnnnnnnnnnnnnnnnnnnnnnnnnnnnnnnnnnnnnnnnnnnnnnnnnnnnnnnnnnnnnnnnnnnnnnnnnnnnnnnnnnnnnnnnnnnnnnnnnnnnnnnnnnnnnnnnnnnnnnnnnnnnnnnnnnnnnnnnnnnnnnnnnnnnnnnnnnnnnnnnnnnnnnnnnnnnnnnnnnnnnnnnnnnnnnnnnnnnnnnnnnnnnnnnnnnnnnnnnnnnnnnnnnnnnnnnnnnnnnnnnnnnnnnnnnnnnnnnnnnnnnnnnnnnnnnnnnnnnnnnnnnnnnnnnnnnnnnnnnnnnnnnnnnnnnnnnnnnnnnnnnnnnnnnnnnnnnnnnnnnnnnnnnnnnnnnnnnnnnnnnnnnnnnnnnnnnnnnnnnnnnnnnnnnnnnnnnnnnnnnnnnnnnnnnnnnnnnnnnnnnnnnnnnnnnnnnnnnnnnnnnnnnnnnnnnnnnnnnnnnnnnnnnnnnnnnnnnnnnnnnnnnnnnnnnnnnnnnnnnnnnnnnnnnnnnnnnnnnnnnnnnnnnnnnnnnnnnnnnnnnnnnnnnnnnnnnnnnnnnnnnnnnnnnnnnnnnnnnnnnnnnnnnnnnnnnnnnnnnnnnnnnnnnnnnnnnnnnnnnnnnnnnnnnnnnnnnnnnnnnnnnnnnnnnnnnnnnnnnnnnnnnnnnnnnnnnnnnnnnnnnnnnnnnnnnnnnnnnnnnnnnnnnnnnnnnnnnnnnnnnnnnnnnnnnnnnnnnnnnnnnnnnnnnnnnnnnnnnnnnnnnnnnnnnnnnnnnnnnnnnnnnnnnnnnnnnnnnnnnnnnnnnnnnnnnnnnnnnnnnnnnnnnnnnnnnnnnnnnnnnnnnnnnnnnnnnnnnnnnnnnnnnnnnnnnnnnnnnnnnnnnnnnnnnnnnnnnnnnnnnnnnnnnnnnnnnnnnnnnnnnnnnnnnnnnnnnnnnnnnnnnnnnnnnnnnnnnnnnnnnnnnnnnnnnnnnnnnnnnnnnnnnnnnnnnnnnnnnnnnnnnnnnnnnnnnnnnnnnnnnnnnnnnnnnnnnnnnnnnnnnnnnnnnnnnnnnnnnnnnnnnnnnnnnnnnnnnnnnnnnnnnnnnnnnnnnnnnnnnnnnnnnnnnnnnnnnnnnnnnnnnnnnnnnnnnnnnnnnnnnnnnnnnnnnnnnnnnnnnnnnnnnnnnnnnnnnnnnnnnnnnnnnnnnnnnnnnnnnnnnnnnnnnnnnnnnnnnnnnnnnnnnnnnnnnnnnnnnnnnnnnnnnnnnnnnnnnnnnnnnnnnnnnnnnnnnnnnnnnnnnnnnnnnnnnnnnnnnnnnnnnnnnnnnnnnnnnnnnnnnnnnnnnnnnnnnnnnnnnnnnnnnnnnnnnnnnnnnnnnnnnnnnnnnnnnnnnnnnnnnnnnnnnnnnnnnnnnnnnnnnnnnnnnnnnnnnnnnnnnnnnnnnnnnnnnnnnnnnnnnnnnnnnnnnnnnnnnnnnnnnnnnnnnnnnnnnnnnnnnnnnnnnnnnnnnnnnnnnnnnnnnnnnnnnnnnnnnnnnnnnnnnnnnnnnnnnnnnnnnnnnnnnnnnnnnnnnnnnnnnnnnnnnnnnnnnnnnnnnnnnnnnnnnnnnnnnnnnnnnnnnnnnnnnnnnnnnnnnnnnnnnnnnnnnnnnnnnnnnnnnnnnnnnnnnnnnnnnnnnnnnnnnnnnnnnnnnnnnnnnnnnnnnnnnnnnnnnnnnnnnnnnnnnnnnnnnnnnnnnnnnnnnnnnnnnnnnnnnnnnnnnnnnnnnnnnnnnnnnnnnnnnnnnnnnnnnnnnnnnnnnnnnnnnnnnnnnnnnnnnnnnnnnnnnnnnnnnnnnnnnnnnnnnnnnnnnnnnnnnnnnnnnnnnnnnnnnnnnnnnnnnnnnnnnnnnnnnnnnnnnnnnnnnnnnnnnnnnnnnnnnnnnnnnnnnnnnnnnnnnnnnnnnnnnnnnnnnnnnnnnnnnnnnnnnnnnnnnnnnnnnnnnnnnnnnnnnnnnnnnnnnnnnnnnnnnnnnnnnnnnnnnnnnnnnnnnnnnnnnnnnnnnnnnnnnnnnnnnnnnnnnnnnnnnnnnnnnnnnnnnnnnnnnnnnnnnnnnnnnnnnnnnnnnnnnnnnnnnnnnnnnnnnnnnnnnnnnnnnnnnnnnnnnnnnnnnnnnnnnnnnnnnnnnnnnnnnnnnnnnnnnnnnnnnnnnnnnnnnnnnnnnnnnnnnnnnnnnnnnnnnnnnnnnnnnnnnnnnnnnnnnnnnnnnnnnnnnnnnnnnnnnnnnnnnnnnnnnnnnnnnnnnnnnnnnnnnnnnnnnnnnnnnnnnnnnnnnnnnnnnnnnnnnnnnnnnnnnnnnnnnnnnnnnnnnnnnnnnnnnnnnnnnnnnnnnnnnnnnnnnnnnnnnnnnnnnnnnnnnnnnnnnnnnnnnnnnnnnnnnnnnnnnnnnnnnnnnnnnnnnnnnnnnnnnnnnnnnnnnnnnnnnnnnnnnnnnnnnnnnnnnnnnnnnnnnnnnnnnnnnnnnnnnnnnnnnnnnnnnnnnnnnnnnnnnnnnnnnnnnnnnnnnnnnnnnnnnnnnnnnnnnnnnnnnnnnnnnnnnnnnnnnnnnnnnnnnnnnnnnnnnnnnnnnnnnnnnnnnnnnnnnnnnnnnnnnnnnnnnnnnnnnnnnnnnnnnnnnnnnnnnnnnnnnnnnnnnnnnnnnnnnnnnnnnnnnnnnnnnnnnnnnnnnnnnnnnnnnnnnnnnnnnnnnnnnnnnnnnnnnnnnnnnnnnnnnnnnnnnnnnnnnnnnnnnnnnnnnnnnnnnnnnnnnnnnnnnnnnnnnnnnnnnnnnnnnnnnnnnnnnnnnnnnnnnnnnnnnnnnnnnnnnnnnnnnnnnnnnnnnnnnnnnnnnnnnnnnnnnnnnnnnnnnnnnnnnnnnnnnnnnnnnnnnnnnnnnnnnnnnnnnnnnnnnnnnnnnnnnnnnnnnnnnnnnnnnnnnnnnnnnnnnnnnnnnnnnnnnnnnnnnnnnnnnnnnnnnnnnnnnnnnnnnnnnnnnnnnnnnnnnnnnnnnnnnnnnnnnnnnnnnnnnnnnnnnnnnnnnnnnnnnnnnnnnnnnnnnnnnnnnnnnnnnnnnnnnnnnnnnnnnnnnnnnnnnnnnnnnnnnnnnnnnnnnnnnnnnnnnnnnnnnnnnnnnnnnnnnnnnnnnnnnnnnnnnnnnnnnnnnnnnnnnnnnnnnnnnnnnnnnnnnnnnnnnnnnnnnnnnnnnnnnnnnnnnnnnnnnnnnnnnnnnnnnnnnnnnnnnnnnnnnnnnnnnnnnnnnnnnnnnnnnnnnnnnnnnnnnnnnnnnnnnnnnnnnnnnnnnnnnnnnnnnnnnnnnnnnnnnnnnnnnnnnnnnnnnnnnnnnnnnnnnnnnnnnnnnnnnnnnnnnnnnnnnnnnnnnnnnnnnnnnnnnnnnnnnnnnnnnnnnnnnnnnnnnnnnnnnnnnnnnnnnnnnnnnnnnnnnnnnnnnnnnnnnnnnnnnnnnnnnnnnnnnnnnnnnnnnnnnnnnnnnnnnnnnnnnnnnnnnnnnnnnnnnnnnnnnnnnnnnnnnnnnnnnnnnnnnnnnnnnnnnnnnnnnnnnnnnnnnnnnnnnnnnnnnnnnnnnnnnnnnnnnnnnnnnnnnnnnnnnnnnnnnnnnnnnnnnnnnnnnnnnnnnnnnnnnnnnnnnnnnnnnnnnnnnnnnnnnnnnnnnnnnnnnnnnnnnnnnnnnnnnnnnnnnnnnnnnnnnnnnnnnnnnnnnnnnnnnnnnnnnnnnnnnnnnnnnnnnnnnnnnnnnnnnnnnnnnnnnnnnnnnnnnnnnnnnnnnnnnnnnnnnnnnnnnnnnnnnnnnnnnnnnnnnnnnnnnnnnnnnnnnnnnnnnnnnnnnnnnnnnnnnnnnnnnnnnnnnnnnnnnnnnnnnnnnnnnnnnnnnnnnnnnnnnnnnnnnnnnnnnnnnnnnnnnnnnnnnnnnnnnnnnnnnnnnnnnnnnnnnnnnnnnnnnnnnnnnnnnnnnnnnnnnnnnnnnnnnnnnnnnnnnnnnnnnnnnnnnnnnnnnnnnnnnnnnnnnnnnnnnnnnnnnnnnnnnnnnnnnnnnnnnnnnnnnnnnnnnnnnnnnnnnnnnnnnnnnnnnnnnnnnnnnnnnnnnnnnnnnnnnnnnnnnnnnnnnnnnnnnnnnnnnnnnnnnnnnnnnnnnnnnnnnnnnnnnnnnnnnnnnnnnnnnnnnnnnnnnnnnnnnnnnnnnnnnnnnnnnnnnnnnnnnnnnnnnnnnnnnnnnnnnnnnnnnnnnnnnnnnnnnnnnnnnnnnnnnnnnnnnnnnnnnnnnnnnnnnnnnnnnnnnnnnnnnnnnnnnnnnnnnnnnnnnnnnnnnnnnnnnnnnnnnnnnnnnnnnnnnnnnnnnnnnnnnnnnnnnnnnnnnnnnnnnnnnnnnnnnnnnnnnnnnnnnnnnnnnnnnnnnnnnnnnnnnnnnnnnnnnnnnnnnnnnnnnnnnnnnnnnnnnnnnnnnnnnnnnnnnnnnnnnnnnnnnnnnnnnnnnnnnnnnnnnnnnnnnnnnnnnnnnnnnnnnnnnnnnnnnnnnnnnnnnnnnnnnnnnnnnnnnnnnnnnnnnnnnnnnnnnnnnnnnnnnnnnnnnnnnnnnnnnnnnnnnnnnnnnnnnnnnnnnnnnnnnnnnnnnnnnnnnnnnnnnnnnnnnnnnnnnnnnnnnnnnnnnnnnnnnnnnnnnnnnnnnnnnnnnnnnnnnnnnnnnnnnnnnnnnnnnnnnnnnnnnnnnnnnnnnnnnnnnnnnnnnnnnnnnnnnnnnnnnnnnnnnnnnnnnnnnnnnnnnnnnnnnnnnnnnnnnnnnnnnnnnnnnnnnnnnnnnnnnnnnnnnnnnnnnnnnnnnnnnnnnnnnnnnnnnnnnnnnnnnnnnnnnnnnnnnnnnnnnnnnnnnnnnnnnnnnnnnnnnnnnnnnnnnnnnnnnnnnnnnnnnnnnnnnnnnnnnnnnnnnnnnnnnnnnnnnnnnnnnnnnnnnnnnnnnnnnnnnnnnnnnnnnnnnnnnnnnnnnnnnnnnnnnnnnnnnnnnnnnnnnnnnnnnnnnnnnnnnnnnnnnnnnnnnnnnnnnnnnnnnnnnnnnnnnnnnnnnnnnnnnnnnnnnnnnnnnnnnnnnnnnnnnnnnnnnnnnnnnnnnnnnnnnnnnnnnnnnnnnnnnnnnnnnnnnnnnnnnnnnnnnnnnnnnnnnnnnnnnnnnnnnnnnnnnnnnnnnnnnnnnnnnnnnnnnnnnnnnnnnnnnnnnnnnnnnnnnnnnnnnnnnnnnnnnnnnnnnnnnnnnnnnnnnnnnnnnnnnnnnnnnnnnnnnnnnnnnnnnnnnnnnnnnnnnnnnnnnnnnnnnnnnnnnnnnnnnnnnnnnnnnnnnnnnnnnnnnnnnnnnnnnnnnnnnnnnnnnnnnnnnnnnnnnnnnnnnnnnnnnnnnnnnnnnnnnnnnnnnnnnnnnnnnnnnnnnnnnnnnnnnnnnnnnnnnnnnnnnnnnnnnnnnnnnnnnnnnnnnnnnnnnnnnnnnnnnnnnnnnnnnnnnnnnnnnnnnnnnnnnnnnnnnnnnnnnnnnnnnnnnnnnnnnnnnnnnnnnnnnnnnnnnnnnnnnnnnnnnnnnnnnnnnnnnnnnnnnnnnnnnnnnnnnnnnnnnnnnnnnnnnnnnnnnnnnnnnnnnnnnnnnnnnnnnnnnnnnnnnnnnnnnnnnnnnnnnnnnnnnnnnnnnnnnnnnnnnnnnnnnnnnnnnnnnnnnnnnnnnnnnnnnnnnnnnnnnnnnnnnnnnnnnnnnnnnnnnnnnnnnnnnnnnnnnnnnnnnnnnnnnnnnnnnnnnnnnnnnnnnnnnnnnnnnnnnnnnnnnnnnnnnnnnnnnnnnnnnnnnnnnnnnnnnnnnnnnnnnnnnnnnnnnnnnnnnnnnnnnnnnnnnnnnnnnnnnnnnnnnnnnnnnnnnnnnnnnnnnnnnnnnnnnnnnnnnnnnnnnnnnnnnnnnnnnnnnnnnnnnnnnnnnnnnnnnnnnnnnnnnnnnnnnnnnnnnnnnnnnnnnnnnnnnnnnnnnnnnnnnnnnnnnnnnnnnnnnnnnnnnnnnnnnnnnnnnnnnnnnnnnnnnnnnnnnnnnnnnnnnnnnnnnnnnnnnnnnnnnnnnnnnnnnnnnnnnnnnnnnnnnnnnnnnnnnnnnnnnnnnnnnnnnnnnnnnnnnnnnnnnnnnnnnnnnnnnnnnnnnnnnnnnnnnnnnnnnnnnnnnnnnnnnnnnnnnnnnnnnnnnnnnnnnnnnnnnnnnnnnnnnnnnnnnnnnnnnnnnnnnnnnnnnnnnnnnnnnnnnnnnnnnnnnnnnnnnnnnnnnnnnnnnnnnnnnnnnnnnnnnnnnnnnnnnnnnnnnnnnnnnnnnnnnnnnnnnnnnnnnnnnnnnnnnnnnnnnnnnnnnnnnnnnnnnnnnnnnnnnnnnnnnnnnnnnnnnnnnnnnnnnnnnnnnnnnnnnnnnnnnnnnnnnnnnnnnnnnnnnnnnnnnnnnnnnnnnnnnnnnnnnnnnnnnnnnnnnnnnnnnnnnnnnnnnnnnnnnnnnnnnnnnnnnnnnnnnnnnnnnnnnnnnnnnnnnnnnnnnnnnnnnnnnnnnnnnnnnnnnnnnnnnnnnnnnnnnnnnnnnnnnnnnnnnnnnnnnnnnnnnnnnnnnnnnnnnnnnnnnnnnnnnnnnnnnnnnnnnnnnnnnnnnnnnnnnnnnnnnnnnnnnnnnnnnnnnnnnnnnnnnnnnnnnnnnnnnnnnnnnnnnnnnnnnnnnnnnnnnnnnnnnnnnnnnnnnnnnnnnnnnnnnnnnnnnnnnnnnnnnnnnnnnnnnnnnnnnnnnnnnnnnnnnnnnnnnnnnnnnnnnnnnnnnnnnnnnnnnnnnnnnnnnnnnnnnnnnnnnnnnnnnnnnnnnnnnnnnnnnnnnnnnnnnnnnnnnnnnnnnnnnnnnnnnnnnnnnnnnnnnnnnnnnnnnnnnnnnnnnnnnnnnnnnnnnnnnnnnnnnnnnnnnnnnnnnnnnnnnnnnnnnnnnnnnnnnnnnnnnnnnnnnnnnnnnnnnnnnnnnnnnnnnnnnnnnnnnnnnnnnnnnnnnnnnnnnnnnnnnnnnnnnnnnnnnnnnnnnnnnnnnnnnnnnnnnnnnnnnnnnnnnnnnnnnnnnnnnnnnnnnnnnnnnnnnnnnnnnnnnnnnnnnnnnnnnnnnnnnnnnnnnnnnnnnnnnnnnnnnnnnnnnnnnnnnnnnnnnnnnnnnnnnnnnnnnnnnnnnnnnnnnnnnnnnnnnnnnnnnnnnnnnnnnnnnnnnnnnnnnnnnnnnnnnnnnnnnnnnnnnnnnnnnnnnnnnnnnnnnnnnnnnnnnnnnnnnnnnnnnnnnnnnnnnnnnnnnnnnnnnnnnnnnnnnnnnnnnnnnnnnnnnnnnnnnnnnnnnnnnnnnnnnnnnnnnnnnnnnnnnnnnnnnnnnnnnnnnnnnnnnnnnnnnnnnnnnnnnnnnnnnnnnnnnnnnnnnnnnnnnnnnnnnnnnnnnnnnnnnnnnnnnnnnnnnnnnnnnnnnnnnnnnnnnnnnnnnnnnnnnnnnnnnnnnnnnnnnnnnnnnnnnnnnnnnnnnnnnnnnnnnnnnnnnnnnnnnnnnnnnnnnnnnnnnnnnnnnnnnnnnnnnnnnnnnnnnnnnnnnnnnnnnnnnnnnnnnnnnnnnnnnnnnnnnnnnnnnnnnnnnnnnnnnnnnnnnnnnnnnnnnnnnnnnnnnnnnnnnnnnnnnnnnnnnnnnnnnnnnnnnnnnnnnnnnnnnnnnnnnnnnnnnnnnnnnnnnnnnnnnnnnnnnnnnnnnnnnnnnnnnnnnnnnnnnnnnnnnnnnnnnnnnnnnnnnnnnnnnnnnnnnnnnnnnnnnnnnnnnnnnnnnnnnnnnnnnnnnnnnnnnnnnnnnnnnnnnnnnnnnnnnnnnnnnnnnnnnnnnnnnnnnnnnnnnnnnnnnnnnnnnnnnnnnnnnnnnnnnnnnnnnnnnnnntgcaaatgttttctgtcttggcttgttacaaatcttcctggatgtgtaggccaccctggggacgagcagcccttcttagggcagaaaattcaccccacgggtgatgattcccacgctgggggtgtgtgaaccactctcacaaggaggaatgtcaatctcgtgagcgggcctgcactctcacggcattccgggcagaagaaccacatgaccatggaacaggagtcaccccctttctgtcacttgtcaacaaatgcggatttttttttttttttttttttttttcctcatatgtaggtagcatgcaccagggtgcgcctctggcggtgcctagggagaacgcgagaagaaaagaatgcaggaagatctggactgcgtctttagggttggcactgggactgtgagtgtcagaggtcctcggttttaacttttaactcccatcacatctcaactgtttccttgtcaacaaatgtgtgtccttttctcataagtgtataccatccacctcggggcccctccttttgtgccttgggacatcgggtgaagtaaggaacgcaggaactttggtgttgttagttttagtgtcagaggttcttgtttttacctttgaacatcaatcacgtctgwactatatcctgtcttcatctgtggttgcataggtcctcaggcacatacaagtatcttctccagtaatgacaagcttctgcctagacaccttcattcacaactgtttcccgtcatctaagcaaccctcaggaggtagttgttaagctttcacgttccctcctgttcatttttcttattgctttctctctgccttcccaatatttgctgatggagtgtgcgggatggggttgaggtgtgggcagcagggaacagggcagtctcctggcccaacagatctttgtgcagacgcggtacagacccgggatttaggggcttatgctttcttctggctggcgccttatcctgtgtgaggacacaggaggctactcacagggctgtcagctttccatatgatgaactctgctttccagtttactctgtaactcattgctcactctgattctttgtgtacttttggagttttcctcccttcacttttttcttcttcactgtctttacttttcgtccgcttctgtttatggaggtcacaatcagccaagaaggcagggtcagttatgcacggggacatggttaaggaaaacaggcttactgtttctaaggaaattagaaggactccagctgaaccctgcgaggagaagttggcatttccttattctttctgccgtgtctccatattgccatgggtggctgattacctcttttccctggtgtccgattcctccccgtttttcatctttttcttttgggtggttcttcactgccttggttttgtagactttgggcttggtggccccttgcagtcagctgatgacatcctcagggtaaggttcagcctacacttgtgtactctgtagttctgcaggccaatttgtggatcaaagttttgatcccactcaggaaagatcccatcgacaagaagcttctcgtttgtatgtcctttaaacgggaggtgacctggggctccttgtcactcattgtgtatgtcaccacacactgaggtcttccttaactagatccttcaggacagctacagtggcatggacctcccactttctgttcttgttctctttctggttattcttcctcttcctcctcctactcttttaattcctcttcytcttttttgttttcttactcttcctcctccatcttctcctcctcctcctccttcttctttccttctcctcttcttttgcctcttcttcttttttgtcttttgcttttgcctctgcttctctttttcccttcactttcagatcaggacagacaagtgttctaggagactgcttcttcttttgctccttggtgattcagcatgtctctctgcagtactaggcctagagaaagcttcacttttgttcttaatttagcactgatgaaggtcaccagtttagtctctctggtataccaaaaaccttcccacatgttgcttttaagtgaaatgtcatggtgaacagatcctttacccagttcctcatggcttgctgttatttcctgttctgttcgtggatgcactaggtgtgtaatcctgagccattaggaagtttggcaagttgtcccgtgtctccttttttttcagtccagccatgtgaacacattgatccggatttcagtttttgcagggtgtctccgccacatgcccatttgcccactctcactcacagaggcaggcacccacagaccacagacacagacacaatacatacactcacaagggaccccccaatcagaaattaaatcacaaacacacacgcacatggagactcatgcacacacagacacaaacacacacattaaacacgcctaagcggacacacacacagatacacacagacacacacacacacacagaagtaagctcacactagtacaaatgtgcgggtttaagcattatcgtacacagacacacacaacacctcaggcacgaaactgcccacaatgtcttccactcgggctgtaaatggggctgtaaatggtggcgtgtggccctcaaactgaggcgggacaagagaggwactccttgctggctcttggcctgccctcattcctaggatggcggcctgtctccacagctgtatgtaagaaagggcagtcggggcggccagccatggcttcccctggcagtctccagaaactgccgggcatgagtcgcccaacactcaacacgccgaagctcctttgtttcctgggtggataggggctttcttgccccactgtggccccagccaagggcatcccagaactgcccacaaaagagaccagattaaacggccccattttctggctgtcagtggccagtggcttcccttatgcgtatctcaaaatggctgctggtgcagctccactctgtgggctgacgggtcttcaggctgcctggctgatctgtctcggggcctctagagtagctgcttctccaagcggttccaatggcaggtacgatttgttctagggctctaaaccccagtcggggaaaccctggcttaggcagagtccacccagtcccgcacattttcgcggatctctgtgcctggcagaaggcaagtgtccctgcagcctgttgtcatgttcagaaacaccttccgctggatggcactgtggctccacagatgacwgtcacgtcttttccttcccttcccttgcctttgtctttctccatttgttgcgaacagaataaaacaaaaacacacacacaaagcgaagaaacaaagaaagaaacgggccaaagagcacccacctcatctacagcagggctccccacctacgtggtcactttgggggaaggtgcaacagtaggagcgttctctgcctccctccttcttctggattcttctctgggcaggggtcccagtgaaccagaggagcctatcctcaatacatcccacccttatggctgtggcatggtgggggtaggtcgcactgggggcagtgtgagtgggtacagggggagaggtgtgtggatgtgtggccctgcatgcaggctgctgcagatttctctaggaatgtgctcagctccccctaggcaagagaccaggccgtatgctgaggtgcacgacacttgtccctaggtagcactcttcctcttggggaagggaccaaatcttgtatggaatgcagtccggtccaacaggcttccgcacattgttgacccatggagcagcaaggagtttggctggatgtttgttgggatgggactggactggaaggactcctgttggaggccttcagctccctctctctctctggagcccaggcactcatctgtgcccaggggtgggaggggtattccaggttgttttacaggtggctgtcctggagagaaagccacttgttatgtctgactgagcatgcgtgctcactggaacgtggtggttcaccagttatttgccccggcatcttggtcattctgcataagtgcatgggtagccaggttccagacagtgctcgccttctcctgggcctgtctttgttcctgttctgcgtgtggaagtagaggtggatcctggaatgtgttgggtgggatggtggtagggcaactgtgccttggtttgatacagagctctctggggtcctcaagctgaactctggtgcttgcgggatattcagccctaaaaatgaatgagtcggtcgaggacaaattttgccggctctttagggtttccaggcagacgtaagaaatcctgacgcgggccatcatacagcccgcttcttgggatgcgaagccatgaccgcgttgctctaaaggttacatatgctacccatgccgctcagtgcctgggcagcagcatggaacacacagctcttcaaatattgcaaatgttttctgtctttgcttgttacaaatcttcctggatgtgtaggccgcactgggaatgagcagagyttcataggacagaaaattcatgccacgggtaatgattctcacactcatgagagtgtgaaccactctcacaagaggaacatcaatctcgggtgtgggcctgcactcccagggcattccaggaagaagactcacatgaccatggaacaggagtcaccccctttctgtcacttgtcaacaaatgcggattcttttttcacatgtaggtagcatgcaccagggggtgcttctgcccyttcctagggacaaagggagaagaaaagaatgcaggaagatttggactgtgtctttggggtggcattgcgactctgagtgtcagaggacctcgtttttaacttttaactcccatcacgcttcaactttttcccatcttcatctgtgcttccatagttcctcagacaaatacacgtatccccacgcacactcacaagtgtctggccagacaccttcattcacctccgggtacagtcgtctaggcaattctcagggggcagtttttcagctttccctttccttcttgtttacctttcttgttgtttcctgtctggcttcccaatatttgctgatggtgtgtgcgggatggggttggggttggggcagtagagagcagggcagcctcctgaaccaacaggcctctatgcagtcgcggtgcagactcgggcttaaggggctgacactttcttcttgctggtggctctttttctgtgaggacacaagaagtcactcacagggctgccagctattcatttggtgcactctgcattccagttccctctcaacctcattgatttctctgattctttgtgtacttttggagattccctcctttcacttttttctccttcactgtctttacattttgtccacttctgtttggggaggtcaggagcagcctggaagacagggttgactggttgcggggacaccctcagggaaaacaggcttacttttcctaaggaaattagaaggactctagctgaccccgtgaggaaaaattggcatttccctcccctttctgccctctctccatattgccatgggtggctgattccctcttttctctggtgtctgattcatccctgtttattatctttttttttggaggtggggtagggggtccttccctgctttggccttgtagacttggtgctgggtggccccttgtagtcggctgatgacatcctcagggcaaggttcagcctgcacctgtgtcctctgtagcttctgcaggcccatatgtggatcaaagttttgatcccactcaggagagatcccattgacaagaagcttcctagttgtttgtcctttaaagggctgtgactatggctctttgtcctttgttgtgtacatcaccatgcattgaggtcttcctgaactagatccttcaggacagctacagtggcgtgaacctcccactttctgttctttttctgcttctggttcttcttcatcttcctccttctaatcctcatctttaattcttcttctcctcttttttatcctcttgctccttctcttccaacatcctcttcttctccttctcctcctccttctcctccatcatctcctccctcctccttcttctttctcctccttctccttctttctgyttctttttcttcttcttcttcttcttgtgcctctgcctcctcctcctttgcctcttctttttttgcttttgcttctgcttcagctttttttccccccttcactgtcggatctgggcgggcaattgttctaggagactgcttcttcttttgctcttttgtgatgtgtgatgttcctctgcaacattaggcctggagaaagcttcactttcattcttaaaggagcacagattgaggtcaccagtttagtccttctggtccaccaaaaagctgccaacatgttacttttaaatgaaatgtcgtggtgaatgaatgcccccttcacccagtacctcatggctcactattatttcccgttctccttctggatgctctaagtgtgtaattctgagtcattatgagatttgtcaagttgtcatctctctccttttttccagtccagccatgtgaacacattgatccggatttcagtgtgtgcaggcagggtgtctctgcacgtccatttgctgactctcactaacaaaggtaggcacccacagaccacagacacagacacaatgcacgcactcacaagggaacatgaaccagaaatgaaatcacaaacacacatgcacacagacacatgcacacacagacacaaacacacacrttaaacaagcccaagcagacacacgcacacacacacacaaacacacagaagtaagctcacactagcaaaggggcgtgggcttaagcattgttgtacacagacacacaccaccacaggcctgaagctacccacaatctcttccacatgggctctaaatgtgcaaaggggaacgggggacaaacaagcattcctggctgcaggtgtgggtcatcatgccatttattgggcaactaaggccttcttctgaacataaatgcaggaagtctgttatcagatwggcccaagcagcaggtgtgaaactggagcatcctgggtcaagctgcttaaaaagggaccccactttggggtaggggtagataaagtccccttrggatccttgtccttgtgtgatgccatgagaatctggtgtgtggtggccttccccagccaacctgtgccaccctcctctcacccttgcctgtgtgaaagcagagtcagacttgagtgaggtgttgagtgtcccctgtgaggagactctggcctcaggccctgtagctgcctgttgagtgggtggccccagtggcccattctggtgacctccatttatgatcccaagttggcaaactctacctgcagttccaggccttgggaagtctcctagtctgggggcaaatccttgtataagacagccgagtggccagcgcctcgtcctggagctgcagccctatgatcccagtcctcctgtggtttcccagaggccatgataatgtgttctttgtcttttactttctgcacctgcgggagccatgaaacctagagaggaccaaaggaagggcaaaggctggctgcctccatagcattcccgcagggtctccaggctactggtccttggtgctagagtcccctgagtttggttgtcagcctgggaccaggtggcttgttcctttctcttctccttatcttttttatttttttctccttcctctttattcacatgggagaaggcagagaccatcagcttagagaagcaaggttatggttgtagttggcatttgtggagccatactgccatcaagtggaaactgtttctggaaatgggagggagctgggcacaagtgctggggaaagcccaggggcacaaaacagatggtggcatggggcccccagactgaagcaggatgagagaggagctcctcactggcccttggcctgggctcattcccaggatggtgccctggctccacagctgcatgtaagaaagggcakttggggcagcccaccatggcttcccctggcagtttccaggaactgccgggcatgagtygccccacactcagcaccccgtagctcctttttttttttttttaccaggaagataggggccttctggccttactgtggccccagccaaggagggcaagctgtaactgcccacagaagaaaccagagtaaaccacttcattctctggctgtcagtggccagtggcttcccttatgcrtatctcaaaatggctggggggcagctccactgtgtggactgactcgtcttggggctgcctggctgccctgtgtcagggcctctagagtaactgcttctccaaggggtcccagtggcaggcactctttgttctagggctctaaaccccagttggggaaaccctggcttaagcagagtccacccagccccgcacattttcactgatctctgtgcctggcagaaggcgagtgtccctgcagcctgttgtcatgttcagaaacatcttcctctgggtggcactgtggctccgcaaatggcagtcacgtcttttccttcccccaccttgccttgtctttctccatttgctgccaacggaataaaacaaatgccaaaaacaaaaagcaaagaaacaacgaagaaactggccaaggatcacccacctcacctacagcagggatccccacctacgtggtcactttgggggaacctgcaacagtaggaggttctttgcctccctccttccctctggattcttctctgggcagggtacccagtgaaccagaggactctgttctcatgaaatcccacccttagggctgtgtcatggtgggggtaggttgtactgggggcagtatgatggggtacaggagagggatgtgtgagtgtgtgggcctgcatgcaggccactgcagattcctctaggaattggcccaggtccccaaagcaagagaccaggcctcatgatggcatgcaccacacttgtccctaggtagcactcttcctcttggggaagggacaaaatcttggatggaaagcagccaggtccaacaggcatccacacattgttgagccatggagcagcagggagttgggtcggatgtttgttgagatgggactgcatgggactgactcctgttcgaggccttcagctacctctctctctggagcccaggcactcataggggtccaggggttggagggattttccaggttttttcacaggtggctctcctggagagagagccacttgtcatgtcttactgagcgtgcatgctcactggaacgtggtggttcaccagttatttgccttggcatcttggtcattcttcccatgtgcatgggtagccagagcccagacagtgcttgccttctcctgggccctatctttgttcctgttctgcgtgtcgaaatggaggttgagcctggagtgtgttggtggggggtgtggtggagtgtctgtgcctttgtttgatacagagctctctgaggtcctcaagctaaactctggtgcttgccggatattcatccagaaaaatgaatgagacagtcgaggacaaattatgctgcccctttagggtctccaggaagacataagaaagcctcacttgggccatcatacagagcccattttgggatgcgaagccatgaccgcgttgctctaaaggttacatatgctacccatgctgcttgatgcctgggcagcagtatggaacacacagctcttcgaatattgcaaatgttttctttctttgcttgttacaaatcttcctggatgtgtagaccacactgtgaacaagcagagcttcataggacagaaaattcaccccatgggtattgattcccacactcaggggtgtgtgaaccactctcacatcacaagagcagtgtcaatctcgtgtgtgggcctctactctcagggcattctgggaagaagacccacatgactatggaacaggagtcacccccttttggtcacttgtcaacaaatgcagattcttttctcataagtaggtagcatgcaccacggggcacctccggccctgcctaggtacaatgggagaagaaaagaatgcaggaagatctgactgcgtctttaggagtgacatggcaactctgagtttcagaggtcctcgtttttaacttttaactcccattacgtctcaacattttcctgtcttcatctgtgcttccaaaggtcctcagatacatacacatctcaccatgcatactaacaagcacctgcccagacaccattcactcccagatctggttgtctaggcaactcttaaggggcagtttctcagctttcaggttccctcttgttcacctttcttgtcgctttctgcctcacttcccaatatttgctggcagatcgtgcggatggggttggggtgggcgcagtggggagcatggcagcctcctggcccaacaggcctctgtgcagatgtggtgcaaacccagtcttaaggggctgacgctttctcttggctggtggctcttcttctgtgaagccacggaaggccactcacaaggctgccagctgtccacctgaggcactctgcattccagtttgctctcaacctcattgctcactctgtttctccgtgtacatttggagttttcctcccttcacttttttcttcttcactgtctttacgttttgtccacttttgtttggcaaggtcaggagcagcctggaagtcatggtctactgggggaggggtcacccttagggaaaacaggcttacttttcctaaggaaattaggataactctagctgacccctgtggggagaaattggcatttccctcccatttctgctctgtctccgtattgccattggtgggtgactacctcttttccctggtgtccgattcatccccatttattatcttcctcttttttggggggtccttccctgccttggccttgtagacttggggcagggtagctctttgcagttggctgatgacattctcagggcaatgttcaacctgcacctgtgtcctctgtagcttctgtaggcctatttgtggatmaaagttttgattccactcaggaaagatcccaacgaaaagaagcttcctgattatttgtcctttaagcggaacatgaccagtggctccttgttcctcattatgtatgtcaccatgcattgacgtcttcctgaactggatacttcaggactactacagtggcatggacctttctgttcttgttctccttctgatttttcttcctcttcctcctcctactttttttctttaattttcctttttttatcctcttgctcctcctcttccagttcatcttctccatcttcttctactcctatttttcctcctcctcctccttcttcttcttattgttgttgttgttcttcttcttcttcctcttcctcttcctttctttctccttcttcttcgtcctcctcctcctctgtctctttttttttctttttaatttttttttctttgcttttgcctcttcttatgcttctctttttcacttcacttttggatttgggtgggcaagtgttctaggagactgcttcttcttttgctccttggttatgctggatgtctgtctgcagcactaggcctggagaaagcttcactttctttcttacaggagcacagatgaaggtcatcagtttagtccctctggtccaccaaaaagctgcccacatgttatatttaagtaaaatgtcgtggtgaacgcacccttacctcgtacctcatgggttgccattatttcccattctccttaaggatgttggaagtgtgtaatcctgagccattaggagctttggcaacttgtcctctgtctcttttttttccagtcaagccatgtgaacacattgatctggatatcagggtgtgcaggcagggtgtctctgccacgtgttcatttgcctactctcactcacacaggcaggcacccacagaccacagacacaatgcacttactcacaagggaccctgcaaccagaaataaaatcacaaacacatgcacacaaagagacacatgcacgtgcagacacaaacattcatgtcaaatacgcccaagcagacacacacacacacaaacacacacaagttaactcacactagcaaaggggtgtgagctcaagcattattggacacagacacacacaccccaccacaggcccaaaactgcccacaatctcttccacactggttctaaatgtgcaaagcagaatgtgagacaggcgagcattcctggctccaggcctgggtcatcatgccatttattgggcaactagggccttctcctgagaatgaatgtgggaagtctgttatcagataggcccaagcagcaggtgtgaaactggagcatcctgggtcaagctgcttaaaaacggaccctgcaaccagggtaggggcagagaaagtcccctcaggagccttgtccctatgggatgccatgagaatctgtggcacgtggtggccttcctcagcctccctgagccaccatcctcccaccccgcctgtgtaaaagccaagacagcctgagcagagtcagacttgagtgagttgctgagtgtcccccgtgagggagactccgggattctggtgacctccatgtgccatcccaaggtggtaaactctacctgcagctccaggctttggaggaccctcagttctggggaaaattgttttgtaatccagctgagtggccagcgccttgtcctggggtggcagccctgtgatcccagtcctcctgtggtttcccagaggccatgattatgtgtcctttgtcttttactttctgcactggtgggagccataatacctggagaggaccaaaggaagggcaaaggctggctgcctctacagcattctgcaggatctccagtctacaggtccttggtcctagggtcccctaaatttggtggtcaacctgggaccaggtggctggttcctttgtcttctccttgtcttttttttctccttcctctttacttttttcacatgggaaagcatggagggcctcagcttggaggggcagttgaggtagtagttggcatttgtggagccatactgccatcaagcggaaactatttctggaaacgggaggcagctgggcacaactgctggggaaatccgaggggcacaaaagagatggtggcgtgtggcccccagactgaagctggatgagagaggaaccccttgctggcccttcgcctgggctcattcttaggatggcaccctggctccacagctgtctttaggaaagggcagtcaggccggctgtgagcaagcagagcttcataggacagaaaatggcttcccctggcagtctccaggaactgccaggcatgagtcaccccacactcagcatcctgaagctccttttcctcccgggagggtaggggctccctgttccccctgtggccccccaagggcacctcggagctgcccacaaaagagaccagggtaaacagccccattctcatccatcagttgccagtggcttcccttatgcacatctcaaaatggctgctggggcagctccaccctgtgggttgactggtctgcaggctgcatggctgctctgtctctgggcctctagagtagctgcttctccaaggggtcccaacggcaggtacgctttgttctagggctctaaaccctggtcggggaaaccctggctcaggcagagtccacccagccccgcatatttttgctgacctcggtgcctagcagaagrcaagtgtttccgcagcctgttgtcatgttcagaaacaccttctgctggatggcactgcgactccacaaatggcagtcatgtcttcttcttcccccactgtgccttcgtctttctccatttcctgccaactgaacaaaaccaacacaaaaaaacaaaagcaaagaaacaaagaaagaaactgtccaaggagtacccacctcacctacagcaggtctccccacctacgaggtcactttgcggaaacctgcaacagtaggagggttctctgccttcccccttccctctagattcttctctggtcaggggtcccagtgaattagaggatcctatcctcaatacatcccacccttaggcggtggcatggtgggggtaggttgcactgggggcagtgtgagggggtacagggggaggggtgtgtgggtgagtgggcctgcgtgtgggcccctgccgattcctctatgaatctgcacaggtctcctaagaagagaccaggccgaatgctggtgcacaccacacttgtctctaggcagcagtctttttcttgctgaaaggttaaaagcttggatggaaagcagccagttcaaacaggtatccatacattgttgacccatccagctgcagggattcgggccagatatttcttgtgatgggactggatgggagggactcttgtctgagaccttcagcgacctctctcactggagcccaggcactcattcgtgcccagaagtgggaggggtatttctgggtgaatttcacagttggctcttctggagagagagccacttggcatgtctgatagagcatgcatgcttactggaacgtggtggttcaccagttagttgttctggcatcttggtcattctgccaaagtgcatgggtagctcgctttcacctgggcctgtctgtgttgctgtgctgcgtgtgaaaggagagattttatgtggagtgttttaatttgtggttgggcaattgtgccttggtttgatacagagctctctggggtcctcaaggtaaactctggtgcttgctggatattcatcccagaaaatgaatgagatggtcgaggacaaattatgccggccctttagggtctccaggcagacataagaaagcctgacgtggtccatcatacaaagcccatgttgrgatgcgaagccatgaccgtgttgctctaaaggttacatatgctacccatgctgctcagtgcctgggcagcagcttggaacacaatgctctctgaatattgcaactgttctctgtctttgcttgttacaagtctttcttgatgtgtaggctgcactgggaacaggcagagtttcacaggacagaaaatttaccccatgggtaatgattcccacaatcaggggtgcgtgaaccactctcacaagaggaacgtcaatctcgtgtatgggcctgcactctctgggcattccgtggmgaagacccacatgaccatggaacaggcttcacccgatttcttttaattgtcaacaaatgcaggtccttttttcatatgtaggtagcatccaccacgggcgcacctctggccctgcctagggaaaacgcgagaataaaagaatgcaggaagatctggactgtgtctttaggggtggcattgtgactctgagtttcagaggttctcgtttttaacttttaacccccattatgtctcaactttttcctgtcttcatctgtgcttgcataggtcctcaggcacatccatgtatccccacccatgctcataagtgtctgcccagacaccttcattcacacctgtgtctggtcctctaggccgctctcagtgggcagtttttcaggtttccggttccctcttcatctttcttgtccctttctgtctgacttcccagtatttgttggcataatgttcaggatggggttggggtgggggcagcggggagcagggcagccccctggcctaacaggcctctgtgcrgatgtggtggagatctgggattatgggactgactctttctcctggctgatggctccctctctgtgagcccacaggaggccacttgggctgmcagctgcccacctggagcactctgcattccagttcactctcaacttcattgctcactctgattctttgtgtagttttggaggttttctcccttcacttttttcttctttactctttttacttttcattcacttttgtttggggaggtcaggatcagcctggaagtcagggtcaactgggctagggaacacccttagggaaaacaaacttatttttcctaaggaaattagaaggaccccagctgatccctgcaaggagtgattggcatttccctttcctttctgccctctctccatattgccatttgtggctgattatctcttttccctgatatatatttcctccccgtttttcatcttcctctctttttgggggtccttccctgccttggccttgtaggcttggggctcagtggttccttgcagtctgctgatgacatcctcagggcactgttcagcctacacctgtgtcttctgtagctcctgcaggactatttgtggatcaaagcttttgatcccactcaggaaagatytcattgacaagaagcttctcggttgtgtgtcctttaagtgggacatgaccggtggctccctgccactcgttgtgtatgtcatcacacattcaggtccccctgaactagatccttcaggagagctacagtgtcatggacctcccacttcctattctttttctccttctgtttcttcttccttttcctactcctgctcctcttctttattgttcttttcctcctttcctcctcctcctcctccaactccctctccttcttcttctttttctttccctcttcttctttcttcttcttcttcctcttcttccccttccctccttctccttcttcttcttcctcttcctcttcttctctccttctttccttttcctcctccttctccttcttcttttcttctttgacttctctttttgccttctttttctttctctccttcttttctatttctccttctacatctttttttctacttttcttctccttcttcttctacttgttcttctttctttcctttttttttcacttttggatttctgcatgcaaatgttctagcagattgcttcttcttctccttggtgatggggaatgtccttctgcagctctaggcctcaagaaatgcttcacttttcttcttaaaagaacagcgatgaaggtcaccagttcagtccttcttttccaccaaaaagctgtcctcgtgttacttttaagtgaaatgtcatggtaaacacaccctgtacctagtaccttatagcccaccattctttcctgttctccttgtggactctctaaatgtgtaaacctgagtcagtaggagcctcagcaatttgttacattgttcccctattgcctttccttccagtcaggccaggtgaacaaaacgatatggatttcagtgtgtacagtcaggctgtctctgccatgtgccaatttgcccactctcactcacacaagcaggaactcacagaccacagacacagaacacatgcacacactcacaagaaaccccacaaccagaaatgaaattacaaaacccatacacacatggagatacatgcagatgcagacacaaacacacatgcagacacacacacgcaggcacactgacacataaagtcacacatacacaaccagaccaataaacaggtaacctcacatgggcacaggggttggggctcaagcattctcacacttagaggtaaacaaacacacaaagccacaggcatgagactgcccacactgtctcatacgggctcttaatctctgacaagcaatgggctatgggcaagcattcctggcttcaggcctgggtcctcatgccattgattgggcaacttggctttctcccaaaaatgaatgcgggcaatcttttatcagaaaggccacagcagcagatgtgaaactggagcatcctgggtcaacccgcttaaaaacagactcccctttcagatagaggcagagagagtcctgttgggatccttagccctttgtgatgtcatgggaatctgtggcaacgtggtggcctttttgagtccccctaagccacatcctcccacccctgcctgtgtgaaagccaggacagcctgtgcagagtcagacttgcrcgagttgctgagtgtgctttctaagggatacacctgcctcaggtcctgtggctccctgttgagcagtctgcccgttctggtgacctccatctgccagcccaaggcggtaaactacctagagcctttgggaggactcctagtcctgcagtaaaaccttgtgtaagccagctgagtgaccagcaccttgtcttggaacggcagccctttaatcccaagcctcttgtgtcccagtgcccatgattatctgtcatttgtcttttactttctgcaggagcargagacatgaaacctggagaaggccaaagaagggcaaagactggctgcctaaacagtattcctgcagggtctccagcctactggtccttggtcattgggacctgtgagttttggtggtcaacctgggaccagttggctcgttcctttctctccctcctgtctttttctcgttctccttcctatttgcttttttcacattggaaaaggtggaggccctcagggtggaggagcagggttacaactgtacttggcgtttgtggagccatagtgccatcaagtggaaattgtttctggaaatgggaggcacctgagctcatgtgctgaggaacgctcgggagtgccagacagatggtggtgtggagcccccaggctgaagctgggagaggaactcctgtctggcccatggtctatgctcattcccaggatagcgccctggctccacagctctctttgtaagaatggacaggcaggggcggcccaccatgggttcccctggcagcccccagagactgcttggcatgagttgccccaccccagcatcccaaaacttctttgttcccagggaggatagggtgcccctgtccctgcgtggccccagccaagggcacccctgaactctccacaaaagagaccagagcaaatggccccagtctcggcagtcagtgaacagtggtttctcttaaacccatttcaagatggggaagctccgcccactgggctgactggtcttggggctgccagactgttctgtccccgggcctctagcttagctgcttcttcatggagttccaatggcaggtacacttccttaagggctctgaaccccagtgggggaaaccctggcttgggcctagtctacccagcctggcacatcctcgctgatatctgtgactggaagaaggcaagtgtccttgtagtctgttgtcaagaaacaccttccgccggatggcactgtgactccacaaatggcaatcaccccttttccttcctccactttgcctttctctccttccttttgctgccaaccaaacaaaacaaacacacacaaaaaaaacaaagaaacaaagaaactgcccaagcagcacccacctcatcttcaacagggctccccacctatgtggttactttggggaaacttgcaacagtaggagtgatgtctgcctctcctaccctctggattcttctctgggcagggggtcccagtaatccagaggagcctatcctcaagaaatgctatgcttttgctgtggatttgtagcaccgggggcagtgtgagggggtaaagggggaggggtgtgtgggtgtttaggcctgtgtgtgggccgctgcagattcttctatgaatctgcacaggtctcctcagaaggagactggtgcctgcctagggaaaacataggaagaaaagaatgcaggaagatctggactgtgtccttaggggtggcaaggtgactttgagtgtcagaaatcctcatttgtaatatttaactcccatctcatctaacttttttcctgtcttcatctgtgcttctatatgttctcaggcacatacatgcatccccaccaatactcactaaaaggtgtctgcccaggcacctgtgctcacactcagatccccacatctaggtaactctcaatgggaagggttcttcagcttcccggttttctcttattcatttttgttctccctttctgtctggcttcccagtatttgctggtggagtgtgtgggatggtgtgggggtggggkcagtgtggagcagcgcagtctcttggctccactggcctctgtgtggacccagtacaaaccctggcctaagggtctgatgcttttctctggtaggtgactcttcttgtacgaaggcacaagaggccatttgggcagccacctttccacctgggatatcctgcatttcagttcactctcaacctcattgctcaccctgattctttgtgtacttttggagtttttcttccttcacttttttcttcttcactctttacttttcatcaatttctggtttagggagttcaggatcagcctgcaaaagcagggtcgggtgggcacaggaatgtccttagggagagtaagcctacttttcctaaggaaatcagaaggacccgggctgaaccctgggggtgtaagcagcatccccctcccctatctgccttctgtcagtgttgccataggtggctcattacctcctttctctggtatccatttcctccccgttttacatctctcctcccacccatttccggggtacttccctacccaggccttgtagattagaagcccgtggccccttgcagtgcgctgatgacatctggagggcatggctcagcctgcacctctgtcctctgtagcttctctaggcctacttgtagatcaaagcccttgataccactcggaaaagaacccatcaacaagaagcttcttggtgttgtgtcctttcaccgggacatcacaggtttctctttgcctcttgttgtgtatgccaccatgcagtgaggcacccctgaactaggtccttcaggacagctgctgtggcgtgaagctgccacttcttgttcttattgtctttctggttcttcttcctcttcctcctcctcctcttttttctttttctttttcttctactccttctccttctccttctcatttttctcttctttcttctctttttcctttcacttttggctcttggcgggtcaagcattatactgagactgcttcttcctctgctcctggtgatgcaggatgcccctttgcagaacaaaagtgagaaaggcctcatttgttcttaaaggagcagatatgaaggtcaccagttcagtccctctggtgttccacaaaggcgccaatgtgttacttttcatgaaatgtcaccatgaacccaccccttaacctgttcctcatggctcaccattctttcccattctctttgtggatgctctaaatgtgtaatcctgagccagcaggagccttggcaagttgtccccctttgtcttttctttcaatccagccatgtgaacacaacgatccagatttcagtgtgtataggcaggctgtctctcccacgtgcccatttgcccactctcactcacacaggcaggcacccagagaccacagacacagacacaaccacatggactcacagggaaaccccgacaaccacaaatataatcacaaacacacatgcacagggagatacacacacagacacaaagacatacactaacacatgcacactcacaaactcatagacacacacacacacacacacacacacacaaatcctcacacaggcccaggggtgcgggctcaagcattcacccacacagacgcacacacacatgtgtcgccatagccaccagactgcccacgaactctcccataaaggctctcagtcggccacaggcaatgggctatgggtgaggattcctggctccaggcctgggtcattatgctgttgattgggcacctaaggccttctcctgagaatgaatgcgggaagtctgttatcagataagccccagcagccagtgtgaaactggagcctcctgggtcaaccygcttaaaaagggaccacaccttgggtagaggcagacagtccccttgggacccttggccctctgtgatgccatgggaatctgtgttgcgtggtggccttccccagttcccctaagccaccctcatgtcacccctcccccccaccccatgtgaaagccaggacagcctgcacagagtcagacttcagtcagttgctgagtatcccctctgagggagattcctgccacacgccctgtgactgcctgttgagctgttcgctcattttggtgacctccatgtgccagcccaaggtggtaaactctatctggagctccaggctttgggagaaccaccagtcctgcagcaaaaccttgggtaattcagctgggtgaccagcaccttgtcctggggcggcagccccatgatcccagtcttcctgtggtttcccagtggccatgattatgtatcatttgtcttctatttttctgcatgagcatgagccatgaaacctggagagggccaaaggaaaagcaaaggctggcggcataaagaggatttccgcagtgtctccygcctactggtcctaggtcgtagggtcccttaagtttggtggtcaacctgagaccaggtggctggctcctttttatcctccctgtcttttttttgtttctctttcccttttctttttttcacattggaaagggtggaggccrtcggattggaggggcagggttaagcttgtagttggcctttgtagagccatagtgccatcgagcggaatctgtttctggaaactggaggcagctgggcatgagtgctggagaaatcccaggagcacgaaagagatggtggcggtgtggggcccccaggctgaagctggacgagagaggaactcctggctggccctttgcccttgctcattaccaggatggcacccgggctccacagccctctccgaaaaaagggcaggaaggggcggccctccatgggttcccctggccatctccaggaattgccgggcaggagtcgtcccgcccacagcaccccacagctccttggttcactgggaggataggggacctctggccccagcgtgattccaggcaagggcaccccagaactccccacaaaagagaccagtgtaaacgaccccagtctcggccgtcagtagtcagtggcttcccttaagcccacctcaagatggctgccagggcacctccgcactctggactgactggtcttggggctgcctggctgctctgtccctgggcctctagattagctgcttctccgtggggtccaaatggcaggcacacttccttcaaaggtttaaaaccgcgatgggggaaactctggcttagtcagagtccacccagcccgacatattctcgctgaagtctgtgcctgtcagaaggcaagtatccctgcagccggtcgtgttcagaaacaactgccgctggatggcagtgtggctccagaaatggcagtcacttatttcccttgcttttctctttctccttttgcttccaacaaaacaaaacaaaacaaaaagaaaagaaagaaagaaagaaaccggccaaggagcgctcacctcatctacagcaggactccccacctacatggtctctttggggaaacctgcaacatgcgaaaggctctctgcctccctccttccctctggattcctctctgggcaggggtcccagtgagccagaggagcctatcctcaagaaatcccacccttggggctgtggcatggtggggataggtcgcactgggggcaatgtgaaggggtatgggggaggggtgtgtgagtgcatgggcctgcttgtaggccactgctgattacttctctgaatttgcacaagcctcctaaggagaccaggctgcctgcttgtgagcactacgcttgtaaatagggaacacactgtttcttggggaagggacaaaagcttggatcaaaagcacccaggtccaacaggcatccatagattgttgacccttctagcagaagaaggtcgggccaggtgtctgtcaggatgagactcgacagattggacacctgtcccaggccttcagctacttttctcactggagcccaggcactcatccatgcccaagagtaggaggggtattctgggtggcttccacaggcggctctcctagagaaagccacttggcatagctgatggagcatgtgtgctcactgaatgtgatggctcaccagttaattccccgggcatcttagtcattctgccaaatacatgggtagccaggccccagccatgctcactttcgcctgggcctcctctgtgttcctgtgctgggcatggaagtgaaggttgaggctggcgtgtctttgcagatggtgaggtggctgttccttggtttgataccgagcwctctgggctcctcaagctgaattctattgcttgtcagattattcagcctggaaaatggatgagacagtggaggacaaattgtgccaccccttttgggtctccaggcagaaatgggaaagccatgcatgggtccttcatacagaacacttgttgagatgcaaagctgtggcctcattgctctaaaggttgcatgtcttacccatgcctctcagtgactggagagcagcatggaacacaaccatctcagaatattgcaaatgttttctttcttcgcttgttacaagtcttcctggatgtgtaggctgcactgggaacgtgcagagctttagaggagagaaaattcaccctacaggttatgattcccacactcagaggggtatgacctactctcacgaacgtcagtttcatgcatgggcttgcactctcagggcattccaggaagaagggcaacagtaccatggaacaggaatcactccctttctgtcacttgtcaacaaatgtggatccttttctcatgtgtagtaatcaccatgggggcacctccagtgcctgcataaggaaaatgcaagaagaaaggaatgcaggaagatctggacagagttcttcggggtggcattgggagtctgaatgtcagaggtcctcatttttaacatttaactcccatcacatctcacctttttcctgtctttatctgtgcttccatacatcctcaggcacatacatgtatcctcacccatagtcactcaaaagtgtaggcccaggcacctcccrtaaaacctggatcccattgtctagacaactctaactgggcagggttcctcagcttccaggttctcttttgttcatctttcttgtccctatctgtgtggctttccaatatttgctggcagaggatgcaggatggggtggtggtgggggcagtggggaccagggcagcctccaggcttgccaggcctctgtgccaatgtggtgcagacctgggactaaggggctgactctcttggctgatggctcttcctcctctgtgaggccacaggaggccacttgggctactacctgtctacttggtacactctgcattccaattcactctcatcctcattgctcactctaattctttgtgtacttttggagtttttctcccttcactttttttttattatacttaaagttctggggtacatgtgcagaacacgcaggtttgttacatagatatagacgtgccatggtggtttgctgaacccatcaactcgtcacctacattaggtatttctcttaatgctatccctcccctagctccccaccccatgacaggccccggtgtgtgatgttcccctccctgtgtccatgtgttctcattgttcaactcccacttatgagtgagaacatgtggtgtttggttttctgttcttctgttagtttgctgagaatgatggtatccagcttcatccatgtctctgcaaaggacatgaactcatccattttatggctgcatagtattccatgatgtatatgggccacattttctttatccatcttatcattgatgggcatttgggttggttccaagtctttgcttttgtgaacagtcccgcagtaaacatatgtgtgcatgtctctttagagtagaatgatttataatcctttgggtatgtacccagtaataagattgatgagtcaaatggtatttttagttctagatgcttgaagaattgccacactgtcttccagagtggttgaactaattgacactcccaccaacagtgtaaaagcattcttatttctccacatcctcttcagcatctgttattttctgactttttaatgatcaccattgtaacgggcatgaaatggtatctcattctggttttgatttgcatttctctaaagcccagtgatgatgagcttttttatatgttcattggctgcataaatgtcttctcttgagaagtctctgctcatatctttcgcccactttttgatggggttgtttttttcttgtaaattggtttaagttctttgtagattctggatattagccctttgtcagatgggtagattgcaaagagtttctcccattctgtaggttgccttttcactctgatgatagtttcttttgctgtacagaagctctttagtttaattatatcccatttgtctattttggcttttgttgccattgcttttggtgttttagtcatgaagtctttgcccacgcctgtattctgaatggtattgcctaggttttcttctaggttttttatggttttaggttttaggtttaagtctttaatccatcttgagttaatttttgtataaagtgtaaggaagggttccagtttcagctttctgcatatggctagccagttttcccagcaccatttattaaatagaaaatccttccccatggcttgttattgccaggttcatcaaatattaggtggctgtagatgtgtggtgttatttctgaggcctccattctgttccattggtttatatatctgttttggtaccagtatcatgctgttttggttactgtagccttgtagtgtagtttgaagttaggcagcgtgatgcttccagctttgttctctttgcttaggattgtcttggctatttgggctcttttttggttccatttgaactttaaagtagtttttttctaattctgtgaagagagtcaggggtagcttgatggggatagcattgaatctataaattaccctgggcagtatggccattttcatgatattgattcttcccatccatgagcatggaatgtccttccatttgtttgtgtcctcttttatttcattgagcagtagtttgtagttatccttaaagaggtccttcacatcccttataagttggattcctagggattttattctctttgtagtaattgtgaatgggagttcactcatgatttggctctgtgtttgtctgttcttggggtataggaatgcttgtgatgtttggacattgattttgtatcctgagactttgctgaagtagcttatcagcctaaggagattttgggctgagacgatggggttttctaaatatacaatcatgttatctgcaaacagagacaatttgacttcctctttttctaattgaataccctttatttctttctcttgcctgattgccctggccagaacttccaatactgtgttgaataggagtggtgagagagggcattcttgtcttgtgccagttttcaaagggagtacttccagttttttcccattcagtatgatattggctgtgggtttgtcatgaatagctcttattgttttgagatacattccatcaatacctagtttattgaaagtttttagcatgaaggctgttgtatttgtcggaggccttttctgcatctattgagataagtgtgtggttttttgtcattagttctgtttatgtgatggattaagtttattgatttgaatatgttgaaccagccttgcatcccagggatgaagccgacttgatcgtggtggrtaagctttttcaaatgctgcctaaawtcctctttctttgttgtgtctctgtcaggctttggtatcaggaygatgctggcctcataaaagttggggagttagggaggattccctctttttctattgtttggaatagtttcagaaggaatggtaccagctcctctttgtacctctggtagaattcgtctgtgaatccgtctggtcctggactcttttttggtcagtaggctattaattgctccctcaatttcagagcctgttattggtctattcagggattcaacttcttcctggttttgtcttgggagaaggtacatgtccaggaacttatccatttcttcaagattttctagtttatttgcatagaagtatttatagtattctctgatggtagtttgtatttctgtgggatcagtggtgatatcccctttatcattttttatcacatctatttgattcttctctcttttcttctttattaggctrgctagaggtctatctattttgttgatcttttcaaaaaacgagctcctggattcattgatttttttgatgggtttttcttgtctctgtattcttcagttctgatttgatcctagttatttcttgccttctgctagattttgaatttgtttgcttctgcttctctatttcttttaaatgtgatattaggttgttgattttagatctctcctgctttctcttgtgggcatttagtgctataagtttccctctccacactgctttaaacgcatccctgagattctggtacgttgtgtctttgttctcattcattcaaggaacatatttatttctgcctttatttcgttatttacgcagtagtcattcagatgcaggctgttcagttttcatgtagctgtgcggttttgagtgagattcttaatcctgagttgtaatttgattgcactgtggtcttagagactgttataatttccgttcttttgcatttgctgaggagtgttttacttccaattatttggtcagttttagaataagtgcaatgtgctgctgagaagaatgtatattttgttgatttggggtggagagttctgtagatgtctattaggttcacttggtccagagctgagttcaagtcctggatatccttgttaattttctttctcgttgatctatctaatattgacagtggggtgttaaagtctcccactgtttttgtgtgggaatgtaagtctctttgtaggtctctaagaacttgctttatgaatctgtgtgctcctgtattgagtgcatatatattgaggatagttagctcttcttgttgcattgatttatttaccattatgtaatgtccttctttgtctcttttgatctttgttcatgtaaactctgttttatcagagactaggattgcaacccctgctttttttggctttccatttgcttggtaagtattcctccatctcttttgttgagcctgtgtgtgtctttgcatgtgggatgggtctcctgaatacagcacaccaatgggtcctaactctttatccaatttgccagtctgtgcttttaattggggcatttagcccatttacatttaaggttaatattgttatgtgtgcatttaatcctgtcgttatgatgctagctggtttttttgcctgttagttgatgcagtttcttcatcatgttgacagtctttacaatttagtatgtttttgcagtggctggtactggttgatccttccatgtttagtgcttccttcaggagctcttgtaaggcaggcctggtggtgacaaaacctctcagcatttgcttgtctgtaaaggattttatttctcctttgcctatgaaacttagtttggctgaatatgaaattctgggttgaagattcttttctttaagaatgttgaatattggcccccactcttttctggcttgtagggtttctcccgagagacctgctgttagtctgattggcttcccttgtaacccaacctttctctctgtctgcccttaatattttttccttcatttcaaccttggtgaatctgacaattatgtgtcttggggttgctcttctcgaggagtatgtttgtggtgttttctgtatttcctgaatttcaatgttggcctgccttgctagattggggaagttctcctggataatatcatgaagagtcttttccaacttggttccattctccctgtcactttcacgtacaccaatcaaatgtagttttggtctttccacatagtcccatatttcttggaggttttgctcatttcttgttactcttttttctctaatcttgtcttcttgctttattttattgagttgatcttcaatctctgatatcctttcttctgcttgatccattcagctattgatacctgtgtatgcttcacgaagttcttgtgctgtgtttttcagctccatcaggtcatttatcttcctctctaaactggttattctagttagcaattcatctaaccttttttcaaggttcttagcttccttgcattgggttagaacatgttcctttagcttggaggagtttgttattactcaccttttcaaggctacttctgttaatttttccaactcattctctgtccagttttgttcctttgctggtgaggagttgtgatcctttggaggagaaaaagtgttcggtttttggaattttcaacctttttgtgctggtttctccccatcttcatggatttatctacctttggtctttgaagttggtgaccatcagctgaggtctctgattggatgttctttctgttgatgttgatactattcctttctgtttgttagtttttcttctaacagtctggctcctctgctgcaggtctgctggagttttgctggaggtccactccagaccctgtttgcctgggtatcactagcggaggctgcagaccagcaaagattgctgcctgttctttcctctggaacctttgtcccagagagacacctgccagatgccagccagagctcttctgtatgaggtatctgtcagttcctactgggaggtgtctcccagtcaggatacatgagtgtcagggattcacttgaggaggcagtctgtcccttatcagagctcaaacgctgtggtgggaratctgctgctctattcagaggtaccaggcagggacgtttaaatctgctgaagctgcacccccaactgttccttcccccaggtgctctgtcacaaggaggtgggggttttatctataagtccctgactggaactgctgcctttttttcagagatgccctgtgcagagaggaggggatctggagaggcaggttggccacagtggccttgctgagctgcggtgggctccacccagttcgaactttccagcagctttgtttacactgtaagggtaaaactgcctacttaagcctcagcaatggcatatgccactccccccaccaagctccagggtcccaggtcaagctcagagtggtgtgctagcagcaagaatttcaagccagtagatcttagcttgctgggctccatggggttgggacccgccgagccagaccggttggccccctggcttcagcctcctttccaagggagtgaatggttttgtctggctggacttctgagtgccactgaggcatgaaaaaaaaacaacttttgtggctagcttggtgtctgcccaaacggccacccagttttgtgctagaaacccagggccctggtggcatgggcactggagtgaatctcctggtctgcgggttgtgaagaccatgggaaaagtgcagtgtctgtgctggagtgcatggtatagtccctaatggcttcccttggctaggagagggagttccctgacaccttgcactttcttggtgaggtgacacccctaccctgctttggctgaccctccttgggctgcacccactatccaaccagtcccagtgagatgaacctggtacctcagtttgaaatgcagaaatcayccatcttctgcatcgatctcgctgggagctgcagactggaactgctcctattccaccatcttgccagcttcccacttttttttatcttcactgtctttacttttagtccacttgtggtttggggagggtcgggtgggcacaggcacatcattagggagaacatgcttacttttcctaagaaaattagatggatcctggctgacccctgaagtgcataatcagaatccccctcctctttctgccctccctattgccataggtggctgattacctctttttcttggtgtccggtttctccccatttttcatctctcctcccatttccagagtccttccctcccttggccttatgtactagggacttgatggccccttraagtgtgctgatgatattcagagggcaagattttgcctgyacctttgttctcttttgctcctgcaaggctacttgtggatcagagcccttgatcccactcagaaaggaccccatcaatgagaagcttttcagtggtgtgtcctttcacccggacgtcactcatatctctttgtcacttgttgtgtatgtcaccacgcagtgatacacccctgaactagatctttcaggacagctttggtgacacgaagctgccacttgttgttgttctttttctcctctttctttcttcttcttcttcctttttcctttcactttcagctctctgcgggacaaatgttctatcgagactgcttcttctgctcattggtgatgggtgtgtccccttgcagcaccaggcctggaaggaggcttcactttcatttttaaagaagcagagatgaaagtcaccagttcagtttctctggtgaacaatgagaacacttggacacagggtggggaacatcacacaccggggcctgtcttgctgtgaggggagggggagggatagcattagagatatacctaatgtgaatgatgagttaatgggtgcagaacaccaacatggcacatgtatacatatgtaacaaacctgcacattgtgcacatgtaccctagaacttaaagtatatatataaaacaccacccaggagttacttttaagtgaaatgtcatcgtgaattcatggatttcccagtacctcttggctcgctgtttgtccccattctttttgtggactctgtaaatgtccaatcctgagccagtgggagccttggcaagttgtgtcctgttgcctttctttccagcccagccatgtgaacacaacagcgatccacatttcagtgtgtacaggcaggctgtctctgccacgtgcccattttcccactctcactcacacaggcagatgcccacagaccacagacacacccacacacgcactcagaagggactccacaccccaaaacataatcacaaacacacaagcagagaaacacacaagaaacttgacacgggcacaagggtgtgggcccaagtgttcccccacacagacatgtacgcacatgcacccccacaggcataacactgcccacaaactctcccatrcaggctctgaatcaccacttgcgatgggcatgcttttttgtctccaggcctgggtcatcatgccattgattgggtaacttgggcgttcctttgagaatgaatgcaggaagtctgttatcagataggccccagcagttggtgtgaaactggagctttcttggtcaaactgcttaaaaacttacactcggaaaggatcccatcatcacaaagcttcttggttgtgtgttttttcacggggatgtcactggtgtctctttgccactcccgttcattgtcattgcttcttctcagtctgattcttttgtctttttttttgtttttcattttttattttcactgctttacattatttttaacataattggtatcagtttcagtttttttcttttgtgtttttcaatttgttcttttacttttttatttagtactttcagattgtaattgatttttgcattttctttctatcaatttttctggaccgaaggtagtcattttaggtggtgaatttttcttcttcccagtggtggattcatagtgatatcttatcttcttttaatttcatggtttttgagtctttttttattgagttgtttttgagtggttattgaatggctttattgaatgttatatgmaatattttttctccatttattttactctgtaacttttttttttcgkggcttatcagggcatttaaraaacagttttattaaagttgattatatatcaattagggattattaagtcattattttaagaagatcatttctcttttgcatcatatgttttaattttcttttgcttattgtttaagtgacccaagttatgaaccacatttttttttttttttctgagagggagtctcgctctgttgcctaggctggtgtgcagtggtgtgaccttgactcattgcaacctccacctcccaggttcaaccgattcttctgcctcaggctcctgagcagctaggactacaggtgcatgccaccatgcccagctgattttttggtacttttagtagagatggtgtttcaccatgttggcccggatggcctccatctcttgacctcgtgatctgctcacctcggcctcccaaagtgctgggattacagacctgagccaccatacctggtgaaccacatcttctcttccgctgttcaccttagactcttgatcatattttggggtatttctttttttttttaatttgatcaaatgtgatagtaagaaatgtcatattttatgtgtcattaatagctaatagagaatatatttttggaatatatatttaacctttacttcattctataatgctttttacatttctgtcatatcttatacacaatttttactacactgagaaatttattcttaaagtagtgataaatcaactcattttaatataaattcatgattttatagactatatgacttggcttaaatagatctttctgagaaatcaggaaaatttgaaagccatcaataaattatttactctttgataatgaaaatattttaataaaaatgctaaaaacacttaattttaaaccaaaatacagtatagtatctggtaaagagatttaaacctatgttgcaaagatgattaaaatgattcatacgcaatgaccctttatagagattcatttaaattaaaatttatttttctacatcaaaatgaggagatcatcatgactaagaaattttggattactaaattcttaaaaaattgtccacttttaaaattctattaaggtacaataaatcaaacatatactatgttttctttatcatttatagaaatttaaagtatgataacaggtatttcttgttgaggtgattagcttgtctctcatacattggtgtttggagaattgtttactgaaacatttgaaatggtaatccacaaattgtttaacttttttattataccatctgagaatatgtttgcatatttgtgaaaacaattggaaactgtctcagttatgttcattttgagaattactatgttttggtggacacatttgctggaattttgtgcagatatttttaaaatatttaagtttatgtggttactatgagatattattaaataaataaaacatgttcggagtaatgtgtataatacaaactcattttttgtaacaacaaacagaaagagttacatgttggtaagtatatgtgtctttgattggttatggaaaaaattattaggcatttattccatacttttaacatcttttaacctccacagatttagaattgtttttctggaagaaattgttaatcttctcttttatacatttcatgttgttttcctcattttaatgccttcgtattatatttctaaatataattttcttttataaaacatgcaaattttatacgaagaaaaacagcataagtaaacttaaagactatttatatacaatgtggttccatttaaaagatagataatggatgccattaattcatagaatatataatacatttctttatgttaatacagaaacaaagcctgatagaaatatagtcaaagaacaggcaattcataggagacaaaaatatatggccaataataataataaatatagttgactttaatattaggtcatcatatttgccacaatcaaaaaagtctccagaattctcagttttagaaaggatttggttaaatatctactgtctataaaattgtacgtttctaaagtattttatctctatcgtaattttaatgtttgtaagttttgacttgtgttttayttgtagaatatatggaaataattctacatatcaataaattggcttgcttgtagtaaaaatgttgcaagcatattaaatatctttcaacagaatttgaacatctttcaacagttaaaattatactgtaacacgatgcaatattttgaagccattgaaatattgagactgatctatttttatattaaaaattattaagacatttataagtgaataaaaacaaattgccgaagtgtatgctaggatgatctaatttatattataaactccaaatctaaattattatattattataaatactatatatgtgtacatttaaatagaaataaaaaggtctagacagaattgataactatgttttcttctgtaaataggagaaagactgaggaatggtaaaagtttagcagtaagaagaattatgtctatgttgtttgaattatatacagttagattgtattcatgtatttattcatgtattatttgtgtaaataaataaataaatataaaatttccaaggaatataggagtttgtcaaggggctatgagggaacaatgaggctgattgattagttttggaagcctaataaaacaagagtaatagcggtagacatccctgtactttttgggggagaaatatgcctaagataatagaaacatctggtccacctaacagataaattattttgcattcaaatacattagataccaaaaagatgcaggttattgacattgtatgcctttgatttaatatttattaagcactcatctaataattttgcattctctttaacttgcttaatagggaaattggggtgttttctgctcaacagacatatctgacctgtatgataatggaatttctcattataagtcaataaacttttgttctttctgtatctttcagtcttatgatgtaatcagcgcgatttcacttcctgaatttcgatgaattytaagacatgggcaagatcgggttgtaagacctctgagatttaaggccatgccctggatcatggtgaacttaccaaagcaaacaatgcctgtgagatggtcctgcagcagccaaccagtgaactcttttggtgacatcctgttcttgttgtataactttatattcctataaatccattaaggccccaataaagtttgtctctaagcgctgtgttagatctatatgactacatctagtaaattgtgaattttaagtaaatattttataagaactcctatgtaaagcattactaaaattagtgttgaaatatgaccttcttcctacatttattcatttatttatgtctatttattcatttattttagtgaaaaatataaggaaagtagaggaaggttaaatccaaaaaagaattgtttccagtacactttctttaatttgctgtcagtttttgcatggaatctacatctttttatgctaatcctcatcctagtattttacatcttaactatttttttctgactgaaatggttgatgtgcttgttttttgtaattttctactttccttctaaaatgcttagtattgaacaaatagaatatcctaattaaaaacagtaataaatattatggtgaaaaaatacaagtaaaatgggaaaacattagatagcagctttcaatatttcatatagttcataaatgtttcaggaattacaaggttatagaaaaaaatttatagactataataatttccagggatataaaaaaataaagcttctacctttgaattgtaataataaaagataaacagacttgaaagcatatattatatctgaaaatgtcagrtaaacttggcttataaattaaaatataaaataataatacaatttgttcaaataagtaattaaagcttacattgtaaaatgaatatttagagagattgtgaaacctgagtattttacccaatcctctgaaattagtccctagcatcagaattaaagaatctgaaaaatcacaaatggaggtatggtgacatttatgtatattctagagttatgttatgcacacttaataaattatagacagttattttaaagattgtataatattactaatcacacattagagttttaaaacttctgagccaggctgaacatcacaaacagtaaacacagacttctttaaaaggacatctggtgaaaggcattttatgcatcagaaggcacagtattataaagatgacaacactcttcaaaataatcaaactattcaatgcaacccttatcaaaattaaggttgcctactttgaagaaatttataacctgattctaaagttcatatgaaaatgtaatggacccagaatagccaaaacaatcttgaagtatacaaagtttgaagagtcacatttccaaattttaaaacttattacaaagctacaataaacaagtctatgtggtactggcataggatataaatattgatcaatgaaatagaatccaaagtccagacataagccctcacaaaagttaatttgcagccaattaacttctgagaaggaggcaagacaaaaggggaaataactattttcaataaatggtactgggacaacttggtatctacatgcaaaaaaaaaaaaaaaaacaaaaaacttccacccctacctcatgcaaaatacaaaaattaactcaaaataggccaaagactcaaatataagggttacactataaaactcttgggaggaaatatagaataaatttttgtgaccttgaattaagtattagatttttaattcttacaccaaagcacaagttaataaaggaaaaaaaagataaactggacataattaaaattgaaaaaaaatttgcttcagtgaacacagtcaagaaatttgaaagacagccacagtgcaagattatttttgcaaataatatgtctcataaatgacttgtatctaaaatatataagaccaggcatggtggctcatcctgtaatcccagcactttgggaggctgaggcagggggatcacttgaggtcaggagtttgacaccagcctggccaacatgatgaaaccccatctttactaaaaatacacacacaaaaaaaattagcagggtgtggtggtgtatgcctgtaatcttagctactcaggaggctgaggtgggaggatagcttgaacctgggaggcagaggttgcagtgagccaaaattgcaccaatgcacactccagcctaagcaacagggcaagacgccatctcaaaaaataaaacaaaataataaaataaaataaacagtaattaccgctaaataataaaacaaacaataaaccaattttataacgaaaggatctgaatagattcttctgtaaagaagacatacaaatcacaaattacacatgagaagatgctcaacactattagtcatcagggaaatgcaaatcaaaatcacaaagagacagcaatttatacccagtaggatacttattattattattattttaaatagcaaaataataaatgttagaatgtgggaaaacaggaacatgcggcattgttgctggtaatgataaatgtgcagccactgggcaaacaattttgtggttcctctctaagttaaaaataatggctgggcgtggtggctcacacctgtaatcccagcactttgggaggctgaggtggatggatcacctgaggtcaggaattcgagactagcctgaccaacatggtgaaaccccatctctactaaaaaatataaaaaattagcccagctactcaggaggctgacgcaggagaatcccttgaacctgggaggcagaggttgcagtgagccgagatcccaccactgcactccagcctgggcatgacagagcaagactccatctcaaaaaaaagaaaaaaaaaagaaataacatgctacccagcaattttactcctgatacatagccaaaataactaaaaaacaggtgttcaaacaaaaattgtacaggacggtttacagcagaaatatttgtactaggaaaatgtggaaacaactcaaatgcccatcaactggtgaatggaaaacaaaatgtatattcacacaatggaatattaatttagtcatatacaggaaataagtatacatactgccagaataaaccttgaaagcattatgccaaaaaaaaaaaaaaggaaaataattcttgcctggtggtctgggaaaagcaaaagcattatgctatgtgaaaaaagccagtcacacagtaccatatattatataatttcatataaataaaatgtccacatgaggcaagtctataggttcagaaaaaatatttgcttaaggatggagtttcccttaagttatgattgagaattgatgtctaaggactgtgtgattttattcagggttaatgaaaatgcataagaattgactgtagtgatatttacacatatctatgcttatctataaatatccaaaaccattgaattgtacactttaaatcacggattgtattatatgtgcatatctcaagttgtttaaaacaatagatgtctggctagcacctcccaaggcagcctctcccaacttttattttatttttttgagacggagtttcactcttgttgcccaggctggagtgcaatagtgcaatcttggctcactgtaacctccacctcccaggttcaaggaattctcctgcctcagcctcccgagtagctgggattacaggcatgcaccaccacacccagctaattttgtatttttggtagagacagggtttctccatgttgaggctggtctcgaactcctgacctcaggtgatccgcccgccccttggcctccgaaagtgccgggattacaggcgtgaaccaccatgcctggccagcctctcccaacttattaaattcctatgcagcaagatggcaaaatggaattcttcagcactcataaccttgcagaagtatccatttgaacaactattcatgcgcaaaattacctttacaaggcctaaagaaaccaagtgagagattacagcacctgggtgtagcaaataaagaaagatgcatttaagagtggagaaagggcagatcatttgaggtcaggagtttgagaccagcctggccaacatgatgaaaccctgtttctactaaaaatacaaaaattagccggatgtggcagcaggcacttgtaatcccagctacttgggaggctgaggcaggagattcgcttgaatctgggaggcggagtttgcagtgagacaagattgcgccacgcactccagcctgagcgacagagcaagactccatttccaaaggggaaaaaataatagagtggaaaaaggacagttttacattatgcacatcacccctcccccaactctaagtagcacagcatggagaaagatacacatctatgaggggaagaagaaaaagcttagtactggacttcctcaaacccccaaactgggcccattccagtaaaaccttgcaccagagaggcccccttagccccaggttccaggctggtacatgcagactgaacttccaggcctaccttggcactaggtaggatcctgcagacccaggctctaggcctgcacaatagacttggattccaaaactgccccagcaccaggttggctccagtggccccaggcttcaaactggtaccagcaccagacttcaggcctgtcccagtgccagattaacacactggcatcaaacaccaggtggggacccatgaagatatggtcaatgccttcccagtgccaggctggtctcatggtcccacctttcagctaacccagggtctaggccctcccaaatagacctcagtgctgggcaggccctcatagacttagactccagagttgtccatgtgtacccatatacaaggccagtatccaagaccccaggacctaggccagactttgctgtcttagaatctaggccagcaactgtatactcagcctcaaggctgacatcagtgaacacgactccaagcttgttcccatattcccaggcttcaggccagcccagtgggctccaggctccagactagcccctgcagacccaggctccacactagacttaacagtaggccagcctcaggctccaggctggtccctgtgggcttacacttcagagaactcagagtccaggcctgtttcagcagactcagtgttcaggcttattcctgtatactctggtatcagaccataccccttggactgaagttccaagaacacccctgtagactcagaatccaggtcagcttctgtggatccaagatccagagccactccttcatccttaggttactggctggcccagtgtcagtccagtttctgtggactcagacttcagactcatcctagtggaaacagatgccaaagtgcctggccagctcctgcagactcagggtcaagtctcatcccagctccaggtcagaccctgtggacttaggcttgaggttggccatcatagatacaggctctaggcctgccctcatggacccaggcttcagattcatccctgcaaacctcacccttgttgaagtctagtccattgggtccaagtgtcagacccaataccacaggcacagacactatactcagctgcctgctgacccagataccagacctacatgcctgaggactctgcaagcaagctcaccctcaaaccttgccagatggcatgctcagaatccctggataggctgactgctgaagggttttacctgataaagccagtctgcaaggactggaataagcccttacttcagatgtgtagaaataaacatatggcagtaagaaataggaaaagccagggagacataacatcaccacaataatacaatttctcattagctgaaacaaacaaacaaaaaaaatagagatatatgaactgcatgacaaagagttcaaaataattaattttaaggaagctcagcaaatttcaaaaaactacagataattcaataaaatcagaagataaatgatcagaatgagaaatttaacagagagattgaaattatttttaaaagcccacaaattctgtggctgaaaaatacaatgaattaagtgaaaaatgcaataaagcgcatgaacagcagaatttatgaagcagaagaaaggatctaggaatttagatgacaggttatttgaaaatatacagtcagaaaaaaaaagaaattaagaaagtttacagattttacagggcaacatcaaaagaagaagtcttcatgtgatatgatttaaaggagcagagaaggacaaagtagaaattttatttaaagaaataatagtgaaagcttttcaaatctgtgaaaagaaataaatatccaaaaacaagaaggtgaaaagtctccaatgagattcagtctaaagaggactaattcatattatattcaatctgttacaaattatggacaaagacaggatgttggaagcagcaagaggaagaaacgaataacatagaagggagtttcaataaggctagaagtggatctttcagcagaggctttacaggccaggagagagtggaatgatatatgctaagtactaaaaacaaaacttaaccaagaatattttaaccagcaaagctgtcctttggaaataaagaagagataaagacattctcatattaacaaagcttaaggagttcattgccaccagatctatcttacaagaaatgctaaagggagttcttcaatctgaaagaaatatatgccaattattaacacaaaaacatatgaaaatataaacatattaatccctttcccataaagagagataaactcactgctgagtgttgtttacttttcttctgatatcctctaacttaaatactataatgtgaatcacactgattacatcacaagactgaaagacacagaaagagaacaaaagtttattgacttataatgagaaattccattatcatacaggtcagctatgtctgttgagcagaaaacaccctgctttccctattaagcaccttaaagagaatgcaaaattattagatgag

SEQ ID NO: 97029 - DNA, 25959 bp, Homo sapiens
cccagccgcctgccttggcctcccaaagtgccgagattgcagcctctgccaggccgccaccccgtctgggaagtgaggagcgtctctgcctggccgcccatcgtctgggacgtgaggagtccctctgcctggctgcccagtctggaaagtgaggagcgtctctgcccagccgccatcccatctcggaagtgaggagcgcctcttcccggccgccatcacatctaggaagtgaggagcgtctctgcccggccgcccatcgtctgggatgtggggagtgcctctgccccgccgccccgtctgggatgtgaggagcgcctctgcccggccgccaccccgtctgggaggtgaggagcgtctctgcccggccgccccgtctcagaagtgaggagaccctccgcccggcagccgccccgtatgagaagtgaggagcctctccacccggcagccgccccgtctgggaagtgaggagcatctccgcccggcagccaccccgtccgggagggaggtggggggtcagccccccgcccggccagccgccccgtccgggaggtgaggggcgcctctgcccggccgcccctactgggaagtgaggagcccctctgcccggccagccgccccgtccgggagggaggtgggggggtcaggccccgcccggccagccgccccgtccgggagggaggtgggggggtcagccccccgtctggccagccgcccggtccgggagggaggtgggggggtcagccccccgcccggccagccgccccgtccgggaggtgaggggcgcctctgcccggccgccccatctgggaggtgaggagcccctctgcccggccaccaccccgtctgggaggtgtacccaacagctcattgagagcgggccaggatgacaatggcggctttgtggaatggaggggggggaaaggtggggaaaagattgaggaatgggatggttgccgtgtctgtgtagagggaggtagacatgggagacttttcattttgttctgtactaagaaaaattcttctgccttgggatcctgttgatctgtgaccttacccccaaccctgtgctctgaaacatgtgctgtgtccactcagagttaaatggattaagggcggtgcaagatgtgctttgttaaacagatgcttgaaggcagcatgctccttaagagtcatcaccactccctaatctcaagtacccagggacacaaacggtgcagaaggccgcagggtcctctgcctaggaaaaccagagacctttgttcacttgtttatctgctgaccttccctccactattgtcctatgaccctgccaaattcccctctgtgagaaacacccaagaatgatcaataaaaaaataaataaataaaataaaataaaattaaattaaattaaaaaaaaaaaaaaagaaacctaggcttggtgccatggctcacacctacaatcctaacactttgggaggctgaggtgggaggattgcttgagcccaggagttcaagatcaccctgggcaacatagtgagacccctgcctctacaaaaaaaaaaataaataaaaataaaaaaattaaaaaaatttaaaaaaattagggtggctgggcgctgtggctcatgcctgtaatgctagtagcactttaggaggccgaggtgggcagatcacttgaggccaggagttaagaccagcctggacaacatggtgaaaccccgtctctactaaaaatacaaaaattagcctggcatggcggcgtgtgcctgtaattccagctactcaggaggttgaggcagaggaatcgcttgaacctgggaggcagaggttgcagtgagtggagatcacacccctgcactccagcctgggcaacaaagtgagactccatctcaaaaaaaaaaaaaaaaaaattagggtatgatggcatgtgcttgcggtctcagctactcaggaggctgaagtgggaggatcacttgagcctaggaggtcgaggctgcagtgagctgtgtatgcatcactgcactccagcttgggggacaaattgaaactcttgtctcaaaagaaaaaaaaaaaagaatgagaccttctcatatactgctggtgggaatatatggtacagatatattgaataacaatttgttactacccaataatgtcaaaatatgttacacgacccagcaatcccactcctacctacatgcccttaaaactctcacacatggacacaagaagatatcactaggaatggtcacagcagcattactattttttctttattttatttatttatttattttttacttttatttatttatttttgagacggagtctcgctctgtcgcccaggctggagtacagtggagcgatctcggctcactgcaagctccgcctcctgggttcacgtcattctcctgcctcagcctccccagtagctgggactacaggcgcctgccaccatgcccagctaattttttttttaattttttttttatttttagcagagacggggtttcaccgtgttagccaggatggtcttgatctcctgacctcgtgatccagccgcctcagcctcccaaagtgctagtattacaggtgtgagccaccgtgcccggcctattttatttattttagttttttgagacagagtctcactctgttgcccaggttagagtgcagtggcacaatctcggctcactgcaaacttcacctcccgggttcaagcaattctcctgccttagcattctgagtagctgggattacaggcgcctgccaccacgccagcctaatttttgtattttaagtagagaccgggtttcgccatgttagccaggctggtctcgaacccctgacctcaagcgattctcctgcctcggcctcccaaagtgctacgattacaggcgtgagccacggcgcccagccatatttttctggggtgttgtttgtttttgagacagggtctcgctttgtcagcctccacctcttgggctcaagtgatccttccgcctcagcctccccagtagctgggactacagttgcacgccaccacgcccagctaatttttttgtattttatgtagagagaaggtttcaccatgttgcccaggctggtcacgagctcctggacttaaacaatctgcccacctcggcctcccaaagtgctgggattacaggggaagccaccgtgcccggctggcatgggtttacaaggatctgcaagggtccgattaagttttgtgtggattaagaacgggagcgacctgctctttcagaggctgcccagctgtggtaatttttcgcggttcttccactctctgggccagttttacttcaactgtgaaatgggggtagtcctctaaggtcccgtttccattctctgcattcctcatgacgacccagacgaagctcctactgccatccccctaacggatgaggaaggctaagttactttcctaaggccagagacagtaaatgcagcttccacgttggaaccccggtagggtggctccagtcccctgctctgaaccccccatctctacagcctaccccatcaccctaataagccctgcaagtgcagtggtgatgcgtctgctccggcgtcagaccagccccgccatgccacttgcaagctgtggcatcctgggttagtcacttgcgtccctccagcccatttccttatgtgagcaatgtacaccccaaacacttgcctcagccaagacacttgcctgaccaggaggaaagatgcgcgagtctcaaacaactgcgtgactttccgtctgcggggggcgggggtggatttttggggaaaagggacgcggagcccgaacaccgcggctccaaggtcttcccgctcctttctcgcctggtttcctccattcccccgcggggcgaccctcggtctcctgccgtgtccccgctcccgcgccccctgcccccaatttttcttccccccacggggctgaaaaaaggtcgtggtccctttaaggcccgcccctccctctcccaaaacttcccagtgtctgctcttttcgatccgggacggccggtcaggctcgccgccgagctggtaggggctgggggcgaggggtgcgggaaggtgaccggggcactggcgggcggcgccgcgcgcggccgggggccagggtccgagcagcggggtgggggcggggcggtggccgggagcgcggggggtgcgggtcaccaggccgggccggcggcctggaacgtgcggcgccggggagaccgttccgccgtgctccggccgtgcgcgccggcgcgaggggcgtccgggccggccgcgggggcggggaggggaggggccctctctctccccctccccccaccgcattcctctgacgttgggacggagcgaccccgcccttcgtcgcgaccggcccggcctcctcccgtcacgcgggccacgtgcttcagacgcggccccgcccccgtctctgttccgttggcgtggtcggatcttcctggtgtccgggggagctgaccgaggtccccagcaaggccccctcccctaactttatttcccctcaccggcagagccaccaggcctgtcccctcttgtattgccataaaccccattttttctgatagggtctcgctccgtcgcccacgctggagtgcaggggcgcgatcacggctcactgcaacctcgaaatccggggctcaagcgagccttccgccttggcctccccaagtgctgggattacaggtgtgagccaccacacacggcctccatttcaaacttagtttccacccggacctcaactcgaaatcccccatcagccgggcagaaaggtcctggagcacttttggggcgtccgccgcgtttctcacgacgctagcttcgcttttatttcttttcccccctttggcgatatcgtcacttgccaatagcttcgctaaggtgttcccccccacaccctgcgcgggcagccccataatgttaaatgccgtaggacgggatcccgggttaatccccgtttgaccccgctgcctgcgcgtgataactggggcgcgctcctctccaccccccaggctccgccagttgggcttcgccggagtctggagataccctccgacattctcttggtgcagtgcgggtggtcttaccccgcccttgaggaagaaaggcccgacgcaggcacagatcacaagaacgcctcccctgtgcagggggcttgcactgtgccaggtgctgtactgggcgcttggtaggtggccaccctctccagggtcggggccaggacctcctgtggtgctcagaggggtcgagctgtcaggtgaaaaccactggcccgagttatggctttgaagggaatcctgggggtctgggatggcagggacctgttaatttagatcgcacggacaagatgacttggcccttagctcctgcaggaggggtagtggactattgcaggtggaagggactgcacgggcacacatggagagtgcgcggaagagccttctcccaagggaaactgaaaggggttgcggctgaatttagaactggacagggtccgaagacagtcggcagcagcgagtggttttctactgaggaaaaggctcagatttgggattttaacaattcctcctagaggtagaaatgaacacggtatagtgatggcgacagagataccctgggagttcctgtcaatcttggtctagccttccggcgcacacacagcggtcgctccataagggggccccgcctctgggcggtgcctgaaagcgtatttgcgcatgcgttctcgccttcgctcgtttcgtatactgcaccaaagagcgcctaccctggggcggggctcaccatttcatccaatcagagcgtatcaacagtcctaccatctggtgagagggtgcgctccactctccattgaccaatcagtggagacgcagaagaatgggcatctgtaaccaccactggagagagaccaaaaaagggcggggcttccttgtctccttgcgaagtggcgcgggaaggtcgtcattgtgactggtgctgacggattagcgaggagaccaatgaaagtgggagggaggcggagattcttgggaggtttagagcgccgttcctatcaggtgcttttagggaggccagcagcgccagaaatccgacctatcaaattggattttattttaaggcggcggggtcgacggaaagactggcagaaagcgaccacctataaggagtgtctcagacaaacaagggcgggccctcctgcagaacggcgtgggcaatgtccaataagcgcgcaaggcgtgtggcggcctaccctccccccgcggcgggaccagtggctccccctatcgggtgggggcggcgggtgacgggcgtgtccctcccccaatgagaggcggggggaggcgggttctgcgccgccatgtcgcggaggctgctgccccgggcggagaagcggcgtcggcggctggagcagaggcagcagccggacgagcagcggaggcggtcgggagcgatggtgaagatggcggcggcgggcggcggaggcggcggtggccgctactacggcggcggcagtgagggcggccgggcccctaagcggctcaagactgacaacgccggcgaccagcacggaggcggcggcggtggcggtggaggagccggggcggcgggcggcggcggcggtggggtgaggccagggccctaggcgctgggaaggccgggaactgggggacaatttcccagcttgagggcattttattttttgaggggggcctctgcgcacgcgcccaggccatcgcgtcgttgacggtgtgggggaggggcggccgttgggcaaacggcggggtttgcgcgaggacaggcgcctgcgcgtgcgcggggtccggagcggggtgtgggggagcgcagaggaagtagctcgtgaggcgaatggcccagtgcgcaggcgccgcgggctggcgtgtgggggccgggcacgcggcccggccggtttttttcccctttatcattttcttcgctggctccatgcgcaggcgcagtgttcccgcccggcctcgtgggcggttaggggagcgcctggtgagcgggaacgggtgggcggcggccttgttctctagagtggggaattccgtctgatggcagcttaatctctaaggcccagccttgtgtctatacagaaatggatgtgtttgagcctagatgctctcatttttgtaggcattgaaaatgggaagaggacttgtgaaatgcacttttagccttttaggagttgagcgaagccttgaaaccatcacaagtttgcttacagtttccggggattcactgggtaccgaggatttgataaaccaaactatttcctggccatgttggaagcatttcgaccccctgtaatcagtccctccgaaaacaccagtcgttgcttttggagtggggcccagtccccactctttccaaaatcttgargtcttacagggccgcctatttgcagggttttccagggtttaggggttacgagttgctagcgttttaatcttggccttgtcccacacattttaaagacatcttaattgaaaatccttaacgcttcctgaggttgggggagatactgggattcccgatttacaaaggaggaaatgggccaggagagagatgagatgaggtgaattactgtaggtggcacagctagtgaggggcagggctggagttagaactcccatttgtgggagctgctaacctggcgggagtgcctcaccctgtggttcgcgtggatcgctcctgaaatagaatccaattctacccaccttccacgcacttctgcccagtgattctcagacagggggccggccccagagcccaggagaggcggaagagagttaatctttctcctgatgaccagaggcttttgtcggtgggtgtaagatacttctcttaggaaggagcagtcggttcttaatggtatgggttggagtctctggtctttctaaaagactttccatccgggagtgggggctcatgcctataatcccagcactttgggaggctgaggcaggcagattacctgaggtcaggagttcgagaacagcctggtcaacatggcaaaactccgtctctactaaaaatacaaaaaaattagccaggtgtggtggcgagggcctgtaattscagctactcgggaggctgaggcaggagaatcgcttgaacctgggaggcggaggttgcagtggactaagatcacgccatagcactccagcctgggtgacagagtgagactccatctcaaaaaataaataaaagacttttcttgtctggtttttcttagtctgacctaggcagtaatttccaaagcagattttggtgggagggygattcaagactagaaggggtcaagactggcctggctgccccagtttctggggcatgtgttgttttttgccctgactgaacctgggtgtgagtggtggggaacaggtgtgcttagctagatgatggtggctcagccagttaaagggcaaggaatttggggcacatgcaaaggggatgtcctcattcaaactgtagcagatagctgttagagcccttgctgccagtgtatctccttttccagctactcttttcccatgtttccttggtcgagtggaccagtgggaagagaggggggtccctggaagaacgtaagatttgggacttgtgtggccctccctccgttataccttcctcagaagctacagcaagagccagtgggcaagtgatcacccactcaggaccactgttctgctgacccagaatccttctgggctgattggcttcaattgctgcccctagtctttcctgtgcatccttcacggatgacctccaactgttttatctgactgggtctacaacagyacagaggccagtggggygtcatcttgtacagcaagaaaataattcttgtttttgcttcctttctcaggagaactacgatgacccgcacaaaacccctgcctccccagttgtccacatcaggggcctgattgacggtgtggtggaagcagaccttgtggaggccttgcaggagtttggacccatcaggtactgggctcagaggccaggtgttgggcttccaaagttgactcctgggtgtccttgtgtgtccacgatttctggttggaaatagtgattttgttgccatcctggtctagattctgtggccgctctgcttttgggttggccattgtactttgtgtcagattacagcaagttccatgaccctttttccttccttcgtttttcctctgccttgtagtttctagtcagtgttctctttttcagacagagcaaggtctcgctttgtggcccaggctggagtgtagtggtgcagtctcacccaggctcaggcagtccttctgcctcggcctgctgagtagctgggactataggcatgcgccaccatgcccggctaatttttacatatatatattttttgtttgtttgtttgttttgagacagtctcttgctctgtcgcccaggctggagtgcagtgacaatctcagctcactgcaagctttgtctcgtgggttcacgccattctcctgcctcagcctcccgagtagctgggaccacaggcgctggccaccccacccggctaattttttgtatttttagtagagatggggtttcgctgtgttagccaggatggtctcaatctcctgacctcgtgatctgcccgcctcggcctcccaaagtgctaggattacaggcgtgagccactgcgcccggcctaatttttatattgttctgtagaggtgaggttttgccatgttggccaggctggtctcaaactcctaggcccaagcagtctgcccacctagccctcccaagttttagggttacaggcatgagctactactgctcctggccagtgttctttcattcagcaagtagttactgaatatttggtgcatgctatatactgcaaatacagtagtgagctgtatctggatgcttctcttagaaagttgccctcctagagtgatttgcactgtcatagtgtaagctcaagaagccgtctgtgggtggcatctgacagtctggtgaggagaggtcaggaaggcttcccagagggacatgatggctcagctagacctctttggcttttggtactacttgtggcacagggtgttcaggtcggggaaccatgatagggttgcagaggagttcagaggccatggaggagtcagttctcaaaaaatcaaatgataccctcctcctgtctacattttcctgagaggattgaaacctgtgttytctctgccagctatgtggtggtaatgcctaaaaagagacaagcactggtggagtttgaagatgtgttgggggcttgcaacgcagtgaactacgcagccgacaaccaaatatacattgctggtcacccagcttttgtcaactactctaccagccagaagatctcccgccctggggactcggatgactcccggagcgtgaacagtgtgcttctctttaccatcctgaaccccatttattcgatcaccacggtacgtgccagcagkcrtttcttgtgaggtctcccttccttttctccccttattccctcccccaagccagactgatctgccagtgccccttcatcttgcctgtgtttgcttttgcaggatgttctttacactatctgtaatccttgtggccctgtccagagaattgtcattttcaggaagaatggagttcaggcgatggtggaatatcctttsctggaaaacaggtgttccttagggtagggactcttgcagggcttgacagtggccattctttgagccagcatgtgtctgctgaccacgggagtggctgccatgtgccagatgccttcacagagcccagtgactgagtagggaggcagttaaaggaccaggcatatcgtgtggacgtgcagatcttaggggagagagcagtgtgttgggagatacaaaggaatttatttttctttttgttttctttctgttatttacttatttatttattgagatggagtttagcccttgttgcctgggctggagtgcagtggtgcgatctcagctcactgcaacctctgcctcctgggttcaagcaattctcctgcctcagccttcctagtaggattataggcgcctgctaattttttttatttttagtagagatctggtttcgaactcctgacctcaggcaatccacttgcctcagcctcccagattacaggtgtgagccaccgcgcctggctaggaatttatttttaaagatgtttattctaagttcaaatatgagtgacaaagatttggggaacatagtctcaagaggtcctgagaaaatgtgcccctgggaaaaggaatttatttaaaaggggatatggggccgggcacagtggctcatgcctgcaatcccagcactttcggaggccgaggtggacagatacctgaggtcaggagttcgagaccagcctagccaacgtggtgaaaccctgtcgctaataatacaaaaaatagccaggcatggtggtgaacgcctgtaatcccagctactctggaggctgaggcaggagaatcgcttgagcctgggaggcggagattgcagtgagccgagactgtgccactgtattccatcctgggcaacacagcgagactccatatccaaaaaaaaaaaaaaaaggtggggcatgtgtgaaggttgctgaggaggtgatgtcctatgagcaaataggagcttatactcaaggtggaggaaacagcctctgcaaaggttgtaaagtcagaaggagcttgtgttggatggagaaattgaaagacctgaggattgcaaagtggctggcaagcagacgggtttggaatagacattggaagaagcttttagggcatcctagacagcgttgcgatgcttggggcaggggcaggaaaaagccactgatggactttcagggcagagctgtaatcgagttgatgtttcagatttagtcgaagggtgtgagagggctgagacggagaaagtggtgtggcagaagaggttgctggtggccatgggtcggggtgcagattatgagagaactctggccagtgactgctcacccggggcagcgttgagtccatcaacaccgttttggtctcttaacctgaggctagtggctgggcagtgagctaatcccaaagcttccgtctgtaccacagtcttggggtrctaccttgtccttatcacwctctggggtaacttgaagcccttctcaaagatctcctgtgatgggactttccttaacttgactcacatttgactcagttcaaagtgcccagcgggccaaggcctctctcaatggggctgatatctattctggctgttgcactctgaagatcgaatacgcaaaggtacatctgggaggtgactgactgccccttgtcagcttccaggtgagctggggcatggctgacctcaagtcttgtcttgtcctgtccttgcagcctacacgcttgaatgtgttcaagaatgatcaggatacttgggactacacaaaccccaatctcagtggacaaggtaatcttgacgaccactttgttctaaacatacccgccttgctttcactcgactagtgcacttaataggcctgggctcagggttatgtaatgccattgggccccccatggacatgggagggccttggggtcagcacttggacaccctagtgggatgggggagtgagaggcctccatgggtcttcactgctgcttggggccctccgatgctgctcaggatacagaggcaaggcagaagcctggatgggcggggagcagggcctcactgaggatgaggcgtgggggcggccttagaaaccagcagtggctcctttgagagtctggtgagggtcactcactccattcttgctggaccaggaattgtcctcttgttctgcgctgttgagagggtctgatttgggggagtgacagtgttggggggcgatgaggtctcctgggctcttgcagtgagccttgtgagcaagctgaccctgtggaggtgagacactctggattggaccagggcggacatgcctcacatcatttgtagaggggacgcaacatctctgcaggtggcccaaatggacaactcccttcctagtgtctgtcaagaatggtttgcctttggtagcagggagaggtggaggattgcctatgagaaacagcggcagccccccaacaagaccatccatctcggtgtctgtcttggtctgatacgtcggaccaggccatgggctgagggaggaggctcgatgctgacatcgcacaggccctgagaggccagagccccccattcctaggcaggcctgtcttgctcgcccttgcatctgggaagcagtgggcagggtgggctagactcttccccaggatcctcacagtgggccctgtgggcctggctgctccctccaaaggtcagaggcaaattggtgaccaagtgaatgtaccagagcgggcaatggcattacatgactgctaacagaaacatggcaacaaccatttcttctccaaggaacataaatagaagatgtgcagaccggcaggggctagtggcagggggctggctgtgcattggttttgatgcctctcagctttggcagccccaaggctggggcccaaaaaaaaacgagggctgatgaggtgacctggagtgagggcggtgcttcgccacccctcaggaaccatacttcagcggctctgcctctgcacattgctcaccaacacacagggtagaaaaccactagctcttcctggagagaacagaacatgcagcctccaccacgtccccagaaacagccgcagacttgagctcactacatcaagaacaccacaccgcgctccaaggaacagctacaagcacagagacagaggcatacagagacaaagagagaaagagacgcaacatggcagcagacactgctttttttattaaacattaaaaaaaaggtcaaaatccaagcaaacttgaacccgagaatgtacacagaagtaggaaacacagagaacagagctgtcccagccagccagcgagcgatgctcttttcggagaacgtttcatagacggaagtagattccatgggcctccaagacaataggatcctctctccattcctcgccatatgggttttgttttttaagtcatttggtttggggagggccttgttttttttctgttttgatatttttattttttctgcagtcaccggctgccaacataatctgcaccaactggagatcagaaaccaaaaaaaaaaaaaaaaattttaaccacaacaaaaaaaaaatcaaaaaaaccaaaacagacctaaaaccagacagccaaacagctcagaggcacacagttacctgctgccgggtaaccaggcgcgctcccaaggccaaaagcgcgagcgtagtggggccactggcacacctcataccaggagacacgcacacggagcgctacacagccagaagcaccgcaccaccgcactgcagcacatatgtgaggaggtgacaacatggagggacactacccacttcatacacctttatttccacttttctgatatcttctgaggacagaacatctgtgagccatttttgatttaatcaaaatattgacttttaaaacaattctttaaaaaaattgtagcggatgtgtaccgtgacttgtatttatgactgtaaaaccatgtgatgcagggtcgcagtgtatgtttgatgggacgccatctttcagaactgtgctaactcactgttgaagcgtccaatggtaagagaaaatacagatttgttttttgtgacaaatggacattgtactctgtacttctgctgtaagtagtccttttccattttgtaatgactggtaacaaaacccaggccgggtggcaggaaagggcagtggtttcgagccctgggttttggagtcagccagacctgggttcaaatatggctcagccactgtcttgctttgtgactttgggccaaagtgtcttttaactgctcagttaaaagttaacaactcagtcttcttatctgtaaaatggggctgaaatatcagaacctacctcatagggttgttgtgaggaatttcagaagctgtgatgtctgtaaagcgcttagcccagtgcctgccacttaagcgctaagttaaaggcagtgattacgaactgctggggtcggggtggatctgcgccattgctgggtgtgggaatgtcgatgccttgtacatgattgcttatttgaactgattctgctgttgccctgcttgtcagctacagtcagtccctcttgggctggcgggactgggagggaggggggactgggattaagaaagaagggatctaacagagacagtctggagctcctagaactttgggggctttgggggtcaaacttgcttgcttccctctggggttattttcctcttaatctactctcccttcattgggagtcactttagaaagctgcttttggcccgccataatatatcagcttctgtagcagctgcacattccccagagggcctgggagctgggctttctcccagggccagggtaggtgagagcacagaatctggccttgtccttcacagaacaaggccagccctttggtatgagcaggggaaggagagtgggcaccagctttgaggctcgggcttcatgcccgccgtaggtcagatcacaaaaggaggccccacagccctcgaggaagggagggcttgcagtttgcaggagctgggggctcagatcagcctgtgcagtcaggagggagggagagaccccaatttctgagtgagactcctaactgttttctctctccacaggtgaccctggcagcaaccccaacaaacgccagaggcagccccctctcctgggagatcaccccgcagaatatggtgagggcagggggttcccctccgtggactcccgtggctcatgtgcccctgcccgccgcccgccgtgcaaattctcacccgtcctccctctctttccttcccaccccccaggagggccccacggtgggtaccacagccattaccatgatgagggctacgggccccccccacctcactacgaagggagaaggatgggtccaccagtggggggtcaccgtcggggcccaagtcgctacggcccccagtatgggcaccccccaccccctcccccaccacccgagtatggccctcacgccgacagccctgtgctcatggtctatggcttggatcaatctaagatgaactgtgaccgagtcttcaatgtcttctgcttatatggcaatgtggagaaggtgagctgctgccgggccccctgggttcctcgctgagcctcgtatcttgccagtcagcacgggaaagaaccaggggggagcctggtgtggcgctgggcgggcagacgccaatgagtgactcagtgagctcaggcagcctgcttgcagacgggttttgtttggtcctcactgtatgtgggtgttgtgtttttgaattaccaatgtttaaaaaaaagattttatcacataaaagtactaataccagtacatgaacatagagatttataaaacataaaaatgaatccattatagtgaaacaccatcgtttaaggatttcctcctgaaaacttaagacctggcaacaccgggccttctgccttcccatgggacagttgactggggctagcggtggctgagtgtctacctgagaccaggcggcattttgcttaacattaaacccgtctgggtcttgggggcctttgtgcagctcatgacttggcccattacttagagtagttcgtaacacaggtgaagtgttgttagttaccaggcactgttaaagatgctttacatgtagtgacctgtgtaatttctcacattaatccttaatgagatggacaggggaagtggaggacggggcttaaataacgcgcccaggttcacatagcctttatgtgaagcaggactcagagccagacygcctggctccagagccggcactgctctgttgtaacccagctgaaggagtattttaccttgtgactgtagacacagccatccatagatcacacacgtctgtgtgtaacagacaaaatggtgaaaatggctgatttgatttctgattcctgtacagttttctgtcatgcttcactaaatgatttactggtgggttatgtcccacagttaaaaacatggcccaggctctgcttctcactatgggttgagcacttggtgtgggccaggcatgtttttctagtggtcccgattaactgtgaggacatgggaggccagagcaggggttattatcactaacttgggaggggcaggagaggggaccctggcagctggacagaggtgctgactgcagctactctccccaaggtgaaattcatgaaaagcaagccgggggccgccatggtggagatggctgatggctacgctgtagaccgggccattacccacctcaacaacaacttcatgtttgggcagaagctgaatgtctggtaggtgctcaggctcrggagggcagcagaggtacaggggagagaaaaggaggggaatggggcccagcagaggagcacagtgaggccgaggtgttgactcacacagaaatgggatgtggcaggtgtgttcccagacgtgtctctgacaccayaggagaamgtgagtcagccttgcctcaggtgtagagcaatgccccaaggcacacagggcaagctaagcctctggaggccacaggggaaagcttcagggacaactttgggtatgacaaaggctcccctttcttccttgctgcagtgtctccaagcagccagccatcatgcctggtcagtcatacgggttggaagacgggtcttgcagttacaaagacttcagtgaatcccggaacaatcggttctccaccccagagcaggcagccaagaaccgcatccagcaccccagcaacgtgctgcacttcttcaacgccccgctggaggtgaccgaggagaacttctttgaggtgtgtgccgtggagctgcgcaggcagtcgggtccttgccacggccgtctgagtaggccattcatttcrgtcttttctgcaaatagctgttgaactcctgtcctgcctggccctgggttgagtgctagggacacagcagaggccaggacagataggaatctgtgctctcaaactggacagggtgagaatggcaccaagtttctagcaacaccatttgccgcgttccttccttttacatttttggcaagcagggcaactgctcgtttgctgggaaagctgcttcacaggcccagtgatgagggcccaatttcacaagaaccgcattggcgtaggcttcgggtgccatcaccctgataccatcagaaggtggggccctgtaaagctcagtcagggggaactgaggcagcggaagggaggaggaactcaagtggatctggctgtggtctgaaatgttgaccttgcattcagcaaacagtgttcagcaaacagccgggtgcagatatccacatagctgttgaagttgggaacgaaaaagcagcttcccagtctcaggcaacttaataattaaagagcattgttgctggcctttttatgacacagggatgccttagggtatgtgataaaatctacaagccttttctcctgaaaacttcaagtactgagtcatgcagggcctggtctgcttgaatcctgtgtggcggcccttttgtttcagagttcatttactacctgttttcttttgcagatctgcgatgagctgggagtgaagcggccatcttctgtgaaagtattctcaggcaaaagtgagtcgagtgtgcccacctccttgccctaattgcatggtggttggtgggcagctgcctagttcctattgggtgagtctaaaaccttkacttttccccttggtttgcaatcaggtgagcgcagctcctctggactgctggagtgggaatccaagagcgatgccctggagactctgggcttcctgaaccattaccagatgaaaaacccaagtgagtatctgtgtgtcctgcaggcatcaacctggtgacctaatgggttggctggcttcaggccagggatgtccttcctgcccttgagataggaccccgggatcttcgcactgttggtgacacaggcaggtgggacctgctcatyaggagagcagcctgtgctcctcwtgggagagccagcctgactgcctgctgccactcactctgccagcttgggagttgctcaggcttgtcctccagggaggtggcattctcttctttgcatcagagactggcttaggtaggaaagccactctgttacctaggaaagaggcaacactatccagcaggtaaaacttgcccacccagttgctgggagaggcccattgccttgggctggcgaaggagataggaatgggattctctatgggaatgaaggaagagaaggagaaacgccgtgcataattggtaattggctcatcttgaagcctcacgttgggcagtcactccttagacccctgccgttgacctgcagaaaatgggagatgggtacaaacttgaggggacctgggtttggggagcctccaaagacgggaaccaaccaaacttgtctctcctttgcagatggtccatacccttacactctgaagttgtgtttctccactgctcagcacgcctcctaattaggtgcctaggaagagtcccatytgagcaggaagacatttctctttcctttatgccattttttgtttttgttatttgcaaaagatcttgtattcctttttttttttttttttttttttttaaatgctaggtttgtagaggcttacttaaccttaatggaaacgctggaaatctgcagggggagggagaggggaactgttatctcccaagattaaccttcacttttaaaaaattattgtacatgtgatttttttttttcctgttcatacatttgtgctgcccatgtactcttggcacatttcaataaaattgtttggaaaataaacacagcacttgctgggattccaggatgtctgcttttctccctctctgtcctgaagacacaggcaggcctgagcacagtcacaggccctctggaggcatacagagacccaagaggagcagggtgggctgcagactgagaatggtgctagcaattgagtctttgaggaaaatccatcaggcttagtggcattcttactgggccctgcccgagcaagctctatcaggcgcagtgggtcatcacacctataattccagcaatctggggaggccaaggtggggcagatactttgagctcaggagttgaagaccagcctgggcagcatggtgaaacgtcactacaaaaaggtgggtttggtggaacacctgtagtcccagctactcgggaggctgaggcaggtgggtcagttgagcctaggaggttaacagtgcagtgatcacatcactgcactccaacctgggtgacagtgagaccctatctcaaaaaaaaaaggtttccagccttgccatcatggtgaaaccctgtctctactaaaaatacaaaaatcagccgggcatggtggcgcatgccagtagtcccagctacctagcaggctgaggtggatcaccccaaccctggagggtgatgctgcagtgaactgtgatggggtcattgcaccccagcctgggcaacagggtgtcaaaaaaacccaaaacctttgtgttctgtatcatttcagagtgacttgtctttacccttgcagtatcattgtgtggatgtgtcatgatttaacctggtcccaaagggtagtttccaggtctatttttgctattgcaaacagcgctgtaacacgtatctacacaagtatcttggccagcttccctgatactgatcaggagataaattcctgccagtggaattgctgggttaaaggatatatatagctggatgtagtggcccatgcctgtaatcccagcactttgggaagccaaggcaggcagatcacttaaggccgggagttttgagacctgggcaacatggcaaaaccctgtctacaaaaaataagaaagtgggccgggcatggtggctcacgcctgtaatcccagcactttgggaggccgaggtgagcggaacacttacggtcaggagttcgagaccagcctggccaacatggtgaaaccctgtctctactaaaaaaataaaaattagccgggcatggtggcacgttcctgtagtcacagctactcaggaggctgaggcaggagaatcgctggaacccaggaggcagaggttgcagtgagccgagattgtgccattgcactccagcctgagtgacgagagtgaaactccgtctcgagaaaaaaatatatagaaaaatgatgtgggcatggtggcacacactgtgcctatagtcccagctactcatgggggctgaagcaggaggatcacttgagctgtgagctgtgatggcaccactatactccatcctgggcgaaagggcgagaccatgtctcaaaacttaaaggatctatataattgcatcatacggtagatagcttcccacttgcagatgcaaatctgtgaagatgccttgcggtggcgggtaccacccggaaggatcctggtttaaggattttgactcctactggagggaagaggtgacctgcagaggagcaggtcacaaaccttgaagtttatgcatgtgtgcttgagaatagcccactctggggaatttactgtgaataaaattttcttttttgagatggagtcttgctctgtcacccaggctggagtgcaatggcataatcttggctcactgcaacctctgcctcctggttcaagcaattctcctgcctcagcctcccaagtagctgggattacaggcatgtgccaccatgcctggctgatttttgtatttttagtagagatggggtttcaccatattggctaggctggtctctaactcctgagatccacttgcctcggcctcccaaagtagctatgatacaggcatgagccactgcgcccggccttacatttttaacatttaatgacatcacaaaagcatcatttggcagatgaacaagttttgcttcactatgggaagtttcaaacaatctttagacaaggaaaaactacagtcatcttgcagccataaataaaatcaactagggtttattgtttttaagccagtcaaggtgataaaaagtgaattttaccagtttgtctcctagcatccaatttcatttcctgttaccagtttgagtctccttccagagatattacatacatacaccatattctgtgcaggtccagctacactcttttttttgagacattgtctcactctgtcacccaggctgaagtgctggagtgcagtggcatgaggtcagctcactgcaaactctgcctcctgggttgaagcaattctcctgcctcagcctcccaagtagctgggattacaggcacctgccaccacgccccgctaatttttttttttttttagacagagtcttgctctgtggcccaggctggagtgcagtggcgtgatctcacatcagtgcaagctccgcctcctgggttcacgccattctcctgcctcagcctcccgaatagctgggactacaggcgcccgccaccacgcccggctaatttttggtatttttagtagagatggggtttcaccgtgttagccaggatggtctcgatcttctcaccttgtgatccacccgccttggcctcccaaagtgctgggattagaggcatgagccaacacgcctggctaatttttatatttttaatagagattgggtttcaccatgttggccatgctggtctcaaactcctgacctgaggtgatctgcctgcctgggcctcctaaagtgctgggattacagacctgagccaccgcacccagcccagctatactttcttacaccaaaggaacaaaggatcatactaaatgttctattacatcttcacatttttttctcacacatttttatttttgcatagaggtttcagagttttctatggtataaacagtctactgttgatgggtagttaatggttctgtctttcaaaagagcctgcttttctagtctgtgaaaacacacaggagacaggttcattaaggaaagatacttccttcaatctcactggcccagagacatctgttcaccgccttgctcaatgtctccccaaaaagcatacttaagcagttttacagtactttttttttttatttttttgagatggagtttcgctctgtccccaggctggagtgcagtggcgccatctcggctccctgcgagctccgcctccggggttcacgccattctccagcctcagcctccccagtagctggggctacagacgcccgccaccatgcccgctaagtttttgtatttttttagtagggacggggtttcactgtgttagctaggtcaggaggtcgatctcctgacctcgtgatctgcccgccacggcctcccaaagtgctgggattacaggcgtgagccaccgcgcccggccagcagttttacagtactttttatgccttttggtagctggcttttcccaagggaatttcggtttttttgttttgtttgttttttttaagaacatgaacttttttttcttctttttttttttttgagatcttgctctgtcgcccaggctggggtacagtggtgccatctctgctcattgcaacctccgcctcctgggctcaagccattctcttcccgctaggattacaggtgccggacaccgcacccggctaatttttgtatttttagtagagacggggtttcgccatgttgaccaggctgctgttgaactcctgacctcaggtgatccgcctgcctcggcctcccaaagtgcttgtattacaggcgtgagccactgcgccaggctaagaacatgaactctggtgccaggtaatcctgcaagcccaccgaccttgaacctagtgtcttcccgtgcctggccagtttcctctgcatatagtaggaaatagtacgacctcctggtgggagttcatattatacagtcagcgcttaatgttggcccgtctgtactcattcctttacctgagtaaactcacagtactgcaagttttcttttatttttagttaacatgatatatacatgcatgattacaagctctgctgcaattatgtccttggacatttcagctgtcgcctattattccaccattatgaaacagctgtgtgatgaactttagcgggagctgtttgcttttctgttttttttttgtttgtttgttttgttttttttaagacggagtgtcgctcggtcgccaggctggagagcaatggcgcgatctcggctcactgcaaactccgcctcccaggttcacgccattgcaggagctattttctttggccaggttcccactggggcaaagggtccatttctgagcctggctctatgtaaggcaaccggaaatcgactgcccttagtaaagatggcggaaagaacggcgtcattgcctgtcaggttgcggcatcggtgccctcgctcaacatggcggccttctgtgcccgccccctccgctaacgggcacgttactccgtccgaacgcagtagacgaaggcggcggcgatggcggcggggatagtggcttctcgcagactccgcgacctactgacccggcgtgagtcacctcttgccttatgggggtgcgtcgcgctgtcgtgctgttatagcagatgtaggacggggagggctatccggggtcacgaagggcccgagtcccctaaattcaggggtgcgtgtgctcccttttgaaggactccctaattcgataggcctgtgtcttgcagtctggggtcatcaaaggctgttcctttctccccaggactgacaggctccaactacccgggactcagtattagccttcgcctcactggctcctctgcacaagaggcggcttccggagtagccctcggtgaagccccagaccacagctatgagtcccttcgtgtgacgtctgcgcagaaacatgttctgcatgtccagctcaaccggcccaacaagaggaatgccatgaacaaggtcttctggaggtctgacctgcagatcctggaggcctgcctgcggggggaggcggggctgcgggactgggtgaaagtggaacgttgtgggaagatggacatgagggcagggtattcccgccccatttgtaacccttcactcgttgcttcacagagagatggtagagtgcttcaacaagatttcgagagacgctgactgtcgggcggtggtgatctctggtgcaggaaaaatgttcactgcaggtaccagacgctcttcacacaccctgccagccttcctagctcctggcaatagacagtggagcagtgcttctgaattagggttttaagcagcttctgacttacacactttttttttttttttttgagacggggtcttgctctgttgccacgctggagtgcagtagcgcaatctcagctcactgcaacctccacctcccgggttcaagcaattcttctgtctgggactacaggcgtgggccaccacacccagctaatttttgtatttttagtagagacggggtttcaccatattggccaggatggtctccatctcctgacgttatgatctgcctgcctcagcctcccaaagtgctgggattataggcctgaaccattgctcctggcccctaactcacacttttatctgtgtgtttttttttttttttttggagacaatatctttctctgtcacccaggctggagtacagttgcctaatcataaatcactgtaacctcaaatacctgaggtcaagcgattctcccacctcagcctgccaaaatgctgggattacaggcaggtgccaccatggccagccctatcatttttttaaaaaaaggcctactttaaaacattcaaatataagtattagtctgacagaacacgatgggatcataggctctgaagtctaggtttccatcctggatctgtggccatgaacaacatgcttaacctctc

SEQ ID NO: 97030 - DNA, 28599 bp, Homo sapiens
gtcactctaagttagtagtatgcaatcccttaggaacctctgaggttttccatttatgagactctcctactactagagtgggccaaagggagagagaatcctatttggagcaatggggaggtaacaggtgacagggaggagtgaagcactcagcaaaaagaacagggttcatgaaaccgtaatgggttcctcaccctctagtgttctaccaccatgtgaggctggtgccccaaaccaaacccaaacccacaatcattttgtagggagttcctgactcaggcctacagctacatggtcatatcttctgggcaggaaagacagccatgatgggtgaaagtaaagaagtgacggacttaggaatcaagaatttagatggggtaagaggcatgtttccttacagactgcagttacgttagaaataaatgccactggccaggcatggtggctcatatctgtaatcccagcactttgggaggccaagacggctagatcacttgaggccaggaatttgagaccagcctgaccaacatggcaaaaccctgtctctactgaaaatacaaaaattagccaggtatggtggtgcatgcctgtaatcccatcatctactcaggaggctgaggaaggagaattgcttgaacctgggaggcggaggttgcagtgagccaagatggcaacactgcactccagccttggtgagagtgagactccgcctaaaaaaaaggatacacctagttcgaattagtgatatacacatgaatatttaaatatcaaccagatagtacattatagagtaactgtagctgtttgatccaaaaagtaagtttagaattacatgtgtgtccaactatctgcttttatattcctttagcctgcatacagaattgacatcaatgacctatgatagaaccaccaatgaaatgtgaattataaaatatatattcacaaatatttaaagaaatatatatgcagatatacatacttctgtctatctagacacacaaacacagggagagagagaaagggagagaaagagaaagaaacaacagagagaaagatgaagattatgtgcttactctcaggatcatccatgtccatacagaatgtcttttacactgtttataaacctcctcactataggccctgcaggccccttattcaactttttgattaaattggataaaaaaggaacagggcaaaaggaaacttcttgttattgtcttgtcacccttagtagcaggcacatacttaggaaagtcagatttcctgtgtatgagacatactagagtggaccaagggaagaaaaccctatgcagagcaacaagcgagtagcagtggacagggagcagtggggccctcggggaaaaaacagagctaatggccctggcagggttcctcacacccagagctctaccaccatgtgaagctaacactgcaagcccacacccatcatcacattgtatggggcagtttcttgaccctgtgtgagagcagagaagacacctataatggcaaaaacaaggcactcatgaagggattttagtgtcaggaaatgagatgaggtcaaggggatttgtatatagaaactgcagctgaatttgaaataaagtaaaccaccaaatgcttagtttgtgcttcattcaattgtaaagaactaaacatcgtttgtgagtaattcaaaccggaaagtgaagtgtaggatgtcatattggtgttggacgatacatatatatatttaaattctgtagcactgccaagtctgaattcaaatcagtaccctggaatggagctatcagtgaactgtgagacagaaataaatcaatatagaggctgggcacggtggctcacgcctgtaatctcttgacctcatgatccacccaccttggccacccaaagtgctgggattacaggcgtgagccaccgcacctgggctctatctctttatttttgaattgtcatttaaatttagtttttgtctgtcgtgtatagcatgtaatgcctttaatttcaaagttatctgagagtatttctcaatatgcaatatgagagtaatatgtttgtatttatgatttctggtatgtttggttttatttatcatctttttctttattaaaaatactttgatattttctttgtaaatttgtctgtattttgctattaattgatttgtttttatcccttgcattttttgttgatatgcaagtcagaagcccatttctagtctatcaatgtttatatttaaatgtttagaaaacataattataccattttatccatcaatatcgagaataaaactggacttgtacctgtgaaagataagaaatgcaacctgcctttacttctatcttcttccacaccttgaatcctagtgtaagaatgcctaaaaattcaaatcaatactattattcatgattttatattatttatctttacttttacaatcatttatttacattttcacctgctacattttttttattattatactgtaagttctagggtacatgtgcacaatgtgcaggtttgttacatattcatgcatgtgccatgttggtgtgctgtacccattaattcgtcatttacattaggtgtatctcctaacgctatccctcccccatccccccaccccatgacaggccctggtatgtgatgttccccttcctgtgtccaagggttctcattgttcaattcccacctatgagtgagaacatgcagtgtttggttttctgaccctgcaatagtttgctgagaatgatggtttccagcttcatccatgtccctacaaaggacatgaactcatccttttttatggctgcttagtattccatggtgtatatgtgccacattttcttaatccagtctatcattgttggacattttggttggttccaagtctttgctattgtgaacagtgccgcaataaacatacgtgtgcatgtgtctttatagcagcatgatttataatcctttgggtatatacccagtaatgggatggctgggttaaatggtatttctagttttagatccttgaggaatcgccacactgtcttccacaatggttgaactagtttacagtcccaccaacagtgtaaaagtgttcaatttctccacatcctctccagcacctgttgtttcttgactttttaatgatcaccattctaactggtgtgagatggtatgtcattgtggttttgatttgcatttctcttgtggccagtgatgatgagcattttttcattcttggctgcataaatgtcttcttttgagaagtgtctgttcatatcctttgcccactttttgatggggttgttttttttcttgtaaatttgttggtgttctttgtagattctgggtattagccctttgtcagatgagtagattgcaaaaattttctcccattctgtaggttgcctgttcactctgatggtagtttcttttgctgtgcagaagctctttagtttaatttagatcctgtttgtcagttttggcttttgttgccattgcttttgttcacctgctacatttttatgctacattaacaattattatttagacttacctaattttgagtttatattatttaccatcttttctctgtaagtcatcttccttatttctatgttcttcattttgattcattgctcagctgactcaagcactttgagtaattgtttttaggaaaggtacatggaggctgtgcttcgtgttgcttcatgttggagtgtctgtctgttgctcccgagtgtgaacagtacttttcctgggtatggatttactgagtcataattatttccttgcaaactctgcacataactgcttgaagctgcatttacatagtacaccttttttaaccaaaaaagtctcaattgtgtatttacttggtatagtttcaggggacactgaaacagattaaggggctaaagccacccaagccacttcttcatgccttcgtaatctgtcagacttggttctgtatggtgacattgtaaagtgagttcagatttatgacatttccttgatacccagagatccagtagactgtgtgggatcagaggttcttgtagtaagggaatggcaacttgaggagagaattcacctcttttggccaattgatcctccatctacatcagccttaactccccaagcctgggtggaggtggtgggtccaggtggagaggggcagattagaaggattggggatttcctttatctcaggttaacctaacatcattcatcaaaggccaatttttttttttaacttttaggtttggaggtacatgtgaggtttgttacataggtaaacttgtgtcggggaggtttttttttttttttttttttacatattatttcatcatccaggtattaagctcagtacccaaatagttatcttttctgcttccctctctcctcctgccctccccacttaagtagaccccagtgtctatttccttctttgtgttcataagtccttatgatttagctaccactgataggtgagaacattcagtatttggttttctgtttctgcactagtttgctaaggataagagcctccagctccatcgatgttcccacaaaatacatgatctcattcttttttcatagctgcatagtattccatggtatatatgtaccacattttctttatccaatctgtcattgatgggtacctaggttgattccatgtctttgctatttgtaaatagtgctgcagtgaacattcatatgcatgtatctttatagtagaatgatttatattcctctgggtatctactcagtaatgggattgctcagtcaaatagttttgcttttagctcttcaaggtattgccatactgctttttacagtggttgaactaatttacactcccaccaacaatgtataagtgttcccttttctctgcaaccttgcccgcatctgttattttttgactttttagtaatagccattctgactggtgtgaaatggtatctcattgtggttttgatttgcatttctctaatctgtgatattgagcttttcttcatatgcttggccacatgcatgtcttcttttgagaaatgtctgttcatgtcaaaggccaattgtcagtgccccagttctgctcaatatctgccctctttcttctccagtcttaggcacaggctgtgagcattgtcttaggattcatggctcttggggtggaatttgagccctgtgttagaggcttcagtatgacagaaacttcctgaagtcttctcctactgaagcctcctgtgttggaggcttctcctcctgaagagcctccaacacaggaggcttcagtaggacaaaaaaaattgttcctcatgagctaccttgtctccagccataaggtaaaatgaggcattattggaggctccatcaaacaggttctccttcctttgattaatggaaggagcccagtctttcgggtgtttctcctttgaagtatatcttactaaaatgtcttacctctgaagttcatttgcaacctcatatgcgactcttgctaatgtgtgtctgttcactaggtgtctagtttgaggagatgacaagagcatcatttactccctatgctcattcctgaaacaccttattttattgcagtggaaactgagatctggccaaagtttgatttgcccaggctggcattaaaatacagttctcttctaccacccttttctgtcttcatgctatactccttgagatggtgaccacaagtttaagtttagtattgctgtaaagttggggttggggctttgcatgcaatggaaatgttactaaacatccaaagtttactgtcttctggatagcatagtaaacaagtaaaatactcatggagcaggaagaataaaattttagctattagtaaaaagcattttgttatacaacttctgaataattttcttttaaaatttatttataagggcctttgttttttggttaaatttacaatgtatgttagaagaaatctgattaattttatttttacttctttttgcagcagcaagattaagaaaattgtgcattcaattatatcatcctttgcatttgggtatgtgagacatagaaaacaccatgtattaaatatatctgagacttggctgggtkcggtggctcacgcctgtaatcccagcactctgggaggccgaggcgggcagatcacatgaagtcaggagttcaagaccagcctggctaacatggtgaaaccccatctctactaaaaatacaaaaattagccaagcataatggtgggtgcctgtaatcccagctactcaggaggctgaggcagaagaattgcttgraccgaggaggcataggttgcagtgagctgaaattgcaccattgcaccgcagccttggcgacacagcaagactccatgtaaaaaaaaaaaaaagaaaaaatatatgagtcttatatgtatctatacatacatatatatatgagacttaatacttcaatgagaaacactgaaataaaataacaaaaaagcatttccactgtccatcagttgctaagtagccatgtgccccatctaatgtaatctaatttatcatggaattttggtttaagctggacwttaagaattgcaaataaatggcttttgcctaagattaatagtaacattaatattgtttttcttccatctgcagaagtaacattaatgaaaatcaaatgttaaaattmtataattattagtaaagtgttttattagtaccttatacatctggaattactctttaattctggaaacaatttacttagactacataagagtaagatttcatactataatatagatttatgcaatataattgtttycttctgaattaatatttgaatttgagctgcaagtttttaaaaaagtacttcaaagactaattcaccttcatagattaggcaaatagtctaatcaatttatggagaatgtatttagaatatgtaacagcaagtggcaggaggtactttagagttcaagackcatgtgcccatcactctgctagaagcacccataaatatgaaatcatgtacttgttgaaaatgtcactgatgaaaaatcttggtcttttaagagcttatgttactcatgctttcatttggtttttattaataaattctttagaattatccagattaatgagggtttattttttatgagaaattggtrtaaacttcttatgaaattctcaaattttaagaagagtttgtaaacagacacaggtgattttaattcagttttacttttctctcttgaggtgttggtctgatgtgtctactataaaaggccatgataatatcttgtgaagtggtttggtgagaattttgtttattaagaactgcttctattgggtgaaaacagtgatttttctgagattctaaggcattacagtttttcctgccactgggcagcttaatactaaataatgacattttggtacctgatcagtggcttaaatatagtatagctatagggacaaatgcccctttatctttgcatttatttatttatttatttatttatttgtttgtttgtttgttttagactatttggagttttcctggtcttactggatgtcactctcgtccttgccgacctaattttcactgacagcaaactttatattccttcggagtatcgttctatttctctagctattgccttattttttctcatggatgttcttcttcgagtatttgtagaagggtaagtttgattatttttataatgcattaagctattttgtacttttataagaagcactttgggaggctgaggtgggaggatcccaaggtcaggagttcgagacaatcctggccaacatggtgaaaccccgtctctactaaaaatacaaaaattagctgggtgtggtggtggttgcctataatcccagctgcttgggatgctgaggcaggagaatcttttgaacctgggaggcagaagttgcattgagccgagatcatgccattgcactctagcctgggtgacagggtgagactccatctccaaaaaaaaaaaaaaaaaaaaaaatttaaaataattaacaggagcattcactacaaactgacttaagagcctttgggccttatgagaacattggtggtggtctggcagtacccsctccatggcctgtgtttgaggtggccatggattgatgctcctctgcctttggacaggggtggaaagagtgggagggactgcatcttgtggtttgagtgacagctcagccatagcacaataaaacactaggtagacttttacagtttttgatctaggccctgattcccagacagcacctttggatccacctggaggctaggagaacttgccatcctgaagggaaggacacaggcctggctgtttttaccatctgatgactgtagagccccagggccttcagcaaactcctgcaatagctaacaagtggttacagcaggtcttgggcaagaccccgtgctgtgctggcctcaggtctgacccaatgcagtcacagtagtggtggccacacaggtgcttatgtcactcaaccccaagctttaggtgcctcagaacagagagagagactctgtttgtttgggagaaagcaagggaagaaaacaagagtctctttttggtaatgcagagaattatcctggatcttgtccaagaccattaaggccactatgagtctgcaagaaccagagtttaggaggcttggggtgccccctaaagcagatagagattagatcacagtatccaagttctttcaaatatctggaaagccttcccaagaacgatgggcacaaacaagccctgacagkgaaaactacaataaatacagtgaaaactacaaccaatacctaactcttcaatgcccagacaccaaagaacatatgctagcatcaacactatccaagaaaacatgacctcaccaaatgaactaaataagacaccaggggccaatcctgtagaaacagagatatgtgacctttcagacaaatcaaaatagctgtgttgaggaaactcaaagaaattcaagatacaacagagaaggaattcataattctattagataagtttaacaaagagattgaaataatttaaaagaatcaagcagaaattctggagccaaaaaatgtaattggcatgccaaagaatgcattagagtcttttaatgcagaattgataaaccagaagaaagaaagaatgagcttgaagacaggctatttcaaaatacatagaggagacaaaggaaagaataaaaaacaatgacacatgcctacagaatctagaaaatagcctcaaaaggacaaatctaagtggtattggccttaaagaggaggtggggagtgtagaaagtgtattcaaagggatagtaacagaacgtcccaaacctacagaaagatatcaatatccaagtacaagaaagttataaaacaccgagcagatgtaactcaaagaagactacctcaaggaatttaataatcacagtcccaaagatcaaggataaagaaaggatcttaaaagcagcaagagaaaagaaaccaataatatacaatggagctacaatatatctggcaggagactctttagtagaaacgtttcaggccaggagagagtggcatgacatattgaaagtgctgaagaaaaaaaacatttaccctagaacagtgtatccagtgaaaatatccttcaaagtgaaggggaaataaagacttttccacacaaaagctgagggattttgtcaacaccagacctgtcctagaagaaatgctaaagggaatatttcaatcagaaagataaggacattaatgagcaataagtaacaacctgaaggtataaaactcactggtaataggtatacagaaaaatgcagaatgttataacactgtaactatgatgtataaactactcttattctaagtagagagactaaactatgagccaatcaaaaatactractacaacttttcaagacatagatggtataatacgatataaatagaaataacaaaaagttaaaaaatagggagacaaagttaagttgtagagtttttattttctttttacttgtttatgaacacttagtataagattaaaataatggattataagatagtatttacaagcctcatggtaacctcaaaccaaaaaacataacaatggatacatgaaaaataaaaaacaagaaactaaatcatatcaccagagaaaattaccttcactaatgaaagacaggaaggaaagaaggaggagaagaccccaaaacaaccagaaaacaaataacaaaatggcaggagtaactccttacttatcccaaccttatgtccaagggtacttgttgtttagctctcataggtgagaatatgtggtatttggttttctggtcctgcattaatttgcttaggataatggcctccagctccatctatgttgctgcaaaagacctgatttcactcatatttatggctgtgtagaattccatcgtgtatatgtaccacattttctttatccaatccaccactgatgggcacctaggttgattccatatctttactattgtgaatagcacagcaatgaacatatcagtgtgtgtgtcttttggtagaatggtctttttcccattgggtatatatccaatagtgggattactgggtcgaatggtagctcgttttaagttctttgaracatctccagactgctttccacagtggctgaactaatttacactcccatcaacaatgtataaatgttcccttttctctgcagccttgccagcatctgttgtttttgactttttatcaatcgccattctgactagtgtgagagggtatctcattgtggttttgatttgcacttctctgacaattcgtgaagtgaagcatttttccagatgctcattggtcacttgtatgtcttcttttgagaagtatgtgtcatgttctttccacatttttaatggggttatttggtttctgcgtgtggatttgtgtaagttccttatagattctgsatattagacctttgttggatacatagtttgcaaatgtttcctcctgttctctgggttatctgtttgctctgtcgatcatttctcttgctgtgccaaagcgctttagctttattaggtcccacttgtcaatctttgttgttatwgcaattgcttttggggacttagttaaaaattctttcccaaggccaatgtcaagaagggtatttctgaggttttcttctaggacttttatcacttgaggtcttacatttaaatctttaatctatctccrgttaatttttgtatatgatgaaaggtatgggtcgagtatcattattctgcatattgctagccagttaccccaacaccatttattgaatagggagtccttcccccgttgcttgtttttgtcagccttgcaatatcaggtggttttaagtgtaaggctttattctgggttttctattctgttcctttggtctatatgtctgcttttgtaccagtaccatgctgttttggatactgtagccttatagtttgaagcctctggctttgcccttttgcttagatttgcttaggctgttgaggccctcttttggtttcatatgacttctagaatacttttttctaattctgtgaagaacgacattggtagtttgatagaaatagcactgaatctgtcaattgctttgggcagtgtggccatttgaatgatactgattcttccaatccatgagcatggaatgtktttccatttaattgtgttatctctgatttctttccgcagtgttttatagytcttgtagagatctttcacatcctttgttagttgtattcctagttatttcattttccttgtygctaccataaatgggattctgttcttgatttaactctcagcctggacattattggtgtatagaaatgctgttgatttttatacattgattttttatcctgaaactttgttaaagttattagttctagtagccttttggcagagtctttgcttttctggatatagaatcatgtcatcagtgaagagarataatttgacttcttcttttgctatttrgatgcctattctttstttctcctgcttgagttctctaggtaggacttccagtgctatgttgaataggagtgatgagagtcggcatcattgtcttgctccatttctcatggggattggttccaacttgtgcccattcagtaggttggtggctgtgagtttgtcrtagatggctcctattattttgaggtatgttcccttgatgccgagtctgttgaggtttttaatgtgaagggatgttggattttatcagaagttgtttctgcatctattcagatgatgatatgatttttcttttagttctgtttatgtggtgaatcacatttagtgatttgggtrtgttgaaccagccttgcatccctgtactgaagccttgattgtggtggattaacttactgatgtgctgctggattctgtttcctagtatttggttgagaatttttgtgtctatgttaatcagagtaattggcctgaagttttctttttgtgtgtttctctgccagattttggtattaggctgatgctggcttcatagactgagttagggaggagcccctcatcctcagttctttggaatagtttcaatagaactagtaccagttcttttgtacatctggtagaattcagctsttgcktcatctggtccagggcttttccttgttggtagattttacattaatgatttgattttggaactcggtatttgtctaaggtttcaatctctttctatttcaatcttgggagattgtatgtttccaggaatttctccatttcctctagattatctaatttgtgtgcatagagttgtttatagtattctctgaggatcttttgtatttctgtgggattgtttgtaatgtcatctttgtcatttatgattgtacttatttggctcttctctttttttctttgtttagctatcaggctatccatcttgtttattttttgaaaaactaattattggtttcattgatcwtttgtgtggatttttgcatctagtctaaaaaaaacagcacytcaaaaagcacttcattcagtgcttctctaattttagttatttctcttctgccagctttggagttagtttrttctttttttctagttcccttaagtgcaaagtaggaaagttaatttgagatatttctaacttcttgatgaaggcatttcgtgtgtaaactttcctcttaacactgccttagctgcatcccagagattctggtatgttgtgtccctattttcattaattgcaaagaatttttttatttctgccttaatttagattttcacccaggagttattcaggagcaaattatgtaattaccatgtatttatgtagttttgagagatcttcttgatactgatttcwatttttgtctcactgtggtcagagtgtgtgcttggtatgatttcaaactttttgaatttattgaggcttgctttatggccaagcatgtgcttgatcttakaatatgttctgtgtgcacataagaatgtatcttctgtgtttgttgggcaaagtgttctgtagatgtctatcaggtccaattggtcaactgtcaagtgcgagtacagagtttgttagttttctgcctcaatgatctgtctattgctgtcagtgggttgttgaagtctcctgctgttattgtgtgtctaaatctttttgtagrccaagaaaaacttgttttatgaatttgggtgctccaatgttgggtgtgtacatatttargctaggtcttctggttgaattgtgtcctttatcattctataaggaatgctcttctttgtccttaatttttattcrttaaaaatatgttttatttggccaggcgcagtggctcatgcctktaatcccagcactttgggaggccgaggcgggtggatcacgaggtcaggagttcgaggccagcctgaccaacatggtgaaaccctgtctgtactaaaaatacaaaaattagccaggtgtggtagagcacccctgtaatcccacttactcgggaggctgaggcaggagaattgcttgaacccaggaagcagaggttgcagtgagccgagactgcaycactgcacttcagactggcaagagactgagactccatattaaaaaaaawaaaatcaaccacttagaatagtaacacacattaagcagatcatacatctagaatgggttaagcaaccatttgtaagcatcttcataagaaatgatcacctctgggtttttctggtaatatttgaaataaacatggaaccaaactgtatttccctcagcacataactgtccaaattgcatgtgcaagtagaggtttatgtaaaagccctgacagaactgtactcagtcttttgaattagatgcataaggctactgaccactctctattttaccaagggaaagagcagtgacttctctatttcagtacaattatgggcagaaatgacatgatgcaaaatagaggttcttccatacaatttaagatgtagggtataagggaagacgaaaaagcaaaattcccaagaaatcagaataacttcacactggtcttgtactacaagaaaccctgagatgaactgtagtcctcaaacacctgtgcttggctcaggccctccaagacacttcagtgtgcttccaactggctcataatcaacttcctggtatattcgtaggccaaaaagagtgctccattgtcagggaatgctcgaatcatagtaggtttcagtccagaatataaggccattattcctagaagacaaaagggcaagtaaagactgcaacagtccctcctttggggacacccacacaactgcatagcacaggtatatttacacatgcaaatccagacaagtgtgctaaaaaccaacaagtcatggaaggacgcattcccagctttccctaaatagaccaacagaaacaaggacaagtatcaggtctcctggcgaaactgactgatgctcaggtaacataccccaattccatgcttggttaactcttagtacacggatgggtcagcrttgaggcctgagatggccagacagatgcaaccatggagacagaggtggccacagctttgcagcttcacctgggcagtggcaagagcaccaaccttgaggttggagactggtttataatattagtactgcccagggtggttatgaagattgaattagataagggaggtataagtactttgtaaaasttcacgttatacaaatttaagggaggattactatgagtaatagacaagttatctgtgctctatttgggacacaaagttgctgtgttactgttctctttccttttacaatcaaaacagagcagttcacatctcagattttaagatgtatactagatgctggaaaaacaggtgtttattcaccttcatttttcacaacatttataaaggttctgataaatcctgccggttttccagacatggaaagaacttgaattctggatttgatacaatccactggatataccgcaagccataggcaaatcccgccaactccctccaccacttaacatcaaagggacagggcctagagaaaaaaaaaatagcaaatggtattttatctcaagaacagctgatgtgacatttccagaggtcaatgtagtaatggctgcaggtaggtgcaaatagaaatgctaatgctgcggaagagttctttgtggaaactgtcaaagctcttgttcccaggctctaagaacacaaggttttgtttggtagcccaggtctacgcctgggtcttgccaagtacaagaagctctagtgagggttgtatttygtttggtcactgaggtgtcgagggctggcccacatgaaccagcaggcctccagctgagtggcaaccccttacggtggggagaagacaggccaaacacaatctacstctttttttcttttttcaactttctcattcttaagcattttaatagccccgattcttcctttaccatgtttttattaaacatagcagttaagtctgggagcttgtctaatcccagaatagattcaaaatgctgagggagatggyaagaacaggtaaatgcatttgcattcacagcagtggggtgtgatggtgtttgctccctgcaggtatggtttctgtggattctctgctctttgtrctctcctccccacattggtggctccacctggcacagggaagcttctggattccagaaggtaacatgttggcaggcagttgatagcaccccaccctccaggcttgataatttccttaggacaggggctgaagcagtacatcccaaactttcttactggaataaggtttgttaatttttctagatctattttagaagagaagaaattcagaaatgacyttcccagttggggaatcacctataaataatcttgaaaaagcttaaaacytggtaatctcagtagckttttgagagtagcgaaaaccrtagttctttgtagcttatcatgtttwgttggttggtacsactgcatgcgatgtttgcctcacataagtgagtttttcttccctgattttgtcctttrctaaggaaactgaactgaactgaagtccaggtcttctrtaayagagtgtctctccttcaacagggaacaacactacagtcgcccrtmgytttgtttctgttcagtctccayygtggcatgccacactctcctggtttgggccctgctcatttctttactgccttcctgcctgcystttttgtgcaggtaggtcatcccattcatgctcagccctcctsgctgtmtacactgtcttcttgggcaatcgtatccagtcccaagccttttaaaaaaacaagctatacccatcctggtggaattcctgcctataaaagggcgcaccttcagacytccaggcatgtccagcgaacactgctatgcacamggaaccaaattcagttgtgtgggacctgcagctgcaattgggtttccaactyccattgctgatgatcaagttaaaataygaatgtgctggattaaatgctttattcagcttatctgcatctaggttatctaaaytacacasccacttaaaacattctgtcacctcttctcttggaataattaattattttaatgtaattcagatctcattttatcctagcccagcagtacctgggagagaatgactcaatcatagtaaaatcatattaaattatattccactgattcagaattggagataatctggcaattaaagkgagaagtgtgtcattcctctcctggaagaaatgaacagtaatgatgggatcacagagatcatacatataagggcccaatacaggttcaaaacatgcccaycggcaactgccttacatacctggctcccaaccatactgttacaatttctatctttcaaactcactgtaaattacaaatgtggtacccaaatacctgtatgcacataaatakgaaaaggtaaactcttttttttttttttttttttaggtggattytygctctgtcacccaggctggagcgtaatrgcacaatcttcgctcacttcaacctctgccttctgggttcgagcaattctcctgcctcagmctccygagtaactgggattacaggcgtgtaccaccacrtctggctaatttttgtatttttagtagggacggtgttttaccatattggccaggctggtcttgagctcctgaactcaagtgatccactcgcctcagcctcccaaagtgctgagattacaggcttgagcaaccttgcccagccaaaagtaaactttttaattccatcacaatatgttctagatctttgacagactgaaagacatagaatgtcaaaaggtgagactctctcatgtggctaaacaccctcctactgcagatacagaactgagcccaagagcattcacatgctggtgagaggtggtggccaggggcaggcagatggttgcaccactctcagggtcagcatcctccccagwgtggcatgggggaggggaggggagggggcacggggcctgggaggctgtagcctaaaggcacgcagcgggcaagagactactgggcggacccctgccagccttcagttccatgagcgtctggtgccaggacgctccttgtgggctctgccctgggagaagtgcccttgcccagtgctccttctcggtgtctgtgacgtgctgtctccagtcctcctcattagcataccttggccgacctttggctcatggaaaaacactttgctcttctcggaacaatttctttttcacaactgagcaaatgactgatgaggtgaccacactcatgaccatactcatctgttggtggtgggtggggggtrgactggatgaggacagcattgggcaacactctttctggcctccccactgcagggagccacaattactgtgggaggccagggtagtccagggtttccctttgggccatcagcattccaactgctcctcctacttstggcctytggagaactaaattaccaccatgcacttcccattccacctgtgcctcagcccgagggtcctgctcttcctgcatattcaagctgatctttctagggagtagcctgcactgtgccagcactacccccttgtcacaggcagcacctccctgtgctgggggagcctcagtctgcccttgggctcaggcccctaggctcaggttagctgacattcccaggaaatcctacaacttctcctttcctttcatggctgtaagacacagtccactatcagtctcattgtaaaagacatttctaaagagtgtcctcctttctttcccaacactagcagggacagtaagtgatgtttcctgggagatgctatggtgttatttttgcactacaagggctctgaagactgccaggcttgaaatgaagaacgatgtcacctgcctatcacagccaggtgacaatggacaaggggcttcacctctgagctgttttccagctgcactgggcacattccycccctcaccctgactcacaaggtgttagcaataatggacacttctctaccttctgccacactctgaacaatgccacacttccatcaaatggattcatcccaaaggtaaagcccatcacttctagagggagaaaggyaatgttttcmtaccactttyatttgatctcatttagaaggtacttgaggaatagagaagactgggttttctctgggattatacttaggcatttcttaaygactgggacatgttctgaaaaatctgtcattacacaatttcatcattgtgctatcatagagcatacacacccgaccctagatggcatagcctactccacacctaggctgtacagtatggcctgttgctcaagkctacacacctgtacagcatgttactgyactggatactgtaggcaactgtaacacagtggtatttgtgtatctaaacgtatataaacacagaaaaggtatagtaaaagatggtataatttcatgggaccaccatccratacaccatccatcaccaacagaaacatggttatgaggcacaggactgtaactgcagcccctgccatgaggtcaatggcagcctggatagggggattggacttcatgtttgcccactcttctggtctcatggaaggcagctctctggagcttatgacaggcaccacatatccctggggggaggcaagagttcaccattagtccaagtctgcagcctcccattctctaggcctgcagccaaattactggacctaaacttctgggagccatgaactgggctctacattgttccaaaggaaaggggctcaaggaatcagtgcagcttagcaattgtcccttagaaagctcacagatcaaaaacctcccctgcgtatcaattctacagccaccagcagcacttcaactgacctttctgaaaactgaaaaaatgaacaccaaataagtcaaccacagatgtactaacccacatcaggcttgcttttttagaggcctgcgytgagccatcaactgaacaggctcacttctaaatcagaaagcagcctgtgctgcgtgcctaagggaacgtcacaagacagtaggtctggaaagaagcacccaggcagccaagggtgggagctgcaccccaggatcacaaacgccttggtgaatgcctgctctacctgcagtgtggcccctttggcctctacagctggaagtcttcatctgtacaaagtgaataataaaaatattataaaacaaaggcagtcacaaatagccacattggtgttgaggtgatcaaacccaacaccaggccatgggggctacaaagtccggcagagtcaaaggaatgagacaagctaatagtacacaaagtgggtccagggggccaatgctagtatagaggctgtgaaggccctgaactctgggagcccacaccatttattggagattaaacaaagaagcaggtggtgaggacgtgctggtcaaaaggaagcagtcacatcaagtgtttagtttayagctgtgtcggtctagcattttctttgaagcatatggaacatgttctgctactcragataatgaacatttccttctrcctcaaggtacaatcagtttatgatcctgggagagcaagaagcaaggagccagcaagtctggacacattccagaggccacgaggggttttatgtcctgagtcctggattccatccaakccatgaggggttttatgccctaggcttaggttgtagtgcggcggggcagccttccacccttaagcacagaacctggtgttccataggccacaagaagttttaaactctggrcccaggacatgttccaaggctcttttcatattatgtcagactagcaagtcttgcctcagcttttctcccaacaattggactgatgggttgctccactgggcacaagcatcatgggttcttaaaacaaggccctgaacaagcaccaaatatgttcctgtcaccacactccactagcccttcaactataaacatgcataggagtcacctgggggccttgctaaataaaatgcagcttctgattcaatagtctcaaacaggaccagagattctgcgtctcttgttgagttcccgagtgaggcagacaatgccagtccacagactcacattttgagatacagcacctgggccattgtgttccaatgtgcttgataacctggagcacctattaaatatccaagttgccaggactttcttctggaaatcttaattcagtatgttttgtttggagccttggacgtttgggaaaactagaatttctttctctccctttagacaaaagtcaactactgctgaggcatgggcttaataaatgttgactaaaatatccaactcaacaaccaatcctgtataattttcaaactctgtcaataacttgctgggtccaacctgcagaccctggctgcgtgatggatgaagaaatgcactcagacacaggtatcctgtgaaagaatggggtaggggactgggcagctcccagacactgaggagggtgctatraagagtcagcaggtgctataaagagtcrgcaggcacagccctgtcaggctggggctccaggcatttattcagtacagatttaatgacaaagttctcaagtaaacaccacaccactagagggtaattaacattgctgacctcctgagtagagagcagtcatgcgcccgcaaatgatcaaaggtctgttttaggaccacatgagtaaacaagctatttagataaacttctctacrttcctatgtatctacgccctaagcttttaagagaattcagctgccttcagccaaatcttttactgaaggtatgcaaacctcccagccttccaagaagttttgtgtctatctcctacaacttaatttttataatttctcccaccaccctgacagatcccctacaaaagaccatgtttcttctcagcttgctcagtccagctgagccagctttccactggactccygaatgtgagaaggacacaggctcccaggaccatccagaagcatctctcatcaccttaaagctctgaaacactggctgggtgcagaggctcacacaagtaatcccaacacattaagaggctgaggtgggaggattgcttgaggccaggaattcaagaccagcctaggcagcatagcaagaccccatctctacaaaaagtacaccccaaaattacctgggtgtggtggcacatgcctatagtctcaattaggaggctgaggtgggactattctttgatcccaggagtttgaggctgcagtggggtatgatcgcaccaccgcactccagcctgggagacagattgagaccatctctaaaacaacaacaggccaggtgctgtggcttatgcctgtaatcccagcaatttgggaggccgaggcaggtggatcacctgagatcaggagttcgagaccagcctgggcaacctggtgaaatcctgtctctactaaaaatacaaaaatttagcagggcatggtggcacacacctgtaatcccagctactcgggaggccgaggcaggagcattgcttgtacccaggaggcagagattgcagtgagctgagrtcacgccattgcactccagtctgagcaacaagagcaaaacttcgtctcaaaaaaataaaaaattaaaaaataacaaaaaatgagacagaaaacaaatattttgtttcattattgcttgttagttgattaaagtaattctgcttccactttattttcaaagacactaattgctacactgaataaaaccttaatggagtttcattataagtatctattatcatttgattattttctacatagaagcatgcaaaaagtttaaaattcagtttcatttgacttagtcttgactgtaatgaaggactctacgaagaggggacacagtgtttatgagctggagtcctagtaactgcttggtggcagagtcccagtcattccccagttcaagccatgggcagatagatgggtactgtccttcagttcttcttacccattcacttgctttctttattgcttcaaaagcccagggaatattcttaggttaaaaaaaaataaatgtttcagatttcagaatataacatgtgaaatgtaatgtggtactaaacccatcacattatatcacacaaaatgattctgccaaaagttaagatatttaataaaagcagttttccttgacatcttccggaagttcttctaaccatctgaacttgagcttatgcactgcattgtcaagtgtcctgtgccccccacctcctggcttccacgtgcctccaggcatccctgctgcctacaggacagctcaggttccagcctctctacagttgtttgtggttgtcccctttccaagcttctcagtctaaatcctatccattcttcatgcacaaactcaagtagtatttcacaaacgaggcttctgtttctctctccttcccactgtactgacttgattaggtcccttcagaatatctgacagtcccccatgaaactggcatctgttcagctgtgtcacataaaccaggaacaacttggtagaataagcttatcgagtcaagtgtgtgtccactgaatggtgtcaaatatttgagactgttgaatattcaagtctattcaacactcagaaaaattctggggttgttcattaatattaattagctacttcctcatttgttctgtcatctgttagaacttgttagtgaacaagtggcaacatacaccaaagttcttcagaaaattctatgggaaaacctaatattttgaaaattctctccctgttcctcatttctccctgtgaactgggaaagggccatcagtatagcatgatggtgaagagctgggtttgagtcctgactctgcaatcacatgatactggccatgtgatactgtgtggctttcattcaacactgggaatctcagtttcctcaattgtgagaataacatgaggtcccatgggtttgtggtggaaatcaacaaagcttataaatttaacgtgcatactaatccctggtacacagtgggcactcaataaatgttcactgaatgtcatgatagaatgaacatactaaataagaaccatgcccgaagtttaaaagaccgacatttcctggtaaatgttcgtctactgacagttactgactgctgaaaacaacaaaactggctttgaatattttcactaattcagccggcctcctttagccctgtggcctctacactttttggttcacattccactagtaagaaaaccttgtgcctacacccccaggtaatgtactcctgcatcaatgttacgtacatcccgaaatagaaaatacagaaaaaagtttcaaacatgcaataaacaggaaataaaaaatatttaatttttttttttttgagacaagagtctcgctttgttgccaggctggagtgcaggagcacaatctcagctcactgcaagcttgtgatccgcccgcctcagccttccaaagtgctgggattataggcgtgagccaccgcgcctggcctaacatcgtattgtcttatgtactcaagtgccagcaaaccattttgctagcaccatagcagtaatgtagtaagagctatatgctgcaatatacttgatcagttctgaacatcttgctttaatactttgtggtattacagttcaaaagcacgttcaaagtttatacttgttctaacagctataatattactaattaggaacaatataaatagaataattacctctttggatgtgcctattaagtcaaatactaattttttagtcccatctcctagctgttcaaagtgttttttctttgatatttatttaattaattctcttggcaagtggcactggtttattttcacttgaggccaggagtttgagaccagcctggccaccatggcgaaacctcatctctactaaaaatataaaaattagctgggcacggtggtgcgcacctgtaatcccagctacttggaaggctgaggcacgagaattgctgatcttaaactcctggacttggtcttgctgggctcaagtgatcaacctgggaggcagaggttgcagtgagccgagattatgccactgcactccagcctgggcaacagaatgagaccctgcctcagtaaataaataaataaataaataaataaataaataaataaataaatacaaaaaaaaaagaaaaccccccaaatagaaaaaagaataaattctcatctttcttggcaaactaatgagaaggtattgcttttcaaaaaatggaagtataaattacatatagtaaattatgattcttttttttttttagacagggtctagctttgttgccccggctggagtgcagtggcatgatcacaactcactgcagccttggcctcctgggctcaagcaatccccccccctcccccagcttcttgagtagtcacacactacaacactcaggtaattcttaatttttttgtagagacagggtcttgctatgtggtcaaggctggtcttgaactcctggaagcaagcaatcctcctgccttggcctcccaaagtgctgggattccaggtgtgagccactgtgcccagcaatgcctgggtaatttaaaaaagtttttttgtagagatgggggtctcattggttacctaggctggtcttaaactcctgggcttgatcttgctgggctcaactggtcctcctgtctcagcctcccaaagtgcatggattacaggcatgagccaatgtgcctagtccagaaattcctgaacacctgttttgtgttcaagaactttttcttaatcgttacacttaaaaaatagttatcaggccaggcgcagtggctcatgcctgtaatcctggcactttgggaggccgaggcgagcggatcacgaggtcaggcgatcgagaccatcctggctaacacggtgaaaccccgtctctactaaaaatataaaaaaattaggcatggtggcgggtgcctgtagtcccggctacttgggaggctaaggcaggagaatggtgtgaacccgggaggcagagcttgcagtgagccaaaactgcaccactgcactccagcctgggtatcaaagcgagactccatctcaaaaaaaaaaaaatagttatcaatatttctttaaatatcataaaatatccaggtagtgttttaattttccctgtctcattttttaaaatgcagtgggttttgttcaaactaggatctaaacaaggtctactcttgcttttggttgacatgtctctaaaggtttatttataggttcgctcctcaaccctttttttctcttgccatttatttccccacattccagactttgctgactgcatttgcatggtgtcacataacatgttcctctaatctaattcaagtttagaaatcaagggttttcatttaacttgtttgattttatacatattagtttctaacaatattagtatctaccttccaaaataacaaatcaaaagtgttattaacaccatggctactcccagtgagatttctttgtaatattttttaatccttaggcactatcccactaggggatttgacataatttgacacagtcaaattatttactatgttttaaagtcatcttaaattaattcccaggctgggcatggtggctcacgtctgtaatcctagcactttgggaggctgaggcaggaggattgcttgagttcaggagttcgagaccagcctgggtaacatggtgaagccctgtctttacaaaaaatacaaaaattagcagggcatggtggtgcatgcctgtagtcccagttacttaggaggccgaggtgggaggatggcttgagcccaggaggcggaggttgcagtgagctgagattgcaccactgcactccagcctgggtgatacagccagactttgtctcaacaaataaataaatatcaatcttatccattattacataaaatatttacatagttccaaagtcaaaactgcaaaacaaatcacactaggagaaacctagcttccatccttgtcctctctaccaaacctcccttgcaacagtatttttattagtttgattagttttccccttatcttgcctttaaatgaacataagccaattacatgtgtatgtatatgtgtatatgtgtatgtatgtgcatatgtgtatgtatatatatatctacgtgtatgtatgtatgtgcatatgtgtatgtatatacttatatatacatgtgtatgtatgtgcatgtgtgtatatacttatacatacatgtgtatatgtgtatgcatgtgcatatgtgtatgtgtatgcatgtgcatatgtgtatgtgtatgtgtatgcatgtgcatgtgtatgtatatgtgtatgtgcatatgtgtatgtatatatctacatgtgtatgtatgtgcatgtgtatgtatatagttatgtatacatgtgtatgtgtgtatgtatgtgcatatgtgtatgtatatacttatatatatgtgtgtatatgtgtatgcatgtgcacatgtatgtgtatgcatgtatgtgtatgcatgtgcatatgtgtatgtatatgtgtatatgtgtatgtatgtgcatatgtgtatgcatatacatatacatatatacgtatgtcagagggatcctactctggtcatgcccctctcgccatggggtggagggtctgtagggacaagagaatgtgcccaccccggaacccacatcctcctttttagaccctgcaactctagcgttcctgaccacatggccctgagtccacttccagggtcttccctggtctgtcatcctgagtttgaacagtgctgccatctcactggtgctgcaaggtggctggggtgagggggcactggcatggggtctggatggcattttgatgggtggggtggggtattcatgtgtgcaggcaaggcctcttagggtgctaggggtcagccaagggctgaatttgaacctggccttccaggtggttatgaagttgtatttgccaagggaggagattaggacacacttcttaatctaatagtttgctagtttgatttataactttttaaatacttgtattgttataaactataaagttataaactttaaatacttgtatttttgtcccaggccctgccattgttgggaacagggctgggcccaacagtcacattgtgggtcttctggaggcacccagaatcagcacactgcagtgaaaagtaccatatccagagccagaagtgccgggctccagggggagctgcactgaaactctttgagcccatttcctgtgcagcccaaggcacaaataccacataagccctgcccgccacaggagactggggcaagctgtcacctgcaaacaaattatcttcctacatacttataaagtagtctacacatgtaagataattccctatagcttgtttgtaaggtttattaaataaatagttgaaaatataaataagttgcgtaatactatagttaaagccacctggaaatagaagcgtcatccagttccatcagtgatttgaacactattccctttttttccaccctggtgcgaataaactgtagtatctcattgtggcaattaggtccaggagacattctcttcattttatacctaaaggggaaaaaactccg

SEQ ID NO: 97031 - DNA, 12945 bp, Homo sapiens
agtgagctgagatcacgccactgcactccagcctgggtgacagagcaagactccgtctcaaaaaaaaaaaaaaaaaaaaagtaacatcacctgatacccagtccacataaaatttctgctcctgcctcaaaaatgtccagaacgatgtatgaattttaaaactgttagaagggttcatggcttctgctcacgcagttctctgaactgaagtggggtccccaggctctagcccccgggggaggtgaggtgaggggcaggcctcccgggggctgacgtggccacccttgtccgcccgcagtggtgaccatcatcaaggggaaggtggaggaggtggagctcccagtggagaaggtggacatcatcatcagcgagtggatgggctactgcctcttctacgagtccatgctcaacaccgtgctctatgcccgggacaagtggctggtgaggccccagcgggacgggtgcagctcgcgtgggctggggtccaggtagaagacgaaaaccacgctcaatttttcccacagacgggacttactgtgggggcttagctgcaaggtgttagaaagccacagcccaagccaggtgtgacagaccctggagggagatggtgcgatgtgggggaggtcgtaggaacaggaaatccgtagcggcgcaatagcccaggtccttaggccccagcaggcctccccgggagaggtgaggtgacggagaggtggatgaagcatacggaggggcagccagggcaggtgtgcccttgctgcgtgtggaacagcagggaggcccgtgtggaaggagggtctagaacggcagcaggaggaggagtggaggtgaggggtgacagggcgtgtgcagattttgtggaggcttatgggaccccgtgcttttcctctcagagcagctagggagggtctgaggatccccagaacctccaagggccgggagctgactggggtgcccctgggtgccctctggcggccgtgtgggaaatagaccagggggcgaggggtgagtgccgctgcgacatgagggtggcccagaccagggcaggaggccacatcttggaggcaagactcagggtagtgttgccaggccccacccttcatgcctcgccctgcccctctgtaggcgcccgatggcctcatcttcccagaccgggccacgctgtatgtgacggccatcgaggaccggcagtacaaagactacaagatccactgtgagcgcggcccgggagctggcgggcggggcctcgggtgggctgctgcgggctcaccccctccctgcctgcctccccagggtgggagaacgtgtatggcttcgacatgtcttgcatcaaagatgtggccattaaggagcccctagtggatgtcgtggaccccaaacagctggtcaccaacgcctgcctcataaaggtgagggggtgggcatggccaggtgccccctgggttgaaaccaaagagaggccatcacctggccctggcatgggactttggggcccagaatgttggcctgaggtctcagagcctgatctgccagccagaggtggtgctagaggcccaggaaagacacttcgtcctttaaatatctttgtgagcgctgctgtgtgagaaccatgcttggcacttggcttctggcggaggaaacacccaaagctggcagctaaagcccacagcccatgcacggaaaggcaggaccccagggcgatgagcggatgcacatgcacgcgggccactgcagaagagcacggggccaggctgggctccgagatgtgcctgaggtcccagctactcgggaggatcacttgggcctgggagttcaaggctgcagtgagctgtgatcacatcactgcactccagctttggtgacaatgttttgttttgttttttccttttgtttttttttacttctgagaccctgtttaaaaaaaaaaaatacggcgatgagtatttgttgagctgggatgtgtgagccgggtgaagctgggtggctgaccgggggatcctgtcggggaggagtaagttgttgagtgggggaggagaggagactacaggggcagggaccccactcgggccaccctcctgagagccaggggaactggcgcagggtttaggttggcatttgtgttgccgtttgaagccatcatgttgttggacttgtcaaggggttggggagacagtggagtggggcgcctgcattctaggaggtctggacagagttagggtggcactgccaggtttgggtgttggagaggagggagcaaggaatctgggctcaaacccacatggtttattgggagccggataggcaggatgcagagtgaaggaggagccgaggctgggtgccagtgagggagggctagcaggaaggggacagcgaggtcacaggccctctgggagcttaagggagggaggaggggatgaagcgaggtggggacgcatcccggagctcgccctctcatgtcctgcaggaggtggacatctataccgtcaaggtggaagacctgaccttcacctccccgttctgcctgcaagtgaagcggaatgactacgtgcacgccctggtggcctacttcaacatcgagttcacacgctgccacaagaggaccggcttctccaccagtgaggcggggcccacagggctgggggccgttcccgagccagggcggaggcgcacccacgtagtggagggggtgacagaaacgggcagaaggaaccatggggacacgcgtgttccagtgtgagctctgccatgtagcagtcacgtggccttgggcaagtgacctgagtgtgcagtgcctcagtttcctcatccacaaaaggctgacacggtccctgtctccaaagctcaatgacagggaggtgactcgcggatagcagtcccatcagctgtcatgggggtgggcattccgacagagggaacgcaagggtggggttggggggggcagcaggccgaggccggctgacccgcccgcgcccccaggccccgagtccccgtacacgcactggaagcagacggtgttctacatggaggactacctgaccgtgaagacgggcgaggagatcttcggcaccatcggcatgcggcccaacgccaagaacaacgtgaggctccgggcagctgggtgggagggtggcagctagggcggggagtgtagattggggggggagtggtgggggaggaatggtggcagcgggggtaggggatgggggcagccggggtgggggatgggggcagctggcgggggcgagcacctctgcctattcccgggtccccaagcccctcagccccatgcctgtctacacagcaggattgcttgagcattcaccggaagttatgggcctggggacccaggctgaaaccctgccctcctggtgcttccactctagacaagggggtcagtgacatggtgatgccagttggaggtgacctctgtcaggctgggagcagggcagacaggtgttggtgtaggtgggctccagggcaagaggcagcccccagtagagtgcacggggttttctagcccagctgggaggcatgagaggagaaaggcagctttttgttttctgctcccctttctttttcctcctgagcacttggcaggagctgccatcacctgagatcagggggcttccgggggagctgggggggcttctcggagacagggtctgggcagagatccagtgtggtgggtctgagcaggcaggaggatggaaggcttggagcctggagtcgccgggagtggtctgggttggaaaagtgggtcccggccgatgggtgcgagggtgggtggcactcagggtagtcatggaatgtggaccctgggacacccacgagcctgtgacagcagcagttgtcaactgggcagttttactgccccctccgctccccgcccccccccaggacgtttgccaccgtctgtggaaacatttgtggttgtcactccggagaaggggtggtcctggcatctggtaggtaggggccagggggctggtaaatgtcctgcagccacaggaccaccccctacaaagactcatgcagcccccgggaccacggcactagctgggaaacggatactggagagggaggaggagtcctcgggcgttggtgactttgtctcatcttcatgtgctggagggtatggggggaggagaggaagtggagacagcaggctggaccattgtgtttcactggaacgtttgcctgaggaggaagtgggcttgggagaggttttcttttttatgaaagaagcaatcactgcattgctgatgggaatcatcctgatggagaaatccaagggcaagggacagcagctgggctctactcctgagtgagtctagtgggcttgggggtgtccatgtggtgctgtcccttggcagggtcagggcagctgctagggtgggaccagcagttggggtctgcagcgtggagatgggcaggaagctggagcccggctcatcgtcgcatagcctgcctgcacccgccccccgccaccacctcctggtgggttccgccctcatgccccacctctccctgcagcgggacctggacttcaccatcgacctggacttcaagggccagctgtgcgagctgtcctgctccaccgactaccggatgcgctgaggcccggctctcccgccctgcacgagcccaggggctgagcgttcctaggcggtttcggggctcccccttcctctccctccctcccgcagaagggggttttaggggcctgggctggggggatggggagggcacatcgtgactgtgtttttcataacttatgtttttatatggttgcatttacgccaataaatcctcagctggggtctggctttgtttcctgggggcaaaggaggtttggggttcctttcgcaggtactgcagtgccagcctcagcagtggggggaccggccttggcacctgctggtggctgccattctgtggatctgcgtctcccgtcccccgtctctaggcctcttgctccccttccttggttccttctcggggtccctgtcctccacagctgtctctcagggtctttgtccaactcttttcatccctctcctgggtctgcgcccctcccctctgcggtacccgtgtcctgcctagtaggggatgggggtggctttccagcacagccagccctcaagtttcccagaacagtctccccacctccccccaacactcgacattgttcctctctggctgttttttcctgttcgggtcccttcaaggcccaactgtgcccagccctctgcagctggggacactgagtgggttgggggtgtatgtttgcaaggatagaatttctcatgggggagtggccctgcttcctcccctagaatggcttggggcttagggctggggacttgccctccatggaggtcagtgggagttgcagctgtaaggtggcagggcctacccatcttacagaggtgaagacgaggtccctctgcctctgctgcagacatggcgtctgcacccacccttccaccctcagggcctggccacggggtcctgggtcccccacaatactgtgcactcgacctggttgacccaggacaccctcctcgttgaacagccctggctacacctgcttcagtgcaactggagccctcaccggcgagtgcctgacacctcggccttttctcttccggaggggcgctcctcagtgtgtttggggtctccctcgctccacgccctccagggggccgcatgtgcacttgccctgcattgcctggcccccgaggttccagggtctcaactgtctactaaccggcttcccgacagggtgagggtgaggtcgcatctacaaccagagccagcgcttccccgccgccaccccttttcttggaatcccgctgcttagctacctgcgggtgtcattggccccgccccatttccccacgctttgaagggggcgagtctccacagacctcctagggggatagacagcagctggtgtgaccccacacacccagtgaggtctctggagccgcggtgcgggaagcggggacccgggtttgaatcctgcccctctggtgtggtgcggcctcttcccacagacttttggcctcagtgttccccgcctgggaagtggggactggccctggtacctggctccagagctgcacccagaggcgatcagcccggtgcgggaacggggcggggtggccgcaactacgggccacggatcctgacccgccctgcccacgatgactatccacatcctcatcctgctgttgctcctcgccttctccgcccaaggggacctggacactgcagccaggtgagaaacccgggtggcagcagggacagggcgggagggagaccgtaaagggcgagcgccctctcccggccgcggaacgggcaggtgatctgtaagcctccccgctggtcttggagtgcttgggtgcccacctccatcacgctccatctctcaattcggtttgaacccggttttctcccacgctccctctccaggcgaggccagcaccaggtcccccagcaccgcgggcacgtctgctacctgggcgtatgccggacccaccrcctggcggagatcatatactggattcgctgtctccaccaaggagccctcggggaaggccagccacgagccccaggacccctacagctatgggcgccgccggtggcgcgaggcggaagcccggctcggttcccaggattccggcctgcagcgagggggctagcgcagtgcccagctcgctgggtgacctcgggcacggctcgtcccctcctcggcttcagtttgcctatctgtatgttggagcttctactccacatttcttctcccctaactccagcccctgaaaccgtcttccccagtccctccccgggctgcgactaggttggacctagaagcacacgggaccaggctgggcgaagaacactgacgcccagagccgaataaacaagagttccgtgtttcagtctctgcttctctgtacctatttcgacctctcagtcgaggctgggtctctaatatacctttctctattagccatgctgcttctccctcacggaagtcccactgtctaccttgaatccaacccgctgtggcgcctttcttgccaactcaatccatgcaccttccgtgggtggttttggcgggccgtcctgacccccaaacatccctcctccctccctggcgtgaaagggctgagatttgctccggcaccctacgcgcctgacgttataatgcacctggggtgggctgcgacctcccagctgagccttgttcctcgaagagacaggagactaagagacaatgagctgagtgaggagcccaggaacccgggttccgaacagctgcgtagaatgcgagcggccaaatggtggagaatctggccgggtaaaaggagacggaggactggggatcgaacggatgtaggggattggacgccgtggctcgaagggggcggggatagaacgcggggattggaaggaggcggggataaaacccgggacctgaatacccggctagggacacgagagagaggaatcggggtttctgggtgacggtgatctcggggtgggcaggactccaaaggcccgtcgacccggtggtggactccttgcactgggattggacatatgcaagcgggagatttggggccggcgctcaaaatcggggggcgggggtggactcgggtttggaccccaggatccgatcagcggacccttgattcaacgtggtaagtactggaccccaggggctcgggctccggcggggcctggagtcctgtgtctagggttgggcgtgcaagcctctccatcacttgtcctcgacgctcgcctccgctcacagcctcagcatcccaggctgcgaggcatgcgcagtgggtgcttccttccccattccctccagcacgggcggggggaggggacgctgagcggatgaatttatagacaccatccccctcgccttggcatgaaaagcggcaatggggtggacagcgtcaatgtctaacaggtgtttgtttcatatgggtctaaaactaatgcttttctcaagaccccgcaactcagcctggaccagtttccctcctccacccacccccgaatcttgagaatcctgtactggggggagggcactgcccccgcaccatgttcttgggagagcaggtaaaggggttaacgcgagctatccctctggcctctctatgcgttcccagaggtcccgaattgacgtccttccctcaaaacctccgggtctacaaaccaggaccctcaagacccttcaggtgcttagagaaggatgagctaggttatgtagtcctgggtcggcgcaaaaaggcagctgaaagcgtgagatcccgggtctgagggaggaggggctggggcctgggcttctgggtctgagggaggaggggctgggggcctggactcctggatctgagagaggaggggctggggcctgggcttctgggtctgagggaggaggggctgggggcctggactcctggatctgagagaggagggactggggcctggactcctgggtatgaaggaggaggaggggctgggggcctggactcctgagtctgagggcggaggggctggggtcctgaagtatgactctgcccgactcagggctccagcgtgacatggctgaagcgcaccaggccgtgggcttccgaccctcgctgacctcggacggggctgaagtggaactcagtgcccctgtgctgcaggagatctacctctctggcctgcgctcctggaaaaggcatctctcacgtttctgggtgaggagcggtgctggtcggtttccttccggggatccaggtttctgcttccgggatgtctgaggctcacttccggcatttcagctggttcatttctgggagactatcacccctttttccgagaattttgatgtctgctcccaggacccctttagcaatttctccgtggctcacttctgggatccacagccccacctgctgagaacctctgctcacttctttcacccaagaggggaactgggccccccaaaaactacccacttccagtttctagaactccatatccttcccttatggtgaaattatcatttcttcctttcatctccagcttcttttgtagttgttgtttctgagacacagtctcactctgtcgcccaggctggagtgcagtggcgggatctcagctcactgcaacctccgcctcctgggttcaagcaattccctgcctcagcctcccaggtagccgggattattggcgcacgccaccatgcctggcttatttatttatttatttatgagacagagtctcactctgttgcccagactggaatgcagtggggtgatcttggctcactgcaaccacctcccaggttcaagcgattctcctgcctcagcctcccgagtagctgggattacaggcatggattatacgcccagctaatttttgtatttttagtagagacggggtttcaacatgttggccaggctaatctcgatctcctgacctcaagtgatctgcctcccaaagcgcttgggttacaggaatgagccaccgcgcccggcccaaactcctgctctgtccctgttctggaatgcgcatgcccaatgtgtaaccagcacccatgtctgtcccagggtttctggttctagaactcttgcactgtctccatacagggactccctgcttgtcacatcctctgtgtgtgaactggggtctggaacacctgtggggtcatgattgagtttgaatcctgactccaccgcttagtagctgtgtcatcttgggcaagcacctctcttggagtcgcagtttcccctcgtggaaaacatgggtgttgacagcacctccctcacaggatagccttgaagactaaattaattcttctatgtcctggcccatggcgaggtctgagtgttagcttctgatattgttcttcattcattcaccatatatttatggggcatccggtaagggcctggccctctttagcatggagaacacagcagatatcaacagacagaatcacgcctgggcactgcgggctcacggctttaatcccagcactttgggaggctgaggcaggaggatcacttgagcccaggacttggacaccagcctgggcaacatagggagaccccatctctattaaaaaaataaagacaggtcgggcacggtggctcatgcctgtaatcccaacactttgggaggctgagacggacggatcatgaggtcaggagatcgagacccttctggctaacacggtgaaaccccgtttctactaaaaatacacacacacacaaattagcctggtgtggtagtgggtgcctgtagttccaattactcaggaggctgaggcaggagaatggcgtgaatccgggaggcggagcttgcagtgagccaagatggcgccactgcactccagcctgggcgacagagcgagactccgtctcaaaaaaaaataaaataaaataaataaataaataaataaataaataaataaataaataataaagacagaatcctgcttttatggagttctcattcgagttgggggagaaggcaataaaacagatgagcaaaacagaaggcaataaaacagatgagcaaaatatagggtatggtgacattctatagtgtcatctgatattgatggtgacacatgctatggtgaatgataaatcgggtagagaagagtgatgtgggggtgttgcagttaaataagggggtggcaggccaggtgcggtggctcacgcctgtaatcccagcactttgggaagccaaggcagacagatcacgaagtcaggagttcaagaccagcctggccaatatagtgaaaccccatctctactaaaaatacaaaaattagccgggtgtggtggcaggcacctgtaatcacagctacctgggaggctgaggcagaagaatcacttgaatccaggaggcagagattgcagtgagccaagattgcgccactgcactccagcctgggtgacagagcaagactccgtttcaaaaaaaaaaaaaaaaaagggggtgggagccggcggccaggaggatctcctgaagctgggatgcttcagcaggctaaactgaacctctgtggtcttgttggttgtataatctgttccagttggcaaacagccactgccttgaactccgaatccctctcccgcccttaccctgggactccttgggcctcaggccagtctaccaactaaagtgttaacatgtgaccatccttggccaggcatggtggctcacgcctctaatcccagcactttgggaggccgaggcgggcagatcacgaggtcaggagatcaagaccatcctagctaacacagtgaaactccgtctctactaaacatacaaaaaaattagctgggcgtggtggcagtcacctgtagtcccagctacttgggaggctgaggcaggagaatggcgtgaacccaggaggcggagcttgcagtgagccgagatcgtgccactgcactccagcctgggcaacaaagcgagactccgtctcaaaaaaaaacaaacatgtggccatccttttcgtgtgtttaaatacatacatacatagatacatacatatttatagacctataaatatatacatgcacacacatatatatgataacattacatggagaaaaatgcacaattttttttttttttttttttttgagacggagttttgttcttgttgcccaggctggattgcaatggcatgatcttggctcactccaatttccgcctcatgggttcaagctattctccttcctcagcttcccaagtagctgagattacaggtgcctgccaccaggcccggctaattttttgtatttttagtatagacagggtttcaccatgttggccaggatgatctcgaactcctgatctcaggtgatccacccgccttggcctctcagagtgctgggactacaggcatgatccactgcacctggcctttttttttttttttttttgacatggagtcagtctgttgccaggctggagtgcagtggcgtgatctcgacttactgcaacctctgcctcctgggttcaagtgattctcctgcctcagcctccaagtagctaggactacaggcgtgtgccaccacgccaagctaattttgtatttttagtagagacggggtttcaccatgttggccaggatggtctcgatctcttgacctcgtgatccgcccaccttggcctcccaaagcactgggattacacgcataagccattgcccctggccttttttttgagacagcgtctcactctgttgctgttgcccaggctggagtgcaatagcaggatcttggctcactgcaacctccatctcctgggtttaagcaatttttctgccttagcctcctgagtagctgggattataggttcccaccaccacgcctggctaatttttgtatttttagtagagatggggttttgccatgttggccaggctggtctggaatgcctgacctcaggtgatccacccgcctaggcctcccaaagtgctgggattacaggcatgagctactgcgcccggccaaaccccagtgttttcatttgtaaaatgagatcatcttagtacttatttcacatggtttggggaggatttaaattgttaatccttgtaaatggcacctggaatgtagtaagtgctcattaaacgttagttatctctctgaggcttccaaaggagtttagttagtaacgcagtgctgttggtcgttcctcattcattccatgccctggtacttctagaaggccttactgagctccagaccctgctctgaatagggatcatttttctttttcttttcttttcttttttttttttttttgagacagggtcttacttactttgttacccaggctggagtgcagtgtcaccatcacagctcacttcatccctgaactcctgggctcaagcgatcctcctgcttcagc

SEQ ID NO: 97032 - DNA, 295830 bp, Homo sapiens
  misc_feature (1)...(295830): n = A,T,C or G
gtctagcacaaaatgattttgtaggcagtacacctccatgaatagaaatagaacagcataaatagaatttttgagtacttagaagttgctgaataaatatctgctgaataaatgtaaacatttgctggaattgagcaaagacttgaatccacaaaattctaatcaagatggagggccaaaatgtgtatgcagtgctcacgggattgtaggaaagcttacctaggctagactggagggagtatattataaactgtaatgaaaaataaggttggataagggaaaagatcatgataggccttgaaaatcagacaggagatttgagagttgatgtagtaagaaatggtaagtcaataaatataatgacaataatgaaatctaaaattgatttaacatttactatggtgtcaaatactatatgttttacataacttttctcatttcatcctaaaaaaaaaaatatgtgagataggtgctacggccttccttttgccaatgaggaaattaagtctcaaagattactattttgctgaaagttacacatctaccagtcagattccatgtctgacttcagaggccaacctcttgaagactctgtataagacctctacaaagtccacaaaacgtgtgaagagaaataccagaagagaatgagatcatgtatatttattctagggtcttggactggaatcagatgtatcattatgaatccatgattttgacatatataaagagggacttcaagaaatcgatatagaaacaggtatgtgtgcatatatacatatatttcctagttctgcctgctgagagggcctagaggcaatgacacctcagtagcaataagcatgccaagcacccagatcttggcttctacataccattctccaataaaaagaatcagagctccttggagaaaagattctgattccagagttggggcaaggaaattaaaaaatgagtctggaggccaggtgcggtggctcacgcctgtaatcccagcactttgggaggccaaggcgggtggatcacgaggtcaggagttcgagaccatcctggctaacatggtgaaaccccgtctctactaaaaatgcaaaaaattagcccggcatggtggctggcacctgtagtcccagctacttgggaggctgaggcaggagaatggtgtgaacccgggaggcagagcttgcagtgagccgagatcatcgcgccactgcactctagcctgggtgacagagcaagactccatctcaaaaaaaaaaagaaaaaaaaaagagtctggaacatctgtggtgccagaaagtaagagggtgcttaaaaaatgatggagacatgttgaaaggacacaggagccaatttgaaggggctcctgttggccaaatctgggtttcagcaaaaacaaaaagtagtaagagcataattcattataacctatagaataaaacaaatattcattaagtccatactgctataaacagctgaataaatatatacattaagcgtaaagagaaagttttttattacagtataattcaatcaattaataaatgtaaaaatgttgaaaattgaaatcaatgtctggcaaatgtcacaacaataatttattcaagccagaatcatcaacatatgctaaaattagtgggcaaatatatgatgagaaacaggatatttacattgtctcacaatattgccctgcatagtctcactttgtaattacaaaagaaaaaatagtgactttatagtgaataaacctagcagacaccatcttaaccaagctttcagggatgtaaagagtctcatgtcttacatgtatagacatcaaaaggtaaataaaaacacatgaaaaaatacaaactcttacactgccatgggacagatacatatatagatatatgcataagactaaagatatatatctatatagtttgtgaataaaattggatatgataggtaggcaaattagtacaaaaaaagaacaaaactaaattaagcatgttaagtaaagtgtgttaccatacacacatacccggttgtttcacaatagacatgctcctgaaaagtttggtggacttaaaattaatgcagtaactgagtaattaaataatcataaggcaaatcttccttcaaaacaaatcatctgtcacaaattatagtagttatataagttgaaatgtttacatattgtgattacataaaatcataaaaccttcaacagcatttgcttttagattgcttttaaataatctcactctagatacagatacagaggtcaaactctgatctttttattctaggcccaaagctatttccattacaccatgctgcttctcctaacatcagcaggaagacatgtaacccccattatcatttccatttcacctcctgtgtccaaaaaaagtggcagagatccaaatactttacacaccagtaaatctctatagaccacatacaaagtaggcagtataggacagtcattaagggcaaagattctagagtcaaactgcctggattcaaattttccagcttcacaagttactgcctacatgactggatttctgggaatgtattcaacgtctgtaatttgtagttttctcatctgtaaagtgaggataataacggtatatgtctcataagtctgttctgaagattaaatatgataatatgtattatcatattagcacagtgcctggcacatagtaaacactcattatgttatctacattaataatgatgacaatgatgacaagtttttcctatggagcaatatacttcatagaggatgaagtgtttcatggctacaaacaacactcctacccttgataaattcgtgccgctggtcacaaggaagatagtacgtttaaagtagacaaaaatatccaatctactgcacagaaaacaacttactaactatgtaaaataaaactaacataattttacatactacccacatccacaaatctaagtgcatatcccactgacagtgaatcagtacaggtataattaccttcacataaaaatgttatttccatcactaaaaattatatttccaacttaaaactgtcttctcttattactaaccttttggcatagaggttactttattccacctaatgaatgctctacctaaaaaaaagatcttccacatatttgtgatgtaccaatttggcatgatttgagagataaagaaatcatttacctataaaagagtaaagcactttaaatagcaacacttttttgatataaaaaccccaatactaaactactccagtcaaagactagccctaccaccaaccagttttactctagaaatggtcaccgatatctccagcacaagtatgcagagccgatatcattcatatttttgagcctattaaaatatttatgtatgaaccaggaaaaacaaacccttggttttaatagaggcacaatatcctaatgataggaaaaggggatataaaatgttctttaaaaattatataggaggaaaagggaaagagctgtaatgacttcatgaatactcattagtttaagaatccaagaaaacaagcttgctctcaagttttgtcaataaaaagaaacctcattgttaacataaattgatttaatattaattgatgtgtagtgttgctatacatacctgtatagttgtcatctggtgcaaatttgttaaaagtaacatcaaaaaacatatatatatttaatcaaacatctacaaaatctttgtccctgggccaaatgccagaaacagagggcaccaagaagatgtttttaaaatgaactattttcaacagcacaattgcagttttatccaagtctgtagccctattgactggctaaaccttacccccattaagatgctctgcatcaaaaaagcatttttaaatcatttgtctactttgatggaagaaaattatggcatgcatagtaaaaatatttgatatgcatggtttttcagcaaatttgctattataattatgttgtgctcagagtaatatgaaagttagttttcatacaccgggtacacaccttcagaaggatagaaagaggacatgtgatttgaggcatgctaagtgctatagggaagctagacagctaacttaaaagtggacccagatgagctgtaacatagcagctgcttacaaagaattgacggtcactcaaccatgtgaaggcctaagccatgatctcatattaaacagtttttaaaactatccataatgatcactcaaataaatttaaataatttgtcacacacttattcttcagaggttatatgaaattaaagatgatgggcttcaggctggagaacattttctctcacaaagccattcatttttttaacatctggccctcatccccaataggacagtgggtgggactacccagatacccttctaagagatatactgaggtttgaattctacattcctaaaactgaatggagctttttgctgctatttcacatgtacctcctcccccactttcctttaaactggaacactgattctcctttgaaaaaggagtattttcctttgaataggtgatgggcaaattctcaatttgttcagatgccttggtaggtttaaaaaaaagtaaacaaacaaaaaaacccataatttagaaaaaacaacaacaacaaaaagacgcaaaagacctgaagcctgagactttacctcactcttcttggtatgttgccttagcatttcatttgtaacaaggatgtcaaaagggaaaaggaggtcagtggcttgaatgacctgaggtgggggtaggttcctgttgcttaaggaaagagcaaaggggacgaacttcactgaggcgctaaaaacactttgatggaagctggattttcgaagagccaaaatattaaactacagacaaaattcaaagagtgggctgggtacaagtagtgaaaaggttagtcgccaggcagggaaacacccgacggtggagggaggggaggaaaagttttaaatacccaccacagcctagtgagcctttaattagcgtcccccacttctgactttgctcttgcccccggaggagctagctgcagggaagcaagcagccctatttttaagcacttaaacctctccgttggacttcagaaggcttgagttaccggtgttgcaaataacgtttcttcctaaacatgagaaagcaaatttgaattccctagtcaacgccaaaaggaagataaagggaccccccccccaaaaaaaaggtaatttcagcgtgaaagagcggtgatgggcgcgggggaggggaggaaggacttaccgcagcctctgcaggctgcccccaaagactcagggccagtaagaacaagccggcagccaggctgactccacgcagtttcattcttctccggctcccgcagctccttcagcacccgcacgaaattcccggctggctctaaccaattgacataatcttgagggtttatatggagagagctagagccggagagggacagtgaggcttgggtgaagagaaagaagctttttaagagtggaagaaaaaaaaaagaagaagaagaaggagctactcttccttcccccctcccctccccaaagccggtctctcaggagaacttttcccttctgtccagacttgcaaactttttcttcactcaattcctacagatctactttcctccctctcttccccgtgcaaggcccccctcctcaccagcacaagggaatttgagtatcactccgccacagttttagactgcaccggcaacctgcgagggagtgacgctcagttatttgggggagggaaacttccagactagttgactgagcaccatgagtccaaccgggaagcttttctattcgttcatttgcaccttccgttgatactacttttctaggctcagttccaatctcattggtgtgcgtaccaaagccaattacaaatagatctaaactgggactatttttttagcggatggatctcagaggggccgtgctttttattgttactcattagaaacaaattttggtcggtgctccctgggctgctggtcttctttaccttccagctgctcacagaacagagagtttctacatacaagcagaagatgtgaaaatattgggaataaataaagtatatgcttataaacaagtaagaaaataagtatatgtgcgtgaatactttatgtgtgttatatacgtataagatctgggagcattcagcaggtattggtaattattctatggtattatgttattataatacagctatatctctgtttagctgcattgaatcctataattaatgcctcctatattgagctaatgtaaaaggtattgactctcattgtagttgtgtttcagaaagatttagggcagggaattaaataaatttagtgcagtgtttcttagaattaatataaacacttaattggaaatatttaaatagagttgatggcagctgaatcgatatctcccatataaagacttgaatgttcctttgataattctgatatatagattttttttaaagtaacaaaagaactagaaaatactttctgcggactccttggagaatcttcaagaatttgatgaagaattcttcacaacatttctatcttcctagaattaaccactttagagtctttcaaggttttggatctatttcacgagggcccactcatccttaggttctgcttagctcagagtggatttacaactccagaaactgtctccccttcccaatagcctagtgtactatcaatttgaatcagtgttgtatgcatttgggcatgtgtgcaagggcactttcgggcccatctgtcttatgtgggaatagtatgcctatgtctctttatgtgtaacctaacagtaaagttgaaagtatatgatgcacagttgcttaggtcttagcgtataggtctctaaggggctgtgtgtgaagctgtggagatacttagggctgttgtgtggaaaggtgcctgaaagtgagaaagactaccggctgcccaaggtaggggggatgattgacagcagacagccccgcccctttcccctccattctttcctctcctgctgcatggaactatctcctgagtgctgcaagttgtaacgggcaccgctgagcctgtttccctttggagcacttcttatctagaagcagtgtttagtttcttccaaactgggccacttcgtccacctactctgttctgagtaaggaaacagcctccaagcatcagcagagcccagatgagcacgggccgcggagccgcttagcagtctcccgggacccagctccggaggagccgcaagcatgcaccctgggtgagctgttgctgccccgagctcccctcctctttcttacttcgggttactttgccaggccgggactatactggtacttctgtcactgcagagaaattgggagcaggcatccaaaagggttcggggggcgacaggcagacgcacgaccccgaagcctagagagcccattactcaccctccctcccatttcaggttgtggctgctcctggttacgttgtgcctgaccgaggaactggcagcagcggtgagtctcttctcacgacccttttccgtccccctcctttgaccctctaaccatccccatctctagtatttatgttagggggttgcagagagtttcaccacgagacggagtccacaccactcccctttctaatgggagttaatgagattcttgagaggaatagcacagtgtcaagtcagtgtttttgggaccaagatatcttccaaaacttcgtaacgggttgggaaaataaaagtggaagacacaagatgcacacatttctgagcctcttccccagacgacttaagatgactagcatcaatctccacggcagaagaaacataattttccctggtcttcaagaacttgaattggcacactagtttgagagtgggaggagagcacaaggagtggaacttcaaagtgccgcagatgctatggaaatgaaacttaagtacatgcttagagtcgtttgacagtaccaggtgacaacatctggattctttaactacctgaattgaactgataccactaggtgatgttcaatttctgtctgatgtgtcgtgttactcgtttctgcatcaccagaaagttaaaagataaagctgttataatagaaaaaaaaatcaaagttaacatttcataggctgtttagatgtcatctatcaaatcaactagggactgcaggtaaagaaatttctgaagacttttggtcaagaaaagtttaatgggtcccagaaagtattgaaatctccagtggaattactaggataatttcacaaagatggagtgacccaaataatcaaagatgctgcagttttccagtttcactagctacttaagctggcagaaataaaaactgttgagtttgaatacgaagttgttcaattgttgagtactatttcactgctgtattttttttaaaaattcttaatgatacccaaagccattccctatatagatgagagatgaatatatattccaaatatttatcttgtgggttttgatcattttaactgattggctctgctttttaatattttaaatatttttaaatactattatagggccatacgtaattcaacctaataaatcacccaatgtgtttatgaaaaaatggattattttatcttggcatatgatgtctttaagaaaataccagagtgaagctatttttcttgtaaagagaggaagatgccagaaaacttgaataccaacatcttgtgaccccttaactcaatatcagttcctatgtaagtaaattctggacttcgtaagcaaagatattgatctaagactctgtgtacttctccatcttattccttcaatatacaagtttagttatgtattaccttgaggctcaataactacattaattgaaaatgccaagatttgattagttaacaattcatccaggaatcttgccacttgtaaaagtgtcatgcatgggcagaataccctcaagcaaaacttttatttttagactctggctgattttattcagtgtacttttgggaaaaacactacagatcattccagatagctgaagacttcacaaacactgcatcctgtcacttaatacctttaaaaaccactttaatgcttgcaattctttcaagtattgaaatgagtctccaaaattaagcactgctttggtgtatgagttttagactctgtctcattgttttatgtcacctgctatgtcagtatgattgaccatggtaagtctaaaattgaccttgagttccacagataatactttattttttgacttatttaagtacacagccacttccttcacttgttgtttacttatgcaaaatatctttgacattgtaaagctactttttttcagttttggggaaaatgacaaatataaagacagtcacagaataagttatcagaagatgacttttctgaagggttgttttgtttttcttttacactctttgcacgggattcttatctatacgggctggttctcgtattctacactcaattccagtttatcctcatgagtttgtgtgtttttcaccctttggattgttttaaacatttaaattctctgtgccatgtttgactaatattaacgaaaatagctattaaaaatagattggcaggaactatgttgtgttttgctatgagaaagtctctttactgtgagaattaagctgccaataatattggcaagcatttaaagattgggtcatttaggggcttttgggctctttcttttcctgagtttacaaagcacatctatataaagtaaaggaaaactaaatgttaaaatccatgttaaagaatgagcttccattaaatttactttaaaggagtaatgatcttcattcaggtgaaatatttgcacaatttatctgcataaaatagaatctaggatctcagaacatccatgtctttggctgttaggcgcctaactatctaaggggctgtgctaggccacgcacagcatgcaaagatttatttaaacatagttcctaactctctaggaatttgctttctcagacaatggtggtcattatgttccttagaagataggatgcttaatgataagttattatctacatgtacttgcatcgtgttagcgaaatgtctagaaagatacaaatctcaccatcagccaatatatctaggaaaaaacatatatcccgaagtagtcagatccttatgttttcttcacactttgccccctccaaatgagctttcaggaaaaggtctaatacaatcaagcatacttaaagtcaaaagcctagggggatacttatttgggttgggaggagggtaaggagagaaaacatttctattgttccttctgcagagagcataggtaaaatgcctttagctgcactcaaatcaaggtctgattgaaatatcaacttctttctttaaagttgtaacatgcccaggttggtcctttctgctgtgattttcagtcgtatagtagtcatcaatatatgaatattatgttaagggagttcagcgatggagacgatctcttccagttctaaagaccaagaggaatatttgcattatctggggctgtgtctctataaatccttaaagtactcttctactttacctgctagcaaatatcctatatcagctagctatgaaaaatcacaacatataatatacgtgtgtgtatgtgtgtatataaatatataatatatatatatatatatcttgggatgactaaggatactgatagaaatgtatgagtacactattaagtaaatcatcaaatgactgtaaatagataatccatagatgataatatatttacattatttataggtgaaattcaaatatattttaagatagaggaggggataatagatgttattatctaaagtgttactaaagaagcaaatatataaccatttcaaaaattgttttattatacattttaatgattgtatttcagtgtaatcagtttccattgtaatcctatgtattttattgtatacttctaaaactagcagggtgctgtggtgtgtgcctgtagtcccagctacttaggaggaggctgaggcaggaggattgcttgagaacagaagtttgaggctgtgacgcaccatcatcgtgcctgtgaatagccactgtactccaccctgggcagcagagtgaaaccctgtctcaaaaggaaaaaaaaaatagtattctaaaaaggagtccataggcttcactagactgccaaactatggcatgaaaaaagtacccctagtttaagaaaattggttttacaaaaacagtcattttctaatgtttgttcaggcatgaggggaattgtgttgactctaagtgccaacaatcttttaatttttaagcatagtttggagtcttcaataaatatgctcctatattctgtaagctcataatcaagccatatgactggagtaaagtatactgtttcccttattatctcattaatagaaaaaactgattgacctcaattattaatattggtttttatttgcctgaattatatggattatttcataattttaccacaggtgcaattatggtacaccacagcctcaagcaatccacctgcctcagcctcctgagtagctgggactataggcacacaccacagctccctgttagaataatcttaaaagtatggctgggtgcagtggctcatgcctgtaatcccagcagtttgggaggccgaggtaggtggattgcttgagctcatgagttcaagaccagcctaggcaacatagtgaaactccgtctctacaaaaaatacaaaaattagctgggcatggtggtgcacgcctatagtcctatctactgggaggctgaggtgggaggatggcttgagcccaggagttggaggttgcaggtgagctgagatcatgccactgcactacagcctgagcaatagagctagaccttgtcaaaaaaaaaaagagaaaaagaaaagaaaaagaaagaaaaaacagtatacagtaatatacttggagtatagacttgtcttatactgtgtaggtgacaagacatacacatagaaaaagaacatcgtgggataacatcaggctatattaaactatcaagtcctttatagctgcctgaatgtcccagtgaggcagatcatagggcttttacttggtttaaagtctaattaaatgtaaatagaagacctgataagcatgctcaagggaaaatagtaatgggaaaattagctaagagcaattatcaactctctttctttaatctatccctttcctagggtttctatttttcttctataaacaatattgaattctcctccgttataacaatgaatttaaacaaaatcacttcatttactttaataactctaacctcttcaattgcattacccccaagttcctgggtattgtctagtcttcatcaccaaccacttacccttcaacctattatagtctcaactgagtctactccaggcaaacagccctctttcaagctactaatggctgcctaattaccaaacccaatggcttatttgcagtccccattctatctgacttcactgtgttatctgacatttcccagttactctgatacttctttatccccttgtttttttttaattttgttttgttttgtttttttgtttttttgtttgagacagagtctcactatgtcacccaggctggagtgcagtggcacagtcttggctcactgcaacctccacctcccaggttcaagtgattctcctgcctcagcctcccgagtagctgggactacaggtgcccgccatcacacccggctaatttttgtattttgagtagagacggggtttcaccgtgttagccagtctggtcttgaactcctgacctcaggtgatccacccgcctcggcctcccaaagtgctgggattacaggcgtgagccaccgcacccggcctcctcttgttttttaagacattatacctcactagggagctggtaataatcctgaaataaataatcctgaatcccataattctaaatgttgaaatcctgaaagatcaaaatcccaaaaatattctggaaaaagtaattttaaaaattatttaaaagatatttacttacatttttaaaaggatagttgtttgagaaacataaaacacaacagaacattccaaaggtcactttacataataaaatagacaataataacatacatagttttgtaaggataaacacttagtatatactagtgacagtcacacttgtatgacagttataagtagttgaactgtattcacaaagaaataggtcaaaaggaaaatgtataaagacatatcactatggttggtaattgtgtgcatccagctttataactgtagtcatctgaaataccttgatgaacaacaaaagtcttttgacaagatagataaaaaaccaccataggtgaccaccgtatatgcagtcatccaaagagccaagatcttgagaaattttatctttcacaaatgcgggtgtacaaaaagacatctcttcattcactgaggaggttttcacatttttacatacacacacaatgcttacacagaaagtcaacattgtgataatacacgttcatggaatcaaatttctgatgtccaacgcaacagaagaaaagtctgccccagctctcagagagagaccaatttgcattctctgtttgttctctcccagcctctagcctatgggatggtgccagcccacattgagggcagatcttccctagcttatccactgggactcatacatgaatctcctttggaaacaccctcacagacacacctaaaataatacattaccgggtttctaggtattccttaatccagtccaattgaacctaaaattaagtccgcaagtccaccccttgtcaacttggcacccgttatgcatcttcttaaaccatacttaatttctaaataaagacaataacaaggaaatagttccacttcacatgatgcaactaacatggcacaaccatcccatctgcgaccaaaaacacacttccccagaattcagttttcaggatttcaacattcgggattttaatctttcagtattgtgattttcaggattttagatgttaaagattttagactctagggatttagactttagggattttgatctttgggatttcaacatttgggattatagcattcaggattgtgtcttttgggattatgacacaaacttgcctcactagttctccttatacttctctgatctttttatttatgctattaattcaacaaatatttattgagcaacagctatattccagatagtatgccaggccctagtgacacagtggtgaacaagttagccatgaactttgctcttatggaatttataatctttatcagtctcttgtcctaaaatggtggattttttccaaaacttaattctttactgtcttcttgcctcaatggttttaactatgcctcctatatagtgatgattatcaaatttatatccccagccaagacatctcttttgagctctaaatctatgtttccatttgcctactaaccccttgtacctgtctctcaattagttgatatatacaaaacacttaaaacagtgcctggagtttagtataggcactcagccaaagccagctattattatttttattgccccaaatacagtatagttaaaggtgaaattgttttcttctccttcccatgacactccaaccagctgtgatcttttttatttttgttaaatgtcatcaccatccaccaagtttcagcaagaagctacagaagcagccatcagctttcattatttccaaaattctcaccaaattttgataattttaccaaaaatctgtagaatctggcttttccattcatattctgttggtttcaaacttcatacatcagtagcctcctgactggtttttctacctcctgactccatccttatctctacattgccactagagttattttactaacaacaaacccaattatggtatcttctgatttaatgcctttattggtttcttctttcttccaggataaaatgcatactacttggtttggcacatttaagggctttcattttctgacccaactgcttttctagcctcatgtctgtgtgtttcttcctaccagtccttctttccaaactcatggtgtatattacacttcattcagactgaacttctcaccattcccaaaccactttatattctttcacatctctttgcccctggatatgcagtccctctctctggaatatccttctgtattgtttctaccttcttttctatctaatgaactcctactcaatccttaatacccagaccaaatataattttttctatgaaacagttccagacctcttcagaatgaatttattcttccttctcctgtgcttccaaggagctttgggcctctttggtagcacatccatgtggtggtaagattcctatgcttatatgactacgttacattcttcaaccttgtacttaggatgtccaggatactgccaggctgagcataggtgatcaagagatgactttcaaatgagtaaacatctcctaatggctcgcaacaaactgccttctccctgtctatcttaaaaattactaatgttaactccaataacaattgaattgatggaaaaatatcaaccctgttcaatagtataatgtttaagagaaagcactctagaatcagacttttgtctaaatgttgcctctgccctctgacacttcctagctgtgtgacttagagtaactcgttttacctttctgagatttaattttcttttttctttttgagtgttcaatgaaatttttattgagataattgtagattcacatgcagttgtaaaaaatagtacagagagatcctatgtacgcttatccagttttcccctagttgtaatactataatataatatcacaacccagatactgacattgataacattcactgatcttatttcattttcctcgtacttatttgtatgtgtattttgttctatacaatgtcctcacaggtgtaggttgggatttccattgccacagtcaagataccaaagtcaacaaggatccctcatgctgtccttttataaccacatccatattcctcctccaacaacatatattaagtttttacaaatgtatacagttttataactgtctccacaattgtaataaaaacacttatttcccagaaagttcccttacactttttgcagtcaattccctcctcctcattctgcacgctaggcaaccactgatctgcttcctattattgtagttttgccttttctagaatttcatgtaaatgtaatcagcatagcacttttgagatttatccatgttgttataagtatcagtagttcattccttttattgctgagtaataaaaggaatggatatatcacatgttaattctctcttcatcagtccatagacttttaagttgtttacagttcttaattatcatgagcaaagctatgaatattcaagtcctcatgtgaacatgttttcatttctcttgggtaggtatccaggagtatgattgctatatggtaagcacatatttcattttggatagtttctaagtctatagcttcatattcactgatttttccttcttcagagtctaatctgatattaacaccacctgtgtgttttttttcatttcagatattatatttttcttttctagaaattccttttggattttaaattttacaaacttccattcttctcctcatcctggtcacattttcctctaccttcctgaacccatgaatctttttttttaaagttttattttaggttcgggggtcatatgtgcagatttgttacataggtaaactcgtgtcacaggagtttgttgtacagattatttcatcaccccagtactaagcctagtacccaataattatttttttctgaccctcttcctccagggtttaattttctcatcagcagaaaagggatgatgatattatactttgttcttgaggtattattgtggatgctgtatgtgaacatgccatgcaccaggtaggtgctaaattcctctcccatcttttccccccagtatcctcagagacttaaaaatcatttcccaattttggcaattgatgtttgataagatgagagaaagggagatatcagagaaggctctctcatttgtagattttatgtctagaacaaacttgtccaacttgtgccccaagggccgcatatggcccaggacggctttgaatgcggcctaacacaaattggtaaactttcttaaaacattacgagatatatttgctttttttttttagctcattagctattgttagtattactgtattttatttgtggcccaagacaatgctttttcttccaatgtggcccaggaaagccaaaagattggacatccctggggacaatggccatatttctcagttgtccccctcatctctttatcccaatttcaccaccataatagtaacatatgttttcaagtctttcaagtttacaaagcactttatcatatattattttgttagctgctcaagacaaccctgtgagggacaaatattctcatcccagagagattaactgatttatctaaggtcacaaacccaacaaatggcagagttaaagcccactctactgtgctatctctttaatttaagttttttatcatctcttatccggactccctacagcagacctaactgttccagtttcagactttcactgcctcctcattggctttcctgatatccatcctctctgaaagcaaagagcttattctaaaacacaaattgatcatgccactctaacatttgtggaagctccctacacccatggagtatctgatctggccctgcctacccatccaattccatctcctgtcttgtcctcatgtagctgatgtttaggtcacagttatacttgtgatgttggcttaacaggacgtgcatattcactccttctgcttctcctgtttttttcatcctctgtcttgccttcctcctgtctctacagatggacatattgttcttctcttaggaagttaagttagtatttttctgaagtctcctcttcttttgtctttctgtttctcactgttttttcgtcccttcaactaatatttatttagtgactactatgtgccaggcattgttgtcaaccccattgtgggaaggactatgtcaagcactaagccactgtagccagagcacagggaaggggaagaggaaagagagaggtagaactttgtgagatgtggatggaggataggaaagagacctgctctgcactcttacttgctccgtaactcctcagagcatttacctaacacctgtactaccgtatatctctctatgtggggtgtaattgacattatagttattgccggccacttattttgcgtccagttctctaacaaaccctttatacgtggaggactcactcctgcagcatatatctggtccttccacatttatcaaatgtaggcaagccatgaggcatgtgtctattctcaagccttttgggggttccgtatttaattctggatgtccatttcctgattttttctccttctatttctttatgaagtggttaaaaaattaaaagctgtaactttaaagccaaatatccccaggttcaaacacaaactccactattaactacggccttaggacaaatcattaaatatattattaactgtaaaattattactattgcagttattattttcccctcattcattgtgattgcctctctgctagaaatgggtagtgaggccacttgggtgacaatttaggaaaaaaaagttgtttaattatttgttgaatttgtttttcaagtgtcctaggggaaaaagagttagaattgttattttacttgttccagtttccccaaagccacttctacctctgctgccctacctttgtgatttcctgtagagacctgcttcccaactaaagattatgcccaaagacaccgccccaggcatctttgaagtcccagttcccctttgtctaacaacaataaggctagtttgccattatctttcagtctggtttgcttgtattgagggggagttggtgttattcagtggaaaatttcctggtcataaagctctacaacatttacctcagagagaccaagctttcccagaattgtctggcacctctggctctgaggctgaattggtcttttgggagacagatttttctcttgcggagggaattaatgttagttatatttttccttgctctgtacaactttgagtgaccatttttccgtacccaagggaagaggattggcaaagaaaatttaaaatgcctagatttctaaactctgtgagtgtagcagatcccttaaggactggaacaaaccttagatgtatgagatttatattgtcttttagatatgattaagttgcataaataccgtctagcacctagcatgcaactaaatatccagaacatgctcatagatactgatgttgaggttgctgttgataatgaagaaaaatgggacactctattagaacatttttcaaaatttacgacagtagaccccttttcccccaaactaaatctcatatgccctccccagaaatatcaatgtatttattaacaattcaaatttttaacagtaatttataaagtcagtaagaaggaagagcttgaaatgaacataaacatctgaaattgagagctacagaggtgtgtgtgtgtgtgtgtgtgtgtgtgtgtgtttgtgtgtgtgttgtgctgtcgcccaggctggagtgcagtggtgcgatctcggctcactgcaacctctgcctctcgggttcaagctcttctcctgcctcagcctcccgagtagctggtactacaggcacccgtcaccatgcccggctaattttttgtatttttagtagagacagggtttcaccttgttagccaggatggtctcgatctcctgacctcgtgatccatccccccttagcctcccaaagtgcagagattacaggcatgagccaccacgcctggcctgagagctatagaagtcttaatctccagtttatttctgtttattttatagaatgttgagaaaatcctgatgtaatagtgaacatcatggggtgagggcttttttatcttgctatctcaggatgctctgcagttaaacagaaatagcaagaaaacctatatttccaggtctgcacacataattcacgctctctttgtctctctcctctctctcctctctgtctctctgtctctctgtctctctctctctctcacacacacacacacacacacacacacacacatacagttaactgggcagcacccattaatacaatcagtgttggtttccagtgtgttaatgtttggtatgtaacccatttgaatggtgcatactttgttttataacagtttttaaatatgttatttatttatttatttattttacttatgggttttttgagacagggtctcactctgtcacccaggctggagtgcagtggtgtgatcaccactcattgtaacctcaacctccccagctcaagcgatcctcctgcctcagcccccagagtggctgggactacaggtgtggtcccccatgcccagctaatttttgtatgttttgtagagatggggttttcactttgtaggctcgtctcaaactctgggcagaagcgatctgcccaccttggcctcctaaagttctgggattacaggcgtgagccaccccgtatggcctaaaatatgtttttttaaatgaaattaaaatctgatattgtggaactgccaaaatttcaaacagcacaatttcagttacttccacagtttcaatacactatatcatatggtaatcagtcattaaactccataagacagaataaaatgctacagaaggtgtaagaagggagaggtcaatatggattgtagttagggaaggcgtcacagaagtatgattcttgctgggtcttaaagaaatagtagaaaatgagtaattaatatctatattatatattstagattttccaggacatccttgattttatgatttcttctaaagaaaacttctagaaaaacaagtaaatacacaaatatatttgtatttatctggattgatgacttatctttgctttcaaaatgcagtcctattaaatattggagggacgggctgatcagaaagcataaattaaaacatgtaggaggaatcagagtgctgccaccccatacagaatctttgaggatattagaaaaaggcactccttcctctaggcagtcatagttctgtgccatgccacactcattggtaagcaatgagcaggctggacttctgcccccatttgccccatcaatcgggttttcttttgcagtgaaccctatgaagaatcatacactacagttctagcagggatgaacatggttgagtggagggcagtgagaagagctagagcacaggatgattattatggagtaaagggaaacgactgtggacagttggaacagggtcaggctatggagaccttaacctcaaggcagagggaagaattggctttgattggggatgtgggtgttgttacaacttcttgaacaggggaaagataaaagtggttaagagggaagaaactaaaagtaaagactgtgtttaaaggaaagcctttattataaaaagatagattgtagactcttggtaagtatatctatgttagatatataggatacagggagttatatgtacaaaaaattatcctgcattaagaacaatgagcaaaagacctttgatcatgtcaatatttcccccaaatagcaatcagtgctttgtaggtgtcagaagtcagaggtgtgtgcatttaataatcatgttattaataatgagagcttctatttggagagatgttactgtaagtgaggtgctggaaccagaatgttagatcgaggtttaaaactgttctttctttgccattcctagctgtttctacttgaggaagtcatcttaacttttttgtgttccactgttacatttgtgaaataatgggatttacttcatagagttattgagatgcttaaaagagataatgcacataacactcttagcattactcttggcactcagcaagtgttaattaaatcttatttgctattattattgttgatgttagggttattgttaagaacttgatgccaaccatttgatttctgtccattggaagcatgtttctcacatttaactggtcaattgccaaatctagttctcacagtacaccacatcacataacgttttgccttgtaaattttctatgtgtttattgccatttgtttaagcattcttccctcaaaggaaacttagaagacaagatttgaaactgacatagtgggcatcaaatttagtaagattttcagttttgttgtctgaagaattaaagaaatcgcaaactaaaggcaaaaacatcattttctcagttttatatcttagtgaagtgatgagactcttccaacagtatattctgtgtcagggagtttgcagctgcaatccttaaacttccaaattcttctgtttttctgtcctgccaaatccctctactgcaccccaacctaggactactggaagaatggaaggcacaatggtcatgttagaagagacctgtagctttccctgttttgatgtccagcacctgttttgagccctcagcctaaactttccagtccttgaaaccatgaaagtaggttgaggctcccattcaacctaacggctaggatagccaaaggtgctgagattgctccttctttgtccatggacttttagttttcagagtataagtcagcagggagaagatttttgacctaaaacattgcgttttagagtcagattggtggcagttcctttctgtatttcaaaggatctctctatacatttctatgtgtatattcctctggaagtttggttgtgccctcctgaattccttcgagagtatgtgttcatttatggatttttgtttgtcaatttgttttccttttagtgctgtctcttactgtctttgtaacattttgaaacagtttcaaaattacagaatagtttcaagtatagtacaaatttttatttcctttttctttctttttagacagagtcctgctctattgcccaggctggagtgaagtggcataatcatagctcattgcagcctggaactcctgggctcaagcgatccattcacctcagcctcccatatggctgggactacaggcatgcaccaccatgtccagctaattttttaaaaattttttgtagaaacaaggtctgcccaagctgggaactcctgggctcaagtgatcctcccatctcagccttcctaagtgctgggattacaggcatgagtcacagcaccaggcccgttttgttttttataactattggagaataagttgccaatatgatgccacattaccctcaaatactttaatgtgcattcttcaaacaaagatgttatgctatgtagccatttttctattttaaaaattagtatgaaatattttaggcaacaaaaagctataatatcatttatatgaatatgacataaagtaacataatgaacacatatatgaccatcacccagcttaagaagtaaaacactgccaatgcaaatgaaaccacttatgtaccacttccatggccccgcctccaccatcataaatttggtgtatatcgttcatttctaacctggggttcttaagttagtttcaggtaggtctatgagcaccctcaaattgtatgtagaatttgatgtgtgtctggacttttctggggaaaaggtccatagctttaatgagatttacatggataaatctctggcaaagtaccagatttcgtgcaaaaattgtctacagctagtgcatatacttttctgccactcatttattgcttagctttttgtattctagctttctatctaaccagttcattgagattaatttcttaaagttcacttcctcatcactaaatccaatggcttcttttcatccttatcctcattgaactacctgcagattcttactcttggctcacttgtccttctagattatttcccttcccttagcttctgcactctcttgatattccccagtctcctcatttagaaaatataatgcctaactcatgtggttgtgagaattagctgtaatgttcccaaagcacctgattgttgtatgcgctcaataaatttagctgttattagcaattaatcctcataccactgtgttgcatctcatcatcttccagctctgtattcaagatgttgctaatggacagagatcatggcaaaaagacagccagcaaatactgcctcaatgtcctgcactgctgttcattagcttactagcagccttataactactagtagttccggttagacagtatcagtaatctgtagagtcttcaggagaaaatcatttaggtaaagactagttagcgttaaattatatagagatataaatttaatttcatctcctaaagcttgtaacactattgttggcccggtcacttttaaggacctcagaaagtaaaaatgtagttctcccctgcttgtttattcagctttttgctcattctgctactaaatagactgacaaatgaaagcgtcaacactattatgaaggacacctgcttgtctcaagctgggctggggccagttattctggatggaccattgaagagccatatgacttttaatcactatttacttggagcagaatgagaagaagcatttataccagtcccctgaggctgccctgtcctgaattgtgcctttatcttttcatgtccactattagatgccagtaacagtgacatacttttgttcatattcataatagaatcctacagtattttaaggcacaatcctctgagaagcactaaggcccctactgaggctcaactgcctggaggaaaacagccaagctatctttgcctctgttgggtagagtgcttgaactcctaactgccatccattctttcaggatagggtaggttatgctgtcatagcaaacaactccccaaatctcagtagcttaaaataacctaagtttcttcttgtttatgctacgtgtccataatgagtcacctgggggacattacagagtcctccctctaggacctagatggaccagccaccatctggaacactgcttattatcatggcagaaggaaagagagttctggaggtctcacactgcatcaccaattaaatatgattcctggaaaggatatgacacttttttctcatacaccattggtcagctttgattggggctagttaagggacatcaagtattatcctaccatgtgccctgaaggtggagagctgaaaatgttcagtgagcagccctaatgacccccttgcacacttaatgcaccctgtagaaagacatctctggtctctctagccctgtccctttccctcaaacatcttactaagtcatgtcccttcgatttcactcattcttgttccattgctcctgcagaaaccaaggaacttgtcaatttgttaatttttgtgcatattgcagtctgtattgtttaatgcaagaccatggtctttttttgctcagtttgaattttttctacccctttggtgttctcgcagttgtatgctgtagcgatggacaaagatattagcttagaacaattttgtttcaataaaattatctatttttgacttttcctgccatcttgtgctatttagtgttatggtaatagaatagctataattctgtgaccctttgaccataacaatgagattaaatgatttgcttaagggtatgtaacaaggtagtattaaaggagcctgaactagaactcaggttttctgacttatagactgttttatatttattatgccacgtcctattatttaaaaggttgtataactgacagcagtgtaatttacttccagagacaattggtaacaaaagaatctggtctttaatcttgaatagaaggaatttcccatttaaatgcctccttttgaatattttgatgaattccatgtagtaaaatcagattcctgggattcctatgccaacaagtgtgtattcttgcctgaagcaaacaagtaactggccctgaatggatcaataatataatcctatctataagactcaaataaataagaactttcaccacccctgctgcacctcaatctaaaataaggcattgtatatattgtattattgcaggtttgtttcttactagtatttagaatgtcaggcaatgttccaggattaaaattaaaaatgaaatcaatagcctggtgacagcattatgtttatgctatgtcaacctgcctcagtttggagttactttttatatgatatgctgtggattcttctcatatatagtttactataaagctctacaataattcctcttgtcttaagcaaattttctactagtaagggcttaagagaaggcactagccaatgagattatcactaaaaatcacaaatgataaaggcagcatcttgtatacaaacaaatcttaatacgtaggcacagagttattgtcaagatatcaaccaaatgtcacacgggtggtccagggtatctgcaggtaccaccaacctttgcccaagatgcagtggaaggatacatcattgggtttttatatggattcaataatttaaatttgtagattaagaaaaagaagacttgtcaaagaatgccacacagaaattattagaataatgctctgaattgtgttaatagtttgtcctctggcatcaggtgatctttattactcttctgacactaaaatctgggaatattattttatgtagaagcacaaagctacatatctgaggacaatggccattagtgcaaagtcaaagccagttttacttatggtatatctgccatgatagagacattttccataacattttcttacagagttatttcttgtagttatgtagctatcaggttgatttttttttctcgtggaaaattttgtgcaaaatgaagcagagtaaacagtgttcctatcactgagcttcaacagttatcaacttgtggccaatctgctatgagacctttatgaagattatcataatcgtttgcatttcatgtctgtgaactgttttttaattatttttcactttccagggcaaccacaggtataagtgttaggattttacataaggaaagagaatttattcaaaccacttgaaaataatatccaaagtattcatgccattagcatagctcagccacagatatcaaccaatttcctaagatattcttagaggcagtcagacagcatccttctattaacacctattcgttatgtcaaatcacttagaagctagaaaagcaccattgcttctcaactatggtctgcaacatttgggtgtctgcaaatatgttcttggtgatctaacacttcttaagtttaagaaacattgttttaatatcaaaatggtaacactccttttgagtgttcactcttactcaggttgaattattttaccagtacttgttttttaaaatggcaatgcatcaccaaaacacatttccataatatgatttaactttcttatgtcagtgtttctcaaataggttcatgaatccattctagagttccttagagttctctgaaggatgagaaataccactctaagggaagaatgtagaatatttgataattttatgaaacaaaatacatgtatggtatagaagcctgtttcccaatctaggtaggatgctgtatcgggttttcatactatgtaagtaaaacaatattctctatatatttgtcttaattaataaacattgaaatttacaacagtttatttttctcatgcagagctgaacattaaaaattatacctatattacaaagaacaataatttggtagaaagaaggctccagactactgatacacaggttattcagtggcagtaagaggcttctaaactgacttcagaatagaaacttactaatgctttcagtttctttcagaactgtgaaagaacaagaacatagtttaggccattctatgtacattaattactgctactactaatactactactactaatatgataacagtggcaaaaggatgatgataatactatatgccagttattgtactaagaaccttatttacattttttacttcatcctcaccaccacccaaacgcagtagggtggtaggtttcttcttcatgtgtgcttgtggtgctgctgatatcaggcagagtcctttggtggaagctcctggagtccatctgcttccagttcatatgggcagtttctcctttcccatcttgcagtaggttgctactgctataacattcattcccatattgcagtatcaatacttcatcagcatctaatatttgtacacagttaacacagtctcttttacacatgtgatctcatttgatcctgtcaggaacacaatgaaataagaaaggaaaatagagtattaagtgaactttagatgaggaaatggaggctcaaatatttcttaattcatcaaggtataagtcttcttcatattaccttctactattgttatattgaatcttgactcttctctaagtgtgaaaagtacagtcatctttgtttaccagttaatagggagatagatcttaatcctcattgattgtgcccttctacacccaacaaggtatcaggcacaccataggcacttaaaaaatgcagtaacttggcttgttagattttgtacttaaatggataaagagctaaaagaatacaataaatttcaggtacgtcttgcagcaggttagtatgtggttattcattaagctgtgtaatttctatctaaatcttaggaactccctaatacagaagggccccaaatattttcctaccaatgatcacacactgtctaaaagtaaactattgtagaaacattcctttggccactgatactcctagacattatcctaaattccatacatgtctaggaagtacaagtaatttccacattagtgaaaaatagatttttaaaaacatttttgctgaggatttcactcaggctgtttttaaaaagataaaagatagttttggagcagggaacatgattggggtgagtttacaaggagtgctgtaacaaattgtttattttctactctaataattataactggtgctttttcagcatacactgcttgccagactttatgctataaataatattattattccattttgcaaatgagaaacctgagactcaaaagttaaatagtttgtggagggtcaaaggctagcaagtggcagaactgggatttaaaccaatgtctgactaagcccaaatctcctgtttttaacaataaaccttcactgctttgtcagtgggagtaagaagaagcagcgaggatgaatgggaaagaatatacaaatggttgctaggaagatacccatgccaaacatttacttaagtcacagtggagactacaagtctgtggactcaagtcctatggcagatattttggcttaaatcctcctggaggtaaccacttccctttcattcagcgtcaccagctactttatttttcctgtgcttatttggttaccctctttggtcttcagtgttgttgtttgccaggtgaagcctgaacaatatagtcagatctcctttgcataaaccttatcttcagtatgcagctcaaaatgtgttatttataaattctcatcatttaaggctactagcagcaatgaataattcatagtaagagttgctttttgcaactagtaaattgaaaggttgatcattcttccagagtgaactttaagaaactcattctcacaggctggaatgatgaatgataaggatatttcctttaaacttgtgtttagagtatttatatatattatctgaattgaactacttaccagttatatcagataggtagggattatatacccattttgtagatggaagtgactgaggcttaatgatattaagttattaacttgctaacagataaaataaccatttacaaagccacaagttgaatcagttggtcttcccataattctgcatttcctgttcttcttgcccatcctgtgacctagtacattcctcttcctctaatacaagcttcctgtgtgaaccaaataaataatataggcattacattttacagtagtcagttggggtgattgaagggagagcccatttgggaccagggtaaacaggaaagttttttcggaggaagtgaaatttgagttgccacatgaaacaatggcttactgatctccctcattctttcataaatcctgtaggtaggaaagagatatgctttcctgattccaaattaattcagctatgtgtagatatttgctaatagagaatggtgggtatggagaggatgatatttgtagaccttttaaaagtatgtttacattaaaggaattagttggagagaagagaaatcctacttttctgccaaggtaccttcaaattgcactacctccacaaattgtactatgactgctctggcctccattaatcttacatttatctgaaatcctctaataactatagtgtagactagctgttacaaactggtgatccatgatcctaatatggttcaaagacatgttttgttttcaccagtgctgctgtaggctaggggttggattattttttcttttattctttttgtttttgagacaggatctcactctgttgcccaggctggagtgcagtggcacaaccatggttcactgcagcctcaacttcccaggctcaagtgatccttccacctcagcctcctgagtggctaggtctacaggtgtgcacccccatgctcagcttcttcttctttttttttttttttttgagagagaggcagggtctcgctatgttgccagggctggtcttaaactcctggactcaagcaatcctcccaccttgacctcccaaagtgctgagattacaggcatgagccactgtgtccagccaggggtaggattttatttattttcttggagagaagagcaggattttgaacccacagacttgccataacctctcaacaaggctctccagatgttttggtatggtgaaatacaaccatattgggagatttaggtttcaacagttcatagccaaggacatgtgtggtccattgagcaaaatgaccctcttcttcctcaacacttatgtagaatacacttaggaatggtctcagcattcgcatcttcctaactggagacagaaagtacaaaatggcatcaagctttctgagagattagatcactgccctattatgtttctttctgcctcagagcattttcctctgaaattgattaaagtcttttagttaacaggcagattgaatataatcttttcctcttcaacctattagtcactgactactgagcataactcagaggtttgattagagagttccattaaaaatcatcatacactgcattttccatgtctctatgaatttcgctttgctctgtgcagtggccatagacttaaccctcaacctgcattttgtaacaaatgacatgaggagagaatgaaacctttaattagtgtctcttgaggatgttatggttctgaaaagctctgcaccgatgagaaccaccagatattatccacactgtgtctgaaaaccagtagtaatagatgtttaactcctacattgccttcagtctttgtgactctccagagtaccagggaccaaggctgggaaaccagttctaactggactgtctagaagccaggtaaggccagcacatcctgtttccatcaaagcagtggaaactgactgaatactgctaacacggtgaaaccccgtctctactaaaaatacaaagaattagccggctgtggtggcaggtgtctgtagtcccagctactcaggaggctgaggcaggagaatggcgtgaacctgggaggcagagcttgcagtgagccgagatcgcgccactgcactccagcctgggcgacagagcgagactctgtcagaaaaaataataataataaagaaaagaaaagaaaaaagaaatgcttctgatgacctgtcaggttatcttttccttttggatcctaaagaacatgctgaatcagctcacatggactggaatgacactagacgccagtgttatgattaactctgtaagccagacaatccattggctaaattctatccaacagattcttttcattcttttaaaatatgttaagattaaatctatcatcttcttacacctgaattttggcatcagtaatctcatttggagattcacacttttgtaccctaattttgtgtgggactgtgatgctaactctctagcaccaaataaagcctttttacttcatattactttaactagtgtagcaatcctgctgtgtgcctttaagaatactaaacattaagggtctataacctactcttccaaattccacagcaaggtattaccttcagctttcttcaaacaagagcaaatgagtcaaatgatatagactgtagagcaatgacyaacaagaccttttgaaagaaactcacttcctcacctttgattctttggcatgcataccccaaatcaattacatgggactccaggctgtgttgatttttttatttgtgccaaaattttgttgaattagctggaatatgaaattaaatgtgttttcacctgggtcagggaaatgcctttgttatgcagtggttgttcagctggcaggtgtgtacctgcttggttcattatacactggctgtcagaatcctacctttcccatgttaactaggctcccttttaattcagtgaagttggtgcctgaggtggttgggtaccggaaggcaacagaagagacaaagacattcagttattttgtcaaattggtgggaacatcagtagagtggagtgctagctttacagatctcctacaaacagaaaatggcccctgaaatggcatgtgatgacagcgatgcatccttacctctcacctatgcttcttccttctttatgaattcatggcagtcttggatttagtagaatgcgtctttgcacartaagtttagacttgttaagcgtgagagactatatgttcaaatttccagtgagagggatataggaactccagccagtgaactatactgatgtatctaatatttctgagagaatataaattttggtttgtcctatgttgtgccatattctctaagtaatgtaattacaaagaataggaataaaccagtatttacatataatacttgtttttggaaagctagataagcctataaatcttatgacactatcttttactccttttattgagcaggcattttggatgggtcccagaacacatttcatgcttttctattaaaacaaacacaatgttattcctgtgtgtcttttctttttctctgataaggcttatctcgtgcttctcttcagtaagatctaggtgtgcttttgtgaaaatccctattttagtctgtgaaatgcagcctccagcaaaacaggcaccccatggcctcccttgcatagtttccataaacctttctttcttcttccctctgatcccacccctatcctcaacaccgagcaacccctcccttcaaacagcaccagaggaaaaaaatatgaaactaaagagatgcacttgaaatgcctccaggttttgcaataaagcttaatgttctaagcatcaactttggcatgcacaagcacccgggatttacaagtctcagataattacagttctaagcagttgaagtatatctcactctctgtttttcctgccatataatataatatcctcaatacattaaattaataaatgacctagtaccctcatctaaccctctgttttaaggggacaaaagtaatggaaactcactggataccaactaggggggaacttctggccctgccactgtggccttagggaattcacttcaactcttcttgagttgcttcatttgtaaagtggagataacagtgtctgtcctgttcacctcacatggttctagccaatttcccacatactagtgtatatgtacacaggccccacacaccttgaaaatcatcttatttcagactccctccttccctatcacagacaagacaaaattgcatacctctttctataaactggcatctagaagaaattaaagggtaaacttactatcataatcatcaatcttatctgtcttttccttatatttttaaggtattgtccacttgccaagtgaaaagtagctcttacaaaagacatgatttctgtatgtaattatgatttactggcaagatttttaaaagaagacattaactagtgcctgccttggcctacctctgatcctatcttttttatgcattaattaccatattgaaatgcaatttattcatttttcatttacctttgctgtgcccaaattcttcatctttgagatgttgattgttttaccctttgacaggcatttctgccttcttcctatgagttgatgtctagacagataacagttattaaaagcttgggaaatgattgttatcctaggtaggctggtgcagggtttgttaagaagtaaacattctctgtttaagcttgctttgaaaaatataactcatttgtcactcatttaagatggaaattgagttcttggtgaaaatgtcactcgagaaaatggaagtatggggtacctaagtgtcatgaatggctggagtcttgctggggaagggataaagcaagtctttgggtactctaaaatgttgataatcagttgtcaaagaaatattaattgattgatgatattaatgatgttcttacggccataacattggtgggaaaggggggtaaattatttttaaactgatatacccaatcctacttgcaaagaaattgactagagacaggcttaaagtttgagatttctcaattatgtcatgttttatccagaaaccactattgccaaacagcaaatgttattaatatgtgcttatttaatttagaaaagtgtacatcaatctaacctggaaaacatggtaaaggccatcctttaccatgtcatctaggatattatctatctgttttatatgtctgccttcttatctatatgaaaaaaactcttgagtgcctgaattattttaacatgcccttacctatgcacccactaaactacttctactcagagtaggtgttcaataaatgtgaaagtgattaatcaggtaattcaagaaaacagagtggtgcaaaatcatggaggctaaggagtgataaaagggtccttgacttagtggccatgcaatcatgttttcctctggcttcttcattgttaggcctcctagaccatgtttggagagaatttcactgactccaggacttttggcactactctggagataagaacgttcaggaaacatactgatcactttccaaacaccctcagacctgctgcttaatagccacctgaaaaattctttaattttaatttctcaccttcccggggatctctttcctggatgataggaggaggattccggggaagacttcaagagacaagcctggaatgagctgcttgagagaaacagaagggttgatcctgcccagcttagggaagacattgttggagaagatttcactactcagtcattcaatgaaaaaatgaagaccatccccaacccttgatcatctaataccacttttgtcctacagaggggcatagctttcagcaagacattcgtcatccaacccattctctgcctgatgccttcccattctttcttattacttttgaggggcttaaatttaaaagggtagcataatggagcttttacatagctgacttgtagggtggttgctcttggccatagttgttaggagcacagcaggtaatgttagactgacctgggttctattccagcttttccacttcctagcagtgagactttgcacaagtgactttacctgttcgaacttatccaagcctgaatttttgtactggtaaaataatagtactcacctctcaggattgtttagaggaaaaagtgagataacagttttaaatcacttagcatagtagtcacttgattgttgctactaattgttcccaacatcacagtttcattatgataattattattcgaaataataaataacttcctatctttgtggcctttatgaaaggtctctgggaacctctattggctacagcttagggtgaacagtttgctagattcatctcctcacatactcaggctaagttacttctatccaaggtaattgtcttctacaaatacaacctgcttaaaagttaggcattacaaccacaaagttatcagctatggaggtcaaagatactgaacatttcacttaggctgcatctcttttcacttctgaatctactccttcaattatctagaccggtggttttcaaaacttttgaacagcaacataccccttttgtatccaagtgaagtcatatacagaaccacaacacataaagtatatgaaagtaatattttatttatttatttttttgagacagagtgtcgctcttgttgtccaggctggagtgcaatggcgcaatctcagctcaccacaacctctgcctcccgggttcaagcaattcttctgcctcagcctcctgagtagccgggattataggcatgtgccaccacacctggctaattttgtatttttagtagggacggggtttctccttgttggtcaggttggtctcgaactcccaacttcaggtgatccacccatctcagcctcccaaagtgctgggattacaggcgtgagccaccgtgcctggccatattttattaacatgagttttttcataggttcatatgcatgatatttatatattattttcagtacaaaaaaatgaaactaggtactaagattgacagtcgtagtcttttgttggtgtataattcaacttgatcctgcattttttttctacacagtattgaaaaataaaattcacatctctgtagtaagtgcaaatggctgcagattttttgtcgttttaataagtgatccataagcttaaaagaatagtaacagaaaaaaaattgtgtggactggtaaaagctacttagcttgctttctttctttctttcgttctttctttctttctttctttctttctctctttcttttctgaaacaaggtcttgctttgtcacccaggctgaagtgcagtggccttgtctccactcattgcaaacagcaacctctgcctcccaggcccaagcaatccacccacctcagcctccctcccgagtagccgggactataggccatgtgccaccacacttggctaatttttaaattttttatagagatgaattctcaatatattgccaaggctggtcttgaactcctggactcaagcaatcctcccacttcagccttcccaagtgccatgattacaggcatgagccaccccacccggcctacttagcttctctgagccttggttttcctgtttgtaaaatagcaatcacaatagtacctgtctcaggggggtttgagggttaagtaagacattgtatgtaaagtctctaaggaatttggcagacttttcagaatgcttggcacataagcaatcagtaaatactaactggtactaacgcgatcaccaccaccatcagcagcagaatccatttgaattccgtaaatcatacagcaggaaaattggtaagtagattccttagctcatttcatcttcattgtttggtgggaaacactttttcaaatcaatcttacaatattgtaaaatgcttaaccttaaatgcccatctctatcagatactaactctaggtcctgtagtacataatttggaaaccactggtgtagaagtctgaccaagtttctgcaaagattgcctggtagattatgagctctttgagagcaggggctattttatttatctgtgtattctttctgttgcctgagacagcagatgctcaaaaaatatttcttagattatattcaggttcatgtctatagattttaaagaagcttactattacccctaattacctttccatttaaaatcaaattttcttttttgtcttcctctacattttctccaacattactgtaaattttaaaaattatcccctgaatcaagagtcccaaccttttggtggtaaagagttcctcagttcctcagttggaacttccaggttatgaaggccttaatatcctctgaagaaggaaagcaatttagcattaatctctcaagggagaggcaacaaacatttgattttagacttgacagtttctggttataaaagttgcttttagcaaccatataaaagtcattagcagtcataacaaagccgttctattacatataattcgctcccagagttgagatttctggtagtaaaatcacagacgccataaaactgtggcagttggctgttaatacaacctgtccttatgttctagaaggcaaatttagattgccattgcttaaagaattacagaacttctaacttcttgcctccctttcttcctttctttcttccttccttccacaatcattatatcaccatcacccatattagttcttgccctcaagtagttaaaattctagcaaggaagacagacacacacaaaaaaatgccttcacatttattgcatggcagtctaattgaaatatacaaagtatattataaaagcacagagcagtgaagcaccaaaagcagcattagtgggatatcctaaaggatagattggagttatccaggaaaaggggtgaggatggaaagaaagactatttcaggcataggttgcggcattgaggataaagccaggacaagatacacctactatgtacccacaaaaattaaaaagtaaaaagtaaacagggcaagaaccagcatggtgtgtgtggaaaactccaagtagttcattgttagagaggcatgaagtgccaggtagaaactgatgaaaaacaagcctagaataggcaggtaccagatcaaggaggaccttggataacagataacataaaaagcctgaaatgtatcatgtaagtgatagtgatctactagaagattctagtataatggtggataccggaaggttagtagaaatgttgggtgacaattttcctaagaagtctggtaagtaaagggttaagataaggtcaggaggaagggcgaggattgtagaaatggagtggaaaaaacagattcatgggcttggtgcgctggctcacacctataatcccagcactttgggagtccaagttgggaagatggtgtgggtccaggagtttgacaccagcctaggcaacatagtgagacctcttctctacaaaaagttaaaataaaattagccaggcattgtggcatgtgcctgtagtactagctactcaagagtctgaggtgggaagatcacttgagcccaggacgtcaaggctgcagtgatccaagatcacccctctgtgctccagcctgggcaacacagcaagaccctgtctccacaaaaaaagagataaataggaggtaaaattggcaggatttcataatttagtgcacatagggtaagggaaagaagaattattaagaaatgtctatcttaggtttcctgcttagtgatatcaatgacagtggaagatggagaaatttaggaggagttagacttgacatcagctttggatgtaagtttgagaagcctgctctcccttggtccatgcaagaggaattaattataaggcaattggaaatactagttcttggtagaggtttggcccagatatagatatgggaatgatgggcatattgatgatagttgaaactaactataggaatggatgggtttactcaaggagaaaatgtagcatgaaaagaacagagatctgataatggagtccaggcataacatcaacatttaataaatatttcttgagtgcttacaccaaatataggaaagccctgacctaaaggacttcacaacctagttaacaatgatactgaatttctggccgggcacagtggctcatgcctgtaataccagcactttgggaggctgaggcgggcggatcacttgaggtcaggaattcaagaccagcctggccaacacggtgaaaacccatctctactaaaaatacaaaaatcagccaggcctgtaatcccagctactggggaggctgaggtacgggaatcacttgaacccgggaggcagaggttgcagtgagccgagatcatgccactgcattccagcctgggggaaagagggagaactccgcttcaagaaaaaaaaaaacaaaaacaaaaacaaaacaaaacaaaaaaaacccatgatactaaatttcaaactgcttctcaaagtgccaggtttctgaggaggtgcagaggataaggaatagactgagcagtctttcactcatgctttaattagaagagcttcacttctacgtgtgtgtgtgtgtttgtgtttgtgtgtttctttttccattgtatgtttgttttgtgtggggggtagatgaggttgctgttgttaaaaaagagaagtttgacaaccattgtgctaaaaatctgatttaaatatagtaaacaaaatattcaagatgaatacctggctcaaactctacttttggtgaaaagaaagggattaaatcaatttcaaaaattggcaatgatatatggctggtgttcagttctatttcactcacttcagcatcattcaatcatcatacattactaagtatgaaagaatagaggagaaattggaatacatatttgttaggagatgcatgccagatgaggtattgagtacatgaagcaggtaaggtagatttttaaatattttgctactgactttggatatgatgagatgaacagttagaagccattgttctccaatagacttttgccttaatgtatgttttagaataaatttaaccatatcactgatcacatataacacatgaggtgaattgaaaattagcattcctaaaggatgaaatttctacaaatcaaaacttccgcagggatgttggtcaatgcttcttttaaaaccgaggatatagataatttgtatatgggagtgatatcctctgtctcccctccatgccactctaataactaagcaacaagatttatatcatgtttagaatttatcagtagaataaataagtccctggaagtcaaacatataaggataatcaatgttatcatcatctgacaggagagattaataggatttgtatattttaaaagtgaaaagtagtcatttttatttactaaaataatatgtcttagtctgtgttgcactactataacagaacaccacagactgagtaatctacaaaaggcaacaatttatttctcacagtattggaggctgggaagttcaagatcaaggtgcagaaatatgggagttgcactgaggggaaaagcctatagcagttctgctttcaattgttaagacttggaatagcagcaaggttgaggggcacaaagaaggagcctctgaatctaagacccccttattaaatcaggacacgtaaagagagcaaatggtcccagatcgatagtgttcttcccttccagtacaagcagacaagaatattattttaaaatccccaatttagatatacagttttacagcagattatgaagcagatctttgattcacaaatatcaaagatcaccaagtactgaggaagtaagtcaccataaacaggaatcagcaaaaacaataatgagcagatttatatccctaaacgctttatttagaatatttatgtatgatgtgttgaaaaaactagggatatattccaaagatgagctatcaaacaaaaagagacaaatatgagttactagggaaatctgcaaaataactaaatggaacttctagaattgaacaacgcatttattaaaataagaaatgcagtgaatggttaaaaacaaaaataaagagcaaattggggaactagaagaaaaatctagaattatctacaatggggatagaaaaacaagagtagcaatattaaaaaaataagagatgtggagcacagaatgcaaatacttaactcatattgaattagagcgccagaaggagataatagagggaattgaggagaggtattatttgtatacataattatgaagaatatttcagaatttattaaacatatgaatcctcaaattcaggaaatacaacacataccaaaacaagatgagagagagagagagagagagagagagagagagagagctaatctttgcatagatacattgtggtgaaactttaggacaccatcaagaaaaagatcttaacagcagagggacagatcacatagagaagaacaacaattacactgaaagcagatcacttaccgatcgaaatggaatgcaaaatttaatgcaatgcaagaagaaaataacaaatctgctatcttagaggaagatttttaaacacctcattcaattatgaatacttcaagcagataaaaaattagcaaagatatagaatatttgaacaacctaagtacaagcttgatatagtaaatgtttatagaacactatatccaacagttagagaatacatattcttctctagcagacatggaacatacataaaaattgagcatgtattcggccctaaagcaaattacaacagaatttaaagaaatccatacgtctagaacatgttttctaaccatatgacgtcaacaacaaaaagataattttcaaaatccctatgcatttagacattgaaaacacacataatattataataaaaattaaattttagaattgaatgataacaaaaatactatatatcaaaacttgtagcatgtaatgagatttatacatggaaaaatgtatgttattcaattcttataataagaaaatgaagactaaaaattaatgatatagatattcaacttcagaagttagaaaaagaaaaacagaacaaatcctaaaaagttgaagaaaaagttaggaggagaaattaattaaatagaaaacaaacatgcagcggagaggatcattaaagtcaaagttggttttctgaaaagaataataaaactgaaaaacctctggcaaggaaaaaatgtcgcaaataatatcagctattaaaaagaagatataactatatatgctctggatattgaaaatatgataagaggatgttgcaaacaactttatgccattaaattttgcttaaaataaaatagacaaattcttagaagaataacgattaaagaaatgcattctgtagttaaagttatactaatcttttatgaaacagattatctcagtctttatacagattttccagagaatagaaaaagcaggagtaccccaccaacttattccatgagatcagtataactttaaggggaaaaaaagataatggcaaaaagagaaaggaaaattactggccagtttcttttatgaacataaatgtaacaatcctaaacaaaatactaggaaagtaaatccagtaggatataaaaaggaaaatctatcatgacatgttgggttaatctcaggaatgtagcagtggttttaacattaagacatgcataaattcaaattacaatatcaatagattgaaggaggaaaaatatacccatctcagtagagagatttccccacaatagtacatggataactccctggcaattcacttgacctccatagtggatgaaacattttaaaagcaataagctgtgagttttaggtcttggttttcagtttggttactccctgttaacatgtaaatgctgcaaatttttattttagttaaaaataaaacttatgttgcctgattacaaaataatatacctgcattgtagaaaaatggaaaaatgcagaaaagaataaggaagaaaagtaagagtacccacccataattccacaatttttaactttttcagttcatatccttccaatagattttatgtatgtgtatatatttgtattgtaaaggaatgtgaccatactgtacatattatgctatcgtaacctattttcatttatcagtatcatgaatatatttaatataatctccctaacagccttatacatcacctattaatgaccacattttatcatattaaatagatattatattttactcccatattgttacacattttaggttgttttcaacctaagttcttgaaaataatactgtgattaacacttttatagctgaggctttatacttacttattttccttagggaacataactacacataaaattactatgtcaaaggatgtgcacatttttaaggactcaagaaatgactattttcagacacatatctaaatatatatatgaacttaataaatagtgaaggtagcacctcaaatcagcttttttggagatagttgacagtaattttgaaaaagtgaaatctgtattgcatacaagacaccacaatatacatcgggtataataaaatcttaaatgtgagagacaaaaccttgaaaaattctacaagagaacatagagaaatattctcatataagtgtggaatagggaatgactttctaaattctaaggatgttataaagcctgaaaggctaaagaaaattcttgatacctttgaacactttctaaattttttgtgtcaaaaatagttcatggaaaaaatagtaggcaaatgccacatttgggcaaatatttacaacgtgagtaaaagaaaggcttaattcattactatataaagaaatgaaggctatcttttatctgtgcatttatatttaaacacacatacacattcatacacatacacacacacacacacatacatacatacatgggcctttttcaaaaaacagaagataagactttttcttttgtcctttttcacagtgggagctggaaaagagattttctgaaaccagattgtaaattgcaaaaggcatttttctctggggttcaggtgagatgaggcagcagtttcaccctgctgtatttggaccctagatagaaagcatattccttttgtcattgctctgagatgcagctctagccttgagctaagagcaaaaataagtgagctatgaaaatctgggtgtgactactaaaatgctgataatttaatctattacaagcaaaaatgagtaatgagatagtaccatctttatgtgatttatggccaaagtttttaacattgtagtaaagaagtctcttattttaagagactctgaaagagcgaggagagagggaaggaaaggagggagaaagcggaattaaatgacaaacctagagacttctatttcctgggggtagtaacagcaaaatatttgcccagcagtaaagagggcaaagaaatcacttcttagagaattgtctaaagacattttttcctagcaaataataatctctacaaaccttcacctcataataaaggaggctcagtactggccttcggaaaagaaaagttttattggcagccatgtagtctgaatacagagtctgatagaaatcataaagcatgtcttgactggtagtcatgatgacagcaatagaatggctttcaggcactaaaaggaacacagtaaactccctgaaattagccatctccactgtctttttcaatgtgagactgacaatacttagtttacaattcagtgtgatctccatgttaaacaagtaggaaaatcagagtaggctgggaattttggaagcttctgcattatctgggtttatgttcttagatgggcttttctatagtccctttgcattatcaaactttcaaaatggttaataatgaaatatactaggatgaatcattggattattcaatggtgattaaaatctgctgctttccctgggtgtctcatcttccttccagccctagcattttgtgtgttgaaaagaacattgcctgaagggaaaacacttgcacaaacagtacacttggaaacaatccaactaaaaacttggaggcatgttcctgacccaaataggaacatatcctattgtctttttgccccagttttccctgatttgtagtatttaaagagttgctgttttgaagaaattacagtataatttataccaatctagaatgtaaatgtaattggacaatttacaaattagataggtctagtactaatgaaaggcacaaaataaaaaatcttagagtctatttgagaccattaaccagggcagaatctaacatagtacattgaacttagtgggcatttcatacgtgtttgttaaattaaactgaatgagttcgtaaaacagcattctctctattactgccttgctaaaaattcttgcatggtttttcatttatgagaaatccaagttcaactcctcctccccttctgtacccagcagtagtcagcagctttatttcatactacctacttatgtgcctccttcaccatggccagcaaaatagatataatgcctcccaagactttgactggccatactacaaaaaggatgctctcccttcaatttatccaaacacttcacagccttctacttacagcatggattccacatccttctgcttattctgccctgacactctagcgccaaagtatttattgccacttttctcttttgtctttccctcttgtttgactcttaccaagtatacttattggtttctccaaattcgcaattttccagtctttttttctcagattgtcaactcttagaagtgagaagttcctagcatatatctctctgtacaccctacctcttttttctgggttcttaatctagggtcttaatcaaggaaggcgatcccttaacggtctgtggatagaactatatttcaatgtaacctacttttttggtaatcctataggtcctattttagttttgaattttttcattgaagtagaacatccatctagaaaagtgcacgaatcataagtgaatttttgcatgatgaatagaactgtataactaccacccagaacaaggaacaagaatgttaccaccactacagaatatagaacctaacacatcctgacttctgacaccatagatcagttctgtatgttcttgaactttaattagtaggaatcactgttatgtgtttagtttatgcatttaaggaattgttctgagaagatgtccaaaacacacagacacacataaattttaaaaggtacagaaccatggacaaccttttaggctttcccagatctaagatttctgagtttgattctttacataaaatgagggggaatttgcagaagtaattgcaaaagtaaagtgactcagaatcagaatctgataatgcctaaaatagatgggcagtgccaaggatttgcgaagattgattcatcattagtcagttcttgccgtgagggtagggtggggcgagtactttttgacctaccaaatgagctttaactattttaacatatattgctcacggctttgtgttttactctttaacaataattttaagaatagtcagctgttttgtggactaaactctcacatcgtctaacacggggtcttgagtgtaaaaagaactcagtaagtatctgcttaaccattttgtgcttcagtatctgcttggccattttgaaccacaatgtcagctaattagccttttcaaaaaggtacatttttgtctaattggtagtttctaccagacttcaatggaattcctttgcttggtatcagctatagaaagatgtgtttgcactgagggtggacaacactacagcaaggacctacatgtgtaggcagagactgatctaactaatcagtaaaaactgcaaatgagcatcagttccatacaatgtctttgtgatatgattacatcagtatacctacttctccatatgtgttttttttttttcagggagttagatggctcctctctgcttgttctttttgcctaatatttttgttgtcctgaatatcttccattaattgaatgtcatgtttttattgcttacttgaatgcatacagcattcaagggctgtggcagatgaaaaagaaatagaatgtgctggtctaaatcacctagtaatttaatgactagtttgagaaacaagacataaaaagagataaacaaaagtgcacgcctgactatatttaagcaataaatgataaagacattaacaattgttgattgttaagtgagtaacccacttttggagaggatgaggaaggcctcaaagaacagatcatcaccatcatagctaattcataatttctatgtagaataggcttagggtatagcaatctgagtagaaggaagggttgagggacttgtcctgaaactgcatttacattaacaaacatactgttcttatgtagattatatgcttatttataatggatcttgaagaatacttagggcctggcttagtgaaggagagaaaatcttcttggttgaagagtcccaatctactgtgtgtataactgaatttgtggaagatacgatgtgtaagacaaggtttctgttctcaataatgttgtaacctgcatggagaggcaccatatacatgaatagaaagtcattacaaatagaaataattttgagataaatgtcatttgcaagtgctaagtgatcaaaggagaaagagaggtcagcatttgccttggtggtcagggaagccttcctgggtcaggtgaaactttgagctaggccttgaaagagacatagaaatcgaacaggcagagaaagggagctcatgtcaaattacattgattgtcttccctgacttcacagtcagcactgaatgaactctcttcctgtgactcaccttctgaatgacatcattttataaatcttaggtgcatcatgacttgcgttacttttgaattggaagtgttatctccccaacagcctgtggaatgattatttagcactggcaggtagtgctgcatcatacctttctgttctgaaagagttaacagagcttctataggtatccaaccagaagttcaggcactggacctagactttagataacagaaatgcctttgtgctggagtacacttaatgagagagagcacctctgtcccgacacatttgatgaattcactcaatttgggaaaacccagaccagcgcacagacactaagatgagaaaagaaaaggtttcgttcaccttcttcattccaaggttgtgaattcattcttgggaggccttgaaaagggagggtggaaagagtaggaggaggagtggaggtgggggatacggagtttctgacctgaattccacaacagaggaatgtgtgaacagcaagagacacaggtacaggctagtgctctcacatacctgaggaaaacagattttacccaacttccactctgtccactctgcagacagttgacagtgtggtaaagagaattaataattctatataattattttatttaataacttatttttatttactaattttatttgttattatttattaatatgttttatttcccagagtttagggagggtaccgtgaaaaaggagagagaattaacattttaaaacacttaaacacaaaaaagaaattggctgtagaatgtccaaagtgaacagtttaatgctgtttaaagcggtcctggatcagccatgtttaaatgaggtatatgaagaacaaaaatcatgcttgttctgattcgtcataaaactacaaggtggttaactgggagagaaaatgacgtcagcccctcttattatgaagccctttgggaaagctagttagatgtattttttactatctttgtgagagacccttgggacagaagttagtttcagaaaatgcaaaacatccacagggacaatcatagtacatttgttcacattgccatgcaaactgtaaaggcaaatataaactataattcagggcacatagaaaagttaaggaaacatgggaagttgattctcctgcttaataagactgacaggataaaccaaagtcaaatcatttatattttataagctgtaatgttttctagatattgggttaaggaaaaacatgagatacctgcagttattgcatcaactcattgtaatttttgcttatagttcttttcttttgagattgataaatattatctgtggagatttttcttctcacctaaagaaagttcctttggctgatggggcacatttcacggtatacacaggatctgctgtcatagagaatagccctataaaccctcaaactgataagttatttcaactttcaactgtgagtcagaatctgatgctccagaggtagcatgtggaagatcacacagtaacacatgtttagcttttgatgaagagctttataaactttgctaggaaaaggtactcttgcccttgatctttcagtagtgcattgagtgacaaagacaagcaatagtaaattggttggggtggagtggaatggtgatgacattaatataaaaacaaacttcactgaatactatgtaagtataccatcctagagaaagtggtatatggcaacatagaatctcagaacctgtattcatatggattatttttattattaatttttattgagtaataatatacattcaatgaaatataaaaaaaaaacttaactcttctgcttaatatataaaaccacctagatcaagatatagaacatttccagaattgcaccagacttgcttctaacttctatcaccatagattactttttgactcttcttgaattcataaaaatggaattacatggtgtaaattcttttatgtctagctttttgttatcatctgtaagattgttgctagtagcatttacaattacttttaatgcaaattgatcagtgaacaattcagtgattccacaagtagacgataaatgccttctacatgccagacattgtgctaggtgctaggaattcataacccagttatatatggttcctgccttcaaggaactaacagctttagtggaaaagatgaacaggctaaaaataagaatatagccacaccagctttttttgtgattagtatttacaaaagatacccctcccatctttttattaggtttggtgcaaaagtaattgaagttttcgccattactttttttttctttttctttttcttttattattatactttaagttctggggtacatgtgcagaatgtgcaggtttattacataggtatacatgtgccatggtggtttgctgcacccatcaacccctcatctgcattaggtatttctcctaatgctatccctcccctagacccctacaccccgacaggccccagtgtgtgatgttcccctccctgtgtccatgcactctcatcgttcaactcccgcttatcagcgagaacatgcagtctttggttttctgttcttgtgttagtttgctgagaatgatggtttccagcttcatccatgtccctgcaaaggatatgaactcatccttttttatggctgcatagtattccatggtgtatatgtgccacattttctttatccagtctatcattgatggacatttgggttggttctaagtctttgctattgtgaacagtgccgccataaacatacgtgtgcatgtgtctttatagtagaatgatttataatcctttgggtacatacccaataatgggattgctgtatcaaatggtatttctagttctagatccttgaggaattgccacactgtcttccacaatggttgaactaatttacactcccaccaacagtgtaaaagcgttcctttttctccacatcctctccagtatctgttgtttacttttaaagttactttttattacttttaaaggtgaaaatcacaattacttttgcaccaacctaataatttcaaccatgctatgactttatagttatttggtgacagctttattgagatgtaattcacatactgtaccactgaattcacttatttaaagtgtatagttcaatggtttttagtatattcattggtgtttataactatcaccacagtcaagtttggaacattttcaccagctcaaaaagaaatcccatagctgtgggcaatgatccctctataactttatctccccaaaccccaagcaaccactaatctgctttctgtctctatagatttgcctattctgagcatttcatataaatgaaaccatacagtatgtagtcttttgtaaatggattctttcacttagtataatgttcttagtgttcattaattggtagcatgcatcagtactttattcctttttatggttgaataatattccaatgtataaatataccacattttgtttatccattcatcggttgaaggacattatgattcttttttcactttttggctattatgaataatgttgctatgaatattcatgtacaaattattgtgtggtcatttttttcctcttgagtatatacctagatgtgaaattgataggtcaaatcacaattctacataaactttttaaagagctaccaggctatttttcaaaatggctgcaccattatacattcccatcagcaatatactaaggtttcagtttctcatatctttgtcagcacttgttatctcttttattatagccattgtcttagtctgtttgggttgctgtaacaaaataccataaactgggtggtatataaacaacagaaacttattttacacagttctataggctacaaaattcaagattaaggcatcaacagattcagtgtgtgatgagggcccactttctgtttcatggacagtgttctcactgtgttctcatgtggtggaagcaatgaacaagctttcttgggccccttttataagggcactaataccatttatgaggtttccactctcatgacctaatcacctcctgaaggccctaattcctaatatccttaccttgggggttagaattttagcatgctaattttggggagactcaaagatccaagtcatacacaacatccattctcatgagtgtgaagtggtatctcattgtagtttttatttgcacttccctgatggctaatgatattgagcatcttctcatgtgcttatcagtcacttaaatattttctttggagaacagtttttttttttttcagatcatttgtccatttttaattgggttaattgtctttttgatgtccagttgtgagagttctttatctgttctagattacacgctccttatcagatagatgatttgcaaatattttttcccattgtgtgggttatcttttcaatttcttgatagtgtcttttgaggtatgaaaatgtttaattataataaaatccactctattctttttcttgttgttcatgcttttggagtcatatacaagaatccattgccaaatttgaggtcctaaatatttatatgttttcttctaaaagttttatagttttagcgcttacatttagggctttgatccattttcagttaattattacatattgtgtgatgtagcagtccgagttcattctcttgcatgtggatatccagttgttccacgccatttgttgaaaagacttccttcctcattgaatggtcttggcacctttgttaaaaatcaactgaggcgggagagctggcaagatggccgaacaggaacagctctggtctgtaactcctagcaagattgatgcagaaggcgagtgatttctgcatttccaactgaggtacccggttcatctcattgggactggttggacagtgggtgcagcccatgaagggcgagccaaagcagggtggggcagcgcctcacacaggaagcacaaggggtcgggggatttccctttcttagccacagtaagccatgagagactgtactgggaaaaacagtacaccctggcccagatgcagcacttttcccacagtctttgcaaccagcagaccaggagattccctctggtgcctggctcggggggtcccaaccccacagagcccaacaagctaagatccactggcttgaaattcttgctgctagcacagcagtctgaggtcgactgggagcttggtggggggaggggcttctgccattgccgaggcttgaataggtgattttaccctcacagtgtaaacaaagccaccaggaagttaaaactgggtagagcccaccacagctcagcaaggcctcctgcctctctagattcctcctctctgggcagggtgtctctgaaaaaaaggcagcagccccagtcagggacttatagataaaacccccatctccctgggacagagcacctgggggaaggggcagctgtgggtgcagcttcagcagacttaaacgttcctgcctgtcatctctgaagagagcagcggttctcccagcacagcgtttgtgctctgataagggactgactgcctgctcaagtgggcccttcacccttgtttatcctgactgggagacacctaccagtaggggcagacagacagctcatacaggaaagcgctggatggcatttggctggtgcctctctgtgacgaagcttccagaggaaggaacaccatctccactggtgatacccgggaaaacagggtctggagtggacctccagcaaactccagcagacctgcagcagaggggcctgactattagaaggaaaactaacaaacagaaaggaatagtatcaacatcaacaaaaaggacgtccactcagagaccccatccaaaggtcaccaacatcaaatccacgaagatggagagaaaccagcacaaaaaggctgaaaattccaaaaaccagagtgcctcttctcttccaaaggatcacaatgcctcgccagcaaggaaacaaaactggatggagaatgagtttgatgaactgacagaagtaggcttcagaaggtgggtaataacaaactcctccgagctaaagatgcatgttctaaaccaatgcaaggaagctaagaaccttgaaaaaaggttagacaaattgctaactagaataaccagtttagagaagacataaatgacccaatggagctgaaaaacacaacatgagaactttgtgaagcatacacaagtatcaacagccagaatgatcaagcagaagaaaggatatcagagattgaagatcaactcaatgaaataaagcgagaagaaaagattagagaaaaaaggatgaaaagaaacgaatgaagcctccaagaaatatggaactttgtgaaaagaccaaatctatgtttgattggtgtacctgaaaatgatggggagaatgaaaccaagttggaaaacactcttcaggatattatccaggagaacttccccaacttagcaaggcaggccaacattcaaattcaggaaatacagagaacaccacaaaaatactcctccagaagagcaacctcaagatatataattgtcagattcaccaaggttaaaatgaaggaaaaaatgttaagggcacccagagagaaaggttgggttatccacaaagggaaccccttcagactaaaagtgggtatctctgcagaaaccctacaagccagaagaaagtgaaggccaatattcaacattcttaaagaaaagaattttcaacccagaatttcatatgcagccaaactaagcttcataagtgaaggagaaataaaatcctttacagacaagcaaatgctgagagattttgtcaccaccgggcctgccttacaagagctcctgaaggaagcagtaaacatggaaaggaacaactggtaccagccactggaaaaacataccaaattgtaaagaccatcgacgctgtgaagaaactgcatcaactaatgggcaaaacaaccagctagcatcataacgacaggatcaaattcacgtataaygatattaaccttaaatgtgaactagctaaatgccccaattaaaagacacagactgacaaattggataaagagtcaagacctatcagggtgctatattcaggagacccatcacacatgcaaagacacacataggctcaaaataaagggatggaagaatatttaccaagcaaatggaaagcaaaaaaaaacaaaaacaaaaagcaggggttgcaatcctagtctctgataaaacagactttaaaccaacaaagatcaaaagagagaaagaaggtcattatataatggtaaagggatcaatgcaaaagaagaggtaactatsctaaatatatatgcacccaatacgggagcatccagattcataaagcaagttctttgacacctgcaaagagacttagactcacacacaataatagtgggagactttaacaccccactgtcaatattagacagatcaacaagacagaaaattaacaaggatatccaggacttgaactcagctctgggtcaagtggacctaatagacatctacagaactctccaccccaaatcaacagaatatgtgttcttctcagcaccacatctcacttattctaaaattgactacataattggaagtaaaacactccttagcaaatgcaagagaacggaaatcataacaaaacagtctgtcagaccacaatgcaatcaaattagaactcaggattaagaaacccactcaaaaccacacaattacctggaaactgaacaacctgctcctgaatgactactgggtaaacaacgaaatgaaggcagaaatcaagatgttctttggaaccaatgagaacaaagacacaacataccagaatcactgggacacattaaagcagtgtgtagagggaaatgtatagcactaaatgcccacaagagaaagcaggaaagatctaaaatcgacacactaacatcacaattaaaagaactagagaagcaaaagcaaacaaattcaaaagctagcagaagacaagaaataactaagattagagcagaactgaaggagatagagacacgaaaaacccttcaaaaaatcaatgaatccaggagccagttttttgaaaagatcaacaaaataaatagactgatagccagactaataaagaagagaagagagaagaatcaaatagacgcaataaaaaatgataaaggggatatcaccaacaatcccacagaaatgcaaagtaccgtcagagaatactataaacacttctacacaaataaactagaaaatctagaagaaatggataaattcctggacacatacaccctcccaagactaaaccaggaagaagtcaaatccctgaataaacgaataacaagttctgaaattaaggcagtaattaatagcctaccaaccaaaaaagtccaggaccagacggattcacagccgaattctaccagaggtacaaagaggagctggtaccattccttttgaaactattccaaagaatagaaaaagagggaatcctccctaactcattttatgagcccaacattgtcctgataccaaaacctggcggagacacaacaaaaaaagaaaattttagggcaatatccctgatgaactttgatgcagaaatcctcaataagatactggcaaaccgaatacagcagcacatcaaaaagcttatccaccacgatcaagttggcttcatcctggggatgcaaggctggttcaacatacacaaatcaataaatgtaatccatcacataaacagaaccaatgacaaaaaccacatgattatctcaatagatgcagaaaaggccttcaacaaaattcaacagcccttcacgctaaaaactctcaatgaactaagtattgatggaaactatctcaaaatagtaagagctatttatgacaaacccatagccaatatcatactgaatgggcaaaaactggaagcattgccttttaaaaccagcacaaggcaaggatgtcctatctcaccagccctaatcaacatagtattggaagttctggccagggtaatcaggcaagagaaagaaataaaagatattcaattaggaaaagaggaagtcaaattgtctctgtttgtagatgacatgattgtatatttagaaaaccccataatctcagaccaaaatccccttaagctgataagcaacttcagcaaagtctcagkatacaaaatcaatgtgcaaaaatcacaagcattcctgtacaccaataacagacaaacagagagccaaatcatgagtgaactctcattcacaattactacaaacagaataaaatacctaggaatccaacttaaaagggatatgaaggacctcttcaaggagaactacaaaccactgctcaaggaaataagagaggacacaaagaaatggaaaaacattccatgttcatggataggaagaatcaatattgtgaaaatggccatactgcccaaagtaatttatagattcagtgctatccccatcaagctaccattgactttcttcacggaattggaaaaaactacttcaaatttcatatggaaacagaaaagagtccacatagccaagaaaatcctaagcaaaaagaacaaagcttggaggcctcatgctgcctgacttcaaactatactacaaggctacagtaacaaaaacagcatggtawtggtaccaaaatatatatagaccaatggaacagaacagaggcctcagaaataacaccacatatctacaagcatctgatctttgacaaaccagacaaaagcaagcaatggggaaaggattccttatttaataaatggtgttgggagagctgtctagccatatgcagagagcagaaactggatcccttccttacaccttatacaaaaattaactcaagatggattaatgacttaagcataagacctaaaaccataaaaaccctagaagaaagcctaagcaataccattcagagcataggcatgggcaaacacttcatgactaaaacaccaaaagcaatggcaacaaaagccaaaatagacaaatgggatctaattaaactaaagagcttctgcacagcaaaagaaactatcatcacagttaccaggcaacctacagaatgggagaaaatttttgtgatctatccatctgacaaagggctaatatccagaatctacaaagaacgtaaacaattttacaagaaaaaaaaacccatcaaaacgtgggcgaacgatatgaacattcacttctcaaaagaagacgtttatgcagccaacaaatgtatggaaaaattgctcatcatcactggtcattagagaaaggcaaatcaaaaccacaatgaggtaccatctcacgccagttagaatggtgatcattaaaaagtcaggaaacaacaaatgctggaaaggatgtggagaactaggaatgcttttacactgttggtgggagtgtaaattagttcaaccattgtggaagacagtgtggctattcctcagggatctagaactagaaataccatttgacccaggaatcccattgctgggtatatacacaaaggattataaatcattctactataaagagacatgcacatgtatgtttattgtggcactgttcacaatagcaaagacttggaaccaacccaaatgcccatcaatgatagactggataaagaaaatgtggcacatataccccatggaatactatgcagccataaaaaaagcatgagttcatgtcctttgcagggacatggatgaagctggaaaccatcattctgaggaaactatcacaaggacagaaaaccaaacactgcatgttctcactcataagtgggagttgaacaataagaacacatggacacagggaggggaacatcacacactggggccttttgggggggtaggggtctaggggagagatagcattaggagaaatacctaatgtagatgaggggttgatgggtgcagcaaaccaccatggcacatgtgtacctatgtaacaaacctgcatgttctgcacatgtatcccagaacttaaagtataatttaaaaaaagaaacaaaaataaaatcaattgaccaagatgtatgggtttatgtcttaagtctcaattctatttcattgatctatatctctgtccttacagtggtaccatactgtcctgattattgttgctttgaagtaagttttgaaaggaggaaatgtgaatcctccagttttattcttatttttcaaaattgatttggttaatctggaaaccaaccaattccatggaatttgaatcagctgatcaatttctacaaagaagccatctgggattctaatagggattttattgaatctataaatcagtttgagggagtattgccatcttaaagattttgccttctgatctatgaacatagtcgtgttttttatttagattttctttaatatctttttaaaaatgttttgtagttttccaactaagttttgccttttttgtcaaagtaattcctatatatttaattctttttgatagtactgtaaatgtaattacttttcgtaatttcatttttaaattgttcattaccagtgtacagaagtactatcaaaaaggcaaaacttagttggaaaactacaaaacatttttcccattctatacacatactatatttcccattcatatagtatatatgactaggaaaaaaaatagtatatataagaattggtactatctgaggtttcaggcatccaactggggtcttggaaaataccacccatcccccacagataaggcggtctactgcatacaaagtgatggcatgctaactgtgacatttgatccttccaaaaatacactgagtaattgggatcattgccacttttacagccagcaaagttaagtcaagcaggggagcaaagtcttggtgtatgttttgaaaacattctgaagtccaatattttttccctttagattccccatgtgaccttagacaagttatttgactctccaaatcttatttcctcatcttaaaatgagagcagttgagagtcgacatttacgtttcctttattctctaatattccattatttttgaattatcctcttttgaggtgtccttctttctttccatatttcaaaaacaattatgttctctctcatgcctaccaagtaggattctattccctcagaatggaaaagcttgccactatgagccagatccccaacacagtgtgtatccctctcatgcaatagtctccaaacaaaccagtttacattagtaactgcacgtaaactggaattaactcagagatttcccctacgtgcttcccaggtgttttcctcattgtttgagataaaacagtcattcatatttgcctgtttcttgaatctgtgcctacattcattgccttgcccctgccaagttgaattttgcctaaggaaaatgatgtttggtttttcacagtaaatcagatggatggatggagagttaagatgaatagctggaaagatgaatggatggatgagaagatcaaagaatggctggagggccagaagaatgaggagatagatgtctgggtggatgggtagaggaataagtgaatgggtaagtggctaagtggttaaaagtatagaggataaaaaggatagagaaatggataaatgggtagagaaatggataaatgggtagatgaatggatgagtaggtgggtaggtgggtaactggatgaatgaatgcatagacaggtaaatcaatatgtaaatataagtaaccaaacttagatgcaataaaaaatacatactcagtcccatcttcaccactttgcactgtgatttgggaagcccccagtttgggccagaatagatttatcacatggttgttccagaggaacttaactttctgtatttttccaacattgagatccacatcaatatcatgcatgtgacttgcatctggtttgagggatcctttgaaaatctcatattgttttgagtttccattacttccatacaaagcaatcctgatgtacccactcactttcttttttccagacagtgtgactgataccttatatctccaactagtaaagttaccactctctcctgtgttgaggaaaaatatttgttcaacggcactggttttccccttaaattggtcagcatagtgccccattttggggcatccttcagctggacaagggaaacagctattcgcctcgcattcgttgcagagttacatctctttgttctgttctaagccacaggaatgcaaaaacacccaaaacagggccaccaacatcttcctcaggcttctggggtaacctacctcccaaaactcattgtaggaggcacagggatagcccaggaagccatcagggttgaggatgctgcttgagtcagggttttacttcttatagcttggtgctctgttgctagatgcatatatgtgtgtaattgttatgtctttctgatgggttgaccctttcatcatgataaaatgtccctatttttctctagcaacatattttgttttaaagtcaattatgtctgattttatttttatttaaagtgtgactctttatacttaaattataactctgtagttgggtcagatgggtcttgctttttattcattctgacagtctctgcatttaaattgcagtgattaatcaatttacattaaatgtaatggttcttatcgtttaagtgtactaacttgctatttcttttatatttctctttgttcctttgttcttttttcttgcctttttggaattaatcaaaagggtttattattattattattattattattattattattattattattatttttggcgggggaatggagacagggtctcactctgtcgcccagactggagtacagtggcatgatctccgctcaccgcaacctctgcctcctgggttcaagcgattctcctgcctcagcctcccgagtagctgggatttcaggcacgcaccactaccgcccagctaatttttgtatttttagtagaggcggggtttcaccatgttggccaggctggtcttgaattcctgacctcaaatgatccacccacctctgcctgccaaagtgctgggtttacaagcgtgagccaccgtgcctggcctagtttttcattttatctcatttcaattttggatttttagctatgtgtcttggttgttgtttggggattggagggaggttttttgtagtgattgttctagggattacaattaatttatcacagtatacacattcatggctatggaggtgtggaataatctgacatatttggaaagtgagatgttctttgtgcctggatcttagagattaatgtaggggttaatgtaaccattaatcagactagagtgatgataatattttcatttattaagtacttattatgtgccaggcactgtggtaagtgttttatacatattcaattaaatcatttcatcttcacaactacccagtgggtagatacgagaaaactaaggcttggtaactttccaaaggtcacatagcaagtaagagacaaatccaggatgaaaatcctagcagacataatgaaggtgaaaagaaaatggtatatttgtattggggtgcatttgaaaatttctgaggaaagacaagatgtgagcagacttatattttaacacaactctgcctgctgaattggaaataattagagggcaccaaaacttggactgagataccagtgaagatactgctgttagagtctaggtgagaaataatgagtgcctaaaataggaaaataaaaaagagggtaaaaaagaaaattaaaattcaagagaaaaatcaatrtgagctgagatgttagtcataaagagagagagataggaagaaaatagagaatgaaaagtccttattttgtgctaagcttaggaagaaagagtagattcaaatatcggttattactaataccaatatcatcagttgcatatgattttatttgttagactgtatactaatgctattggcattaataacattattgttgttgttgttaatgaaactttcattaccaataactttttaaattattattataatgattaacatttaccaagtgttacctatgtgctaggtactattctaattgctttgtttatatgtattacctcatttaattcccataatagccttgtgagttaggtactaatattccattttgcaattgtggaagctgaggtccaaggaggttaagtaactgcccaaaggcacatagctaataaatagtacagccaaatctagtctgaaagtattgatataattatttggcctgtacaatgcttctttttttaaaaaaatgttaacttgttttcaacatgtagacatcaacataacttaaattttttaaagatacatatttctcagcttcttttaaagcagtatgctagaatctggctatactgggtctgctttcccatatggcagtgttcagctggacttaatgagctgcccctttagacagatcataagctctcaagtagaactcagtgcccatccatcctgcttaccttatttatgttacctgactatcccttttgggatgagttacaaaccttaaggcacaagaatacctgcagttctcaggaattgggggctaagacaaacaaatagaagataataaataagataacctataatttaataatacagtcatggttgagggcacaatattttaaagggacagtgacgaactgggaatttttatagaagatggcttacattgaagagtagatgcaaatagaaccatgaaggtgggcttgatccactttataggtaataatactctaataataataatgctcactatgtctcaggcattgtaacaaatgctttacatgcatatatctctttgaatcctttcaacaaccctatggagtatattattatcctctttttacagatgaggaaaatgaggcccatatcactttggtaatttgtgcaagaatacacagctactttttgattcaatgactctgggcttctgattctggytcagagccctttatagtgtagtttcagaaagtgctgaaaatcttcatagtttccatattctctaagaagaatttgtaaactgagtaagtaacagtgttgcagagaacttacaagtatgatttgcctcaggtgttccatagttgcctctaaatttctttcagggaactgttgaataaaagatgagacagatcagtagtggtgaaaaagatcccaaaagttaatcaataccacaggttgttctggattgaaaaggatgtcactgccttatggaaaagctcctaggttcaatgtgtatccagtttcctgtctattttaaagctcagtaaacaacgcgtaggccaatggagacttcactgttcactctggccagtgcatgacctattcctccagccctgaagaaatccagtttccaaaaagtgattcagttaaacttttttttcttaaatggcaattcagctatttatgaactagtttactgagataatccccttaagctgtagaggacaatttatttaggaaagactgtcaacattcttgattcacaaaagtaaaaaataggcttcttaaatttagtttgtgttaattaaatatactatctccattagcttgtgtttttaaaatagtagattgacagcattacctggttgaatgagtataaagcaaaaactctcctgctgaagaatctcagtaaatgcataaacccaggagcttctatgctgactctttagcatgttggattatttagcagattcttggaattattatcaaatattggcggcagagagatttgtaggacagaccaccaggtccagcctgatcattggcaataatgaagagagaagacacaaacagggtcaggggcagggcaaagagaagacttggggtctccaactgctggagggatattcttctctctgtaccatccagccttgagagctttttaaaaatattaacttattttaaatgtgagattgagacaaatctagtatgtttcacctgtatttgtcataatactactagtatgtctccatcagctgtgaagtatactgcaattaacatattaataataaaatagtaacatttgtggattttttgatataaataaagcagagtcaagattatcccttaaatcagtcagagtctcagcaggaagtggatagtacactaaaaagactaatttagaagagtttaggtaaggtagttcacacctgtaatcccagcactttggcaggcaaaggaaggaagactgtttgaagtccaggagcttgggactagccctggcaacatagcaagccccttctctacaaaaaaaaaaaaaaaaaaaaaaagttttttaattagttgagagtggtggtgtacaactgtagtcccatgtagtcccagctactcaagagactgaggtgggaggatagcttgatcccaggaggttgcggctgcagtgagctatgattgcgccactgcactccagtgtgggcaacagagcgaggtcctgtctcaaaaataaaaataaaggaatttaacgaagtgactattcacaaaagtgtgggcattctccctggacataaaacagggtgaaaaaaggtggagcattgagatcaaacgggcaaacataatacctaacacatcctttaacaatatgttaggccaattgcagtaattttttaaaatccaaaatattgggagtttaatataataaagatccaatgtgggtccatggaggaaataggtgactgtgtcccatgcagtcattcagaaacccaagctctttccatgaactttctgccatggcctaaggcaggagtcagcaaacttttctgtaaagggccaagtagtaaatactttggctttgtgcgtctgcctctgtcacaactacttatctctgttgttgagcacaaaaacagccatagacaatacttaaaggaacaggtataactgtgttccaataaaattttatttacaaaaataggtagcatcaagatttggcccagggggccatagtttgccaatccaggcctaaggcatcataatcttccatggaatcctttacatctgagggcagataagaaaaaagagagtatgtggaagattacatgaatagtttttatggatcatacctggaagtggcatacaagaatcctacccgtatttcattgtccagaactgagtcatgtggctgcatctaacgtcaagtgaagctggcgaatataatctatgtgcccagaaagatgaaaaaactctggcaaacatctggccagcttctatagcttaaaatttcctctaatttccttgctgtaagccaacttttcctaaagggtatctcatatatacaatacatgtactggagactttttagggaaaaaatgggttctgagaccatatatgattagaaataatatttataggttctttcttcatattgagattcacagtgcgtattaacatatcaaaggttctgaaaagtcttatagtgtgaaacaaagaaacaaacaaaaagctccctaaaatgttggtgaacactattttataataaagttactgatgctcacttgcatttggagtgggagatgaagggagtagagtccaggcagtgctggggaaattatttatgatcccatatatttgcattggaatttcttgtgcataaaaactttttaaaatataaagccactacatgaaaacattttttttttaaatttcttcacatccttacctaccacctacacaaatggactgcctactttaatttctgaatattgttcatatgcctatttctgactagaaagttgagttagagctttttttttttttttttttttttttttgagacggagtcttgctctgtcgcccaggctggagtgcagtggcgtgatctcggctcactgcaagctccgcctcccgggttcacaccattctcctgcctcagcctcgctagtagctaggactacaggtgtgcatcaccaggcacaccaccatgcccatctaattttttggtttttttagtagagacggggtttcaccatgttagccaggatggtctcgatctcctgacctcgtgattcgcctgcctcggcctcccaaatgctgggattacaggcgtgagccaccgcgcccggccgagttacagctttttaaattctcctcctccccttaactattattaagaaacacccaagaatgatcaataaatacttaaaaaaaaaaaaaaaagaaattttttttctgtacagagaaagttgaaacatccatttccatgtttgggatgagagaagattatttatgttattggagaacagaagattatagactgtcaataaacttttacttttaaatgaataaataatacatgacaattcttttcacataaaaaaaaaaaagaaagaggaagacctctttgcagttgagataagaggaaggcatctgtctcctgctcatccgtgggcaatggaatgtctcagtgtaaagcccaattgtatattccatctactgagataggggaaaaccgccttagggctggaggtgggacatgctggcagcaatactgctctttaatgcattgagatgtttatgtatatgcacatcaaaatcacagcacttttttctttaccttgtttatgatgcagagacctttgttcacgcgttttcttactgaccttctctccactattaccctattgtcttgccacatccccctctccgggaaacgcccgataatgatcaacaaatactaagggaactcagaggccgcggccggcgcgggtcccccttatgctgaacgctggtcccctgggcccatttttctttctctacactttttctctgtgtctgtttcttttccaagtctctcattccacctaaggagaaacacccacaggtgtggaggggcaacccagcccttcaaatttacatagagttaaatatacacatattactctgaagataaaccttaggtgtaagaaaagtattaagtgagagtgtttgtgtgagtatgagtttgtacatattttcagaaaaaaagagcaataattgcaacaaaacaaataaataagctgactaatagaaaactaaacacctcaaaaatgctgaaagcaaatctatactttttgttttgtcttgaattcctttattcattttattttattttattttattttatttttttgagacagagtttcactcctgttgcccaggctggagtgcaatggcacgatcttggctcactgcaacctccaccttttgggttcaagtgattctcctgcctcagcctcccagtagctgggactacaggcaggtgccaccatgcccagttaaattttttttttttttgtatttttggtggagactgggttttaccatgttggccaggctggtcttgcattcctgatctcaaatgatccatccacctcggcctcccaaagtgatgggattacaggtgtgacctgccacattcagcgtgtcttgaatttattactgtaaaatgttatggcttatggttcagattctccctagaatctgcctattaaagcacaggcatctttgtcttcagaaataacactcttgagtagaacaataaaagccctcttcaaacagaaaaaaataatcatttttaacacttattttaatgaaaatttaaccaacattgagtaattggatatatttttattgttttatgtgtgtgtgaatgtataaaatggtacatacaggaaaaataatttaagccagaaaaaagatgtaagttaatatttgtaatgaatgaaactggagagtagttaattattagttgcagataatatcctttgtttatgtagataacaaaaggagcagaaagactattttaaaagtttatttaggtgggtaggcaacattttaagataataccctggattaccagtctgttgcacacctgctgtgtcatactttcctcttcagtgaaaaaaaaatgtgtgactgtgttgggaaatcactcatgaaattaggttactcatctgttgactttgtgtttatcaaaacggagattattctgattgtgctaaacttaatcacaggtgcttctaagagaaagagacacatagaaaaaaaaaaaaaaaaagatttagcctagggtttggagtatggttgaggctgcagctgggaggcaaatggctccagacgtgagaactgcaaatgttagaaatcaggtagagagctgacctacatattaagattccaggagaaaaggtagtttggaatagataaggacacctcttttattcagaatccaaaaagagtattaaaaacaagaggttggtagcattttccaagaatcccagcatcatgtttccaaactctcattgattctgattatagaagggttttccccaggtaactcagaaaaaaatattttaggataatactctttctttcatcttaagtcaaataagtaaaaattcctgagaccagcaatttgcatgaggtaggttgattgttatacagacccacacaggccagtgtctttcattatatactacatttggaaaaaataaccttaattcctgagataagcaccatcaaaatgattgaaaaatctacagtccaaatcattcacttcttaatcccaagagatgctcttccccttcaacctagctgagtgaagaaggcacttccctggagatggcaattagattagaaagcctggagccttccccttgattacttaaaatgatcctaagtccttgagctagcttagatggatgttaatggtttccaggggacagacaacttagaaaagacaacttcattgcacttctcttttccgtttacttacttaacgccttgaaaatacttttctaaattttattaaagagactgcaagcccttaaaaatgaatcagagcgctctctcctgatttcaaatagctgaatgaaattctgccaagtgccgataacaacaatccttctgtgtcatggatggtcaaccctgactcccacacccttaaagcaagtgtgaagtctaatcagtataatgacaaagtagttattaacattttgaaaaaccaccctaaattgctgtacttctatgagttatattggtagattctaactctttttctttggccagattgcttgtctagggactttgtgattaaaaaggcaggagattatttacgaaatgaacaaatgaggtggttgtttactttaccaaagaatttactcactcctgagaaccttctctgtgcattgaaaataggacgtgattgacagccccttttaaattacctttgaatactaaaatgtcagccaaacctgtattttaggttcaattctgttagtggtttatgagcattaaaaaatgtgttaaatatttcttccgtggttattatattccttggacagctttaggcccccacatgtctcttagcctgccttagtttccccattgttcaagtgggataataatactttttttaccccaaagaggtgatttgaaaattaagtggtgaatgagctgctttgaagatgaactgccatgttttcctggttcctttgcttctagattggctcattttgctacggcaaaaatgttgtaaatatgccatgctcagttttcacgttagcatacactcttgaaaacaaaatttgcttaaaatattttcccacttctctgcctttggtttgtggggctttgggttaattagcatcctccagctcttatctaagcctttgctaagggctaattaaccagtgtatactttgtcaaattctaatgagaactgataaggagtctttttagcctgttttattttcttttgggggaggatatattcttttagcaaacatttgtgttttttgcaaggagacaatgtttgttaatttaaccaatgtttactaagcatctttaaggccttttgggggacacaaatgaatataaaaggaaaacaattttaaaggagcaaaggatctgaggaagttaagctagttatagaaatctgtaagccacaaacattatgcatatgtgtgaagagactctagagtaaatgagcactgaagtgggcttaaggtgacaggcttgactgatgtagaggccctgctttggatagtaatgaacaagatgaagtgtgtaggatggactgggggctggggagatataacaggcttaatcaaggaaggagagagacataatcagggatgggggtggagtaacagggacagggagactggagggaaaatagtattgcactgggattcaggagacctgggtttagtcctgatgcaaacttcaccattctgtagctctttgacctttggcttgtcagttcccctcttcaaactttaggtcacgccctccacaattcagggtcagcactatgcaaaagatttccaaggaaggcattctgggatttgaaaacttcctcaagagaagtgagctttaaattttaaattcagtcaagctctcaagttttcagtagacctcacggctgaaaagaaagagattacagaagagagggatggaccttatgaaggcccctttatttgtcttttttccctttgtgtgaagaatcgggtcttgctatgttgcccaagctggtcttgaactactgggctcaagcgatcctcctgcctatgcctccctaagagctgagattacaggcatgagccaccgtgcctggctgaaggcccatttattaaggcccagaaccagcataaggaaaagccatatgaagaaaaaaatatatgagacagaaaattttgtatcaaatgcattagatagatatgtggaaaagagttatcatgtagtagaaaaaaacacaagctttggggttgaatagacctgtctaaggtatgaatccacttacccacttagttgtgattgtgatttcaagcaagttccttaacctctctgaacaagaattttctaattattaaagtggaataataatactacatactaaatagggttgatttgaagacaaaatgaattaatctgagcaaagcacatgtggcttaccatagcactcaataaatggtagtcattcatagcttccaattactgtagccctcgtttgcctggactgttttgctagacaaattagcctacacaaaggggactctttrgctcctccttagagactgagcttttatcatcttgaaatcgaggtcttccatgtcagtttacacaacagcaaccccctccctctgacactcttagacttcctcaacatccctcccagaaaactggttttgaggcatctctgctattttcaatttgtcagtatctgaatctgcctggtcccaatcagtctagatgtggagagttggactgcattcttattttccaagtgcctttgattttattcttgtgaatgtagagttttcacagagcactgaggaaggcaaacagcccaatcacccttttcttcattcacaggggcttattgggggcctctgctagggtaaagatttcagttctgttactcagatatgttaggcaaagatctgtttggtgattagttttgattagataggagtttcacacaaaagggggcttgtgcatttattgtagttactgagattwagggagctaggtactgctgtgggaagctgccccattgaaaagaggggccattctttgatgttgagaggcccggccttccccagtgagaaaaatgactgttagtctccctgattttgcaaagcacttgaaaagcgctttaaccaactccttagctttcataatgcttgtttacaggtaggggtttaagtctgtgcaggggaagcaaaatggagatttcatttttcttgtttcccatgatctcagcggcagctcaacttttttcttcctgcttttattctttctcttttttccatcttttacacttaatcacacactcttctttcccaggtcctattcaggtctttttttttttttttttttccttcatattggacctctgtcatgctacattgatccaacccatacctctccagagcactcacacactttatttatgtatttgtttgtttgtttgtttattgagaaagggtcttgctctgtcacccaagctggagtgcagtggcacaatcatgggtcactgccacctcgacctcctgggcccaagcaatcctcccacctcagccttccaagtagctggaactacaggcatgcacaaccacactggctaatatttaaaagagttttttttttttttttttttttatagagacagagtatttccatgttacccaggctgatctcaaactcctggtckcactcaagtgaaaattaaagtatatacagttgtgtttagaatttttttaatgttttaataagctacaatacatatataagttctaatatatatgtgcaaatgtttgctggtggaatatgcaagaaactggttatcaaaggtttcttctgggctgtcagctagtgggagacttttaatttttgttttgtacttttttgtacagtttgaattttcttaccatgttcatatattgcttttttaaaggccaaagggggtttctggaagatgaattatcattcttttttttctttttgatgcttttctatattaaaaaaaacacaatagatgttattttaaaaaggaaatcaataagacagaccctgtctcagtagagttcgtagtgaatgtgataaaccagagaacagatgctttactagatccaagaatagaggtttgaacaaagttctgaggaaagcatggaggagaaactggttccatttctccaaaggtatcaggaaaatgtcacagaagaggtgacatttgagctaagtcttggtagagcacaggacattggtgggcaacattccaggaagaatggatggaccatacaaaggcacagtggtgtggaaggccatcgtttattcaaagagtgtttattgaggttgaagacacattaatatgtgtctgcaggtgattatgtaagggagattggtaagtaataacaacacatactatgtgctggacgctgggctaggagctttaatttctccacctctaatccttagaagggtgttcaggaatctctggccttaagaacagcagcagtagtagagacagcagcagcccagagtttggatgtggaccaaatcgggttgcaattatagcaatttggtctatctaatccttccttaaagcactgtgttgaggttttagagaagctatatataatgtccttgatgtatagtcagacctcaaaaaagttagctgttatctcatcattaccattccttttctccaaactccagcttagtgctgcatatacagtagcaaatccctacgactgaatgattgatgagagagttgattaaggtatatggtaggacatgatatgacagggatctcacctcctatttctccatccggtccttagtaccaagaagtcagaacattttgcctaagagaacctagtacataccatctctgaatttgtgaggaggcagagctccaggtacttgaagaaaataaagggagttgtatattctctctgtgaagatgatcacccccaaggtttttagactacatggatgacagaataaaaagtaaaaatgaaaaaccatcaacacaaaccaaatttaagataatgtctcttagcttcaataaacaaggcaggataatgctaacaccaacactgaagcaggaagaccctgaaacatggctgctttgtagtgtcatgaaaattaaaatgggagttggaagttcccactttcatcttttagctgtgtgatcttcaacaatgttatttcccccttctggggaaatggtccctctttgttatgggagttaagattggattagagttagagtcagcaaactgcagccaaatccagtcggccacctgtttttataaataaagttttattggaacacagccactctattcatttaactaatatctgtggttgctttccccctgcaacagcagagttgagaagttgtgacaaagactatattgcctgcaaagacaaaaacatttactgtttggccctttacagaaatagtttgctaacctctgattgatgtgtaaggtcccttcctcctctgacaatctgtgatatgcgtactgctaaagacttaatgtgtcagaccatttgcaatccttaggttcacctggaaacctttcatgaaatttggaaatactccagaggtcccacctgtatgtttattattttgtttttgtttattattaatccaaaaacgttttaaggatttgctgtttgctaggtacagtgatagttctgggttgcaatggggagcaaaccagacatgatcctagcagtcatggagcttagagtcttctggaggagacagtttttaacagaacctcctcatatctttcactttggaaagcaaagccaacaaattatttcatggtaggttgaactgtccaggtttacatttgggtttatgaacacctttattcattcatttattagtttattctttcattcattcaatatatacagtcatgcactacataatgacattttggtcaacagtgaaccacatgtacgatggtagtcctataagattataatggagctgaaaatttcctgttgcctagtgacattatacccattgtaacatcatagcagaacacattctttatgtgttggtcatgatgttggtgtaaacaaagctattgcactgccagttgtataaaagtataacacatataattatgtacagccatgatacttggtaataattataaactactattactggttttcgtatttactatactattatcattattgtaaagtgtactccatctacttctgaaacaaaaaagtttactgtaaaacagcctctgacaggtccttcagaaagtgttctaggagaaggcattgttatcataggaggtgatagctccatgtgtgttattgcccccaaacacccactaggatgagatgtggaggtggaagaaagtgatgttgatgatcctgaccctgtgtaagcctaggctaatgtgtgtgtttgtgcctgtgtttttaacagaaaattttaaaaattaacaaaataaaatattttagcaataaaaaaacttatagaataatataaagaaaaacatatttttgtacagctgtacagtgtgtgttttaagctaagtgttactataaaatattcaaaagtctaaaatattagaattatataaagtaaaatagagtaagataaagttaacttattattgaagaaagaaaattattttatacagttagagtagcctaagtgtacagttatagccattgtaacatcatagcagtggtgtagtgtttatgaagcctacagtagtgtactgtaataccctaggccctcacattcactcaccactcacttacccactcacccagaacaacttctagtcctgcaagctccattcatggtaagtgccctagacagggatataattttttaaatcttttataccatatttttacagtgccttttctaggttttgatatgtttggataacaaatacttacattgttttataattgcctgcagaattcacttacatgctatatgggtttgtagcctaggagtaataggctatatcatatagcctaggtatatagatagtaagctataccatttaggtttgtataaacctaaatgaaattgcctaacaacacatttctcagaaggcaccatggtggttaagagacatatgactatatatataaagtacttatgtgctaggtgctgggctgggctagatggaaaaatatactaatgaaaaaaaaaaacaaagtttctgttctcatggaccttagatacatattaaattttaaaatgacaaataagtatataattatcaactgttataaatgctctgaagaaaaggagcatggtcacatggcaacaaataacaagggaataagatctagactgatgacatcagggagaagcattccagctaatatccgaaggatgtgtaggaccagtaaatcgagatagtagtactgataaytgtttcctttcttggttgatgaaaatggagcttggaaacatgtaaattagtattttttcaatctgaaggttgaaacccattttgaaaaaatcaattatatggatcctgaccaacatttgtttcctatgcaatagaatggaatggacaagattgaaatagaatagaatgaaaatttccagttgttttctggaaataattgttttgtaaaactatgtaaaatgcatttcctctcatcgtgggcctcagtccagaaagatcactgacccaaaagatctgctttggctctatataattacaatttgtcacatagataacagcttctccaggttcctgtctttaagammcgagggtatgttctgcaggtacttccaagcttacctttgtgctcttttcagagtaagtgtaagagtgagtgagagaacaccagccaccatttactgagcacctactctgggaccagacagtgcacaaagtaccttttgtacattataccatttaatcctcacagtaatcctatgaaataggcacaattcatcatctcattatcagataatgatatttgaggttcagagaagttaaggcactagcccaaggccacacagccagtatatttttttgcctacataattagtaatgaaataaacacaaactcaatttgatattctctgaactttcatcagatttgatagaaattaatcaggtttgaaacactggttgagaacctgctagatttctaacacttgtttcatgatctgagttccgtagagcttcaaattaagtctatccctcttctcctttctagaaaaagtattttctaattcctgagctgctttgatggaattttaacccacttaattccaatgtggccaaacacattgtttgcaactgaaaagaaagaatgacactgatgtcatacactattagtcccatagccctgcagatctccaaaaaagaatctgtaaagaagggaatttggggaacaatagactcctatagggtcacaataggcaatatcagagtgatcagctctccaggctgggagatataaataaaaggtgcatggcaagtgaaactacaatagcaaggcctcagggagcagagtttgatgctatcatttagagattggaactggttccatttaattttcctaaatgaaatatattagcaggtgccaccccacatttttactccagtaatttcattcttctttaacatacagtgagaatggtagggggcagggagaaacccctcaatgactaaatagaaagaaattaatagccttttgggtcagagaattataattctgaaagcagattttccttaaccagataatgagctgcagttaaagagaagattggaataatgtgaagataatttcataagtgccccttttcaggaccctctggtttaaaggggcaatctcaacatgatgtgatgcaaaatcactttgcagtggtagtgataaaaattggttttggtaccgcctctaatccaaatttggataaccttgagaaaagtaamttcacttctgtggagcctcagtttcctcatcgtgtaaaatggggatgaaaacaaaacacctggcccaactcagagggttgttgggaggatcaggtggcaaatacataggaaaaatatgtctcatgaactggacatttctataccaatataaggtatgagaatgatacatcaagttcttgcttaagaatgtacaatataaagtccaaactcctcagaagactttttgatgcagctaataatctgatcccacctaacctctctagaattatcactaattatgcctttattagacccctctgctccatttctgtggttttcttactctcctggagatactctttttcctgcttttgttactttacttatgctcttcttcttgcttaggttgtcctttccatctaactaaagcaacttggaagtgcacctagcttaagaagtgccccctccaagaaggctttctacaccttcatcactactcaaaatatgatcctcacacctgactattagaaatgcagatcttcaggtcttgcccagacttactgaatcagcttctgcattttaacaaattccccaaatgatttcttggcacatagagtttgagaagtgctttccagcccacattcgcttctcccttctctggacttttagggcatttagcagtgtctgtcttgctactgaaaactattgttttcaactttgagattgtaggcacttgggaggcagctatatatttactgattttgtgtttaagaaatttttttacctactttcaataccacagaggtttattatgggtcttctgtgtttaagccactgtgggtacaaaaaaatgagtaagatgtagtgcctaccctaaagggactcaaggtctaagaaatggagaaattgctttcttgcttatttcattgcttccttcctttcatctatccttcaatattttataaacattactcttatttcagacacagcactagttgttgggaatttgaggatagctgagacaaaacctcttattttgggtctagtaaaaatrcatatgaccataagcaagtaaatttacatttgttaatgctgtaatagtattgccttgggagtgcagttgagtgattgatttgggaaatgaagaagtagaaaaggttacagaaagaaattagagttgaatttggaagttgagtacgaaccctcaggtagacaggggtctcccatacagagggaagagcatgcgcacatacacactaaatacatactatgttttatgtttagggaatgttgagtcattaggtgtggtgacatcatggaatatgtgtgtgttctggggcaggggaagtctgggtggctagaaataaggctcaaaattaggctgggatattccagcactattcaccatagccaagatatggaatcaacctaagcgtccattagcagatgattagatgaagaaaatgtggtaattaatggaatactattcaaccagaaaaaagtggtatacaatggaatactattcaaccataaaaataatgcaataatgtcttttgtagcaacatgaatggaactggaggccattatcccgagtgaaacaactcaggaagtcaagtaccacacgttctcatttataagtgagagctgaaaaatgtgtacacatgaacctagagtgtggaatgatagacattggagactcagaaaggtgggaggggagtgggtgatgtaaaactatttaatgggtacaatgcacattgttcgtgtgatgaatacactaaaagcccagacttcaccactctgcaatatatccatgtaacaaaactgcacttgtaccccttaaatttatacaaataaaaattaaaaattaaaaaaaattaagccaaaagtcacattaaacatgtcctatgtaacacttaccacaataaggaacttaggttggtttttttcctttcattagacaatggggagttctcggtgattttcagatctattatctcatagcaggtgctcaataaaactttcttgaatagattgtggaaggagataaaaggttcttctcaaggttgtaggcaaagtgttctttaatttactctgaaatgaagcttgttaagaggctactgtgggccagtcgtggtggctcacacctgtaatcccagcactttgggagccctggatgagcagatcacttgaggacaggagttcaagatcagcctggccaatgtggcgaaaccccatctctacaaataatacaaaaaaaattagggtgtggtggcacacacctgtaatcccagccactcagaaggctgaggtgtgagaatcgtttgaacccagaaggcagaggtttgcaatgagccaagatcgcaccactgcactccagcctgggtgacagagcaagacgccctctcaagaaaaaaaaaggtggggggctactgtgatgagagagggaaatatgcctaactatgcataacttaattaagagacttccctatcagaatggcaaaatcaaagcacaactgcaaagcctcagaacaaattgatctgaataaaatgcaggttattacgtcatccaaacccagacagaatgtctgatataagtgaagaatctttgaaatccccctttacaggtagcaggcctgtgagtttctggaaagtgaaggcagaagtacatgcacatggttttgttataaacttgcagctgtgaagaaaaacaattgtgcttaggggtctggacaaccaacttccaagccatgctcttctacttactagtggtgtaatttggggacaagttatacctgtgtttgggggctgaaaatacgcccctgctactttttatttttataacctgctttcctatttgaggaatcttgtatgaaaccaccagggcaaatgtggtattatattactaaatgcccactagattctttgcaggaatttactgactcaacttttgaggaagctctgaagaggtccacatatagagatttatgagcaattgtagaatgccaattgattcatagaatcatggaatttcaaggctcaaaggaaatgtggaagtagtatcgcttttacctcaccaaacctcctctataatattcctaccagataataatcttgctttgtgtttgccccttccagtacgacacacatcacctccagctacatacagtccactctctcgtgtgctagtgcaattctcctcagccactctgagttttagcagttccatccttgttttgagctactgtaatctcacattgcataaatagaagtaaaaatagcacagtatctagaccaggagacttcattgtcttgaattcttctgcactcaagggtagatcatacctcaaagtttaaggatggctctggggcatgaggtttagcacatatgtaaagcaactgagttgtgtccagaagagagtggcttaggacatgagggcacaggtgaagaaagtggggctgttgagactggagaaaagactcctggacaggttagctgtgtttaaatatttgaagggctgtcatggggaaaagggatttaccgtgttctacattggcacaggactagagctaggatcaataggttgaagctctaggaaataaattttaattcaatataaggaaaagctgtctaatagtctgagttctccaaaggaccaataaataggccaccttgagagggaaggagtacccagtaactgcagttatttcaacataggctgaatgctttttaaaaggacatttttggattgggagcccagccctcatggacccttgggtggatcttgagatgttcccaaggaaccttgatgttccctggaatcacttgaaaagaagtggactaggcgacctttacagcccagtttatccctatgagtacacatcaacatgcctgtgatccagtttatatatcaacatgcccatgatcatgtattaacattttacccatctgttcaagttctaccttcttgtaacctactcctttttttaaaatgttttgttaaacttattgtaagaggaaagatccaagctgtctaatagattgtattccttttggcctggagccaaatgacctgtgaccactccctacaggcaggcaaaatagttattagagtaatatggatggtatgttatttcactttctattctcttgagcacacgtgctctctctgtctctgtctctgtctctctgtctctctctctctttctctctctcacacacacacacacacacacacacaaactagtttgatggaattgagatctagagatgccaaatgacttgtccaagttcatatagctacttaatgttagatctaggaatggaaccagaacaatatacgttacattattaatagtgtgccttgaatttctgatgagattgtaagccctttttctcctctaatatatgctctaaatacttacagagttaattaatttagaagtgtgtgtttgtgataaatctgtagtttcaagatatacaacaacatctgatggtatttatgactccttttatctcaaatcagtgaggtttcactggcctcagaagctgtggtgatcttaatacatgagacttaagatgactatgggcatgcctgttgctcccaggctctctcttgtgaaaagattctgggttgttctttatgtatactgtccacgttttatgacttggaagttccattcagcttcctttaaaatcccttggctaaaatcgaatgttgtcccagggatgacttagtgcactgggcctaggagagagggcttcctctcttggatggctgagtagttcctttaatctatttaccacaagtgttcattgctctgaggctctgggattcttcaggatgaaagccctctataartatttgttattgttatgataaccagtatggcttcctgagtcagataaatttgtcttctggcttctgcttttcatagcttccctccctatccttttatttctctctccagataacttttgtattggggaagtaatctatttgtgcagttaattaagctgagtgcaatgtgatagacattagtgactgtccaggttgtgactgctaagggatgaaggccttagagctgagggttcataccataaatatatattttcatcaaccagagggaaaaaaatccttgaaaacagaattaaaaatgatagcagaagaataattaaatattgcatggaggggtcatggggactggtttccacaaaattaaaaatggtaaatcgatgtttgcaatatcctgtagactatcatcatgatagctctgacttccagcctcctctaagatgatagtcagactctttacagggaacacagccttccctgatctgccccacgctaatttcccagacttactcttcactctaatgaatcattcccattcctccttgcttataaaatgactccacttcttaaaagaaaacccccggtccttcaaaggttaaagtgttggccgggtgcggtagctcacacctgtaatcccagcactttgggaggccgaggtgggcagatcacgaggtcaggagttcgagaccagcttggccaacatagtgaaaacctgtctctactaaaaatacaaaaaaaaagctgggcatggtggcaggtgcctgtaatcccagctactcgggaggctgaggcaggagaatggcttgagcccgggaggcggaggttgcagtgagccgagattgtgccattgcactccaacctgagtgacaagagcaagacttcatctcaaaaaaaaaaaaaaaaaaggttaaagtgtcaactctcatgaaactgccctgactatactaatcgcaaaacatcaatctctctactcctttttctgaaatcctgtactcctctctgcattctcatgtggcatgtcatagtttggggaagtaaattctggtaatcttctcaagtgagtcattcttgtctcccaaatattatcagtttgtaagctcctgaaagacagaacccaatgcttctttatataatgtgtccttgtattcccaacagcaccttttgcatagtaaatactggattaattgkttagttgataacttcatgtttgaggagagtcatagttgaacagaatggaaaaggaagactcatagttggatattgacaagaatgaaattatgtggggacctcagccattgagatgaaggaaaactggatagatccctggagtttcggattatttagcagttgggtaagaagattagwtggtagtactgcacagaccaaaacatctggttgcctccaaatatgatcaacacagctgttggtgtacttagaattacttctcttccaaggttaatgacttttgtccagctgtgtccagtcttctagcagctactcagaatatagccattctggatcacatctgttgactctacacaagtaagaaatgtacacggaacttctttatttctttaactgcaaatatgttatgtaggcggtattaccctgaaacttatacttcctaaaggcaaattatggcagcccctatactttaactttcctgaacatataagcatttaaaatgaataccatatatttgctcactcacacctgtcccccactgtcttgaattctgcaytgatacattgttcccacttcaagccaagaacttgtttgtattgagtcctgaaacacaaagtaggcacctagtaggcacttaataagttttggctgatttaattaaagatctgctaaatagagtctaaacaccaaaccacctgtatttaattttaagaagaaatgaccagagatagacataatcatgaatctcctggtacaggaaagagtattacaggaatagtgtagacagttatccttcattaccttgcaagacaggataataggaaaaatacctgcaattgcagcttgcctgaattagataagaaggcaatattagcagaatgattaaaaacaaggactttggtgtcagacagatctggattagagtcttagctcccgtcactgattagctgtgtggccttcggtaatttacttattctttggccctcaattgtctaatttataaaatgaggataatgatatggcctaccacatgggattggcttgaggataaaataaaatgatgtaggagactttcacattttttacgaggtggagaaggagccagtggagaataaaaggttgatgatacaagaaagggagagaataactgattggcaaggacttggagataatatcttttgaacactatggacagatctgctttcagaatggtttggaattcagctctgtcttgaaccatattcaaactacttatctctagtgcagatccggtccctaggactctgaagctcttttcgatgtactccctctccctcatgcctgctccagaagcaccaccctctagaaaggatcaggactcctagctttccatttcagccaccttattgtacccataccttaccttatgttatgttgccagcttatagacagaattcaaaagaaaagactgctgaagaaagcctttgctttattatgtctgcagtcttctgaagttaaaaaaaattcagttatatcataaccaatagaatgggaagagaaaaatttttaaaagtcattatcagccaggcacggtggctcacgcctataatcccagcactctgggaggctgaggagggcagatcacctgagttcaggagttcgagaccagcctggccaacgtgaagaaaccccatctytaataaaaatacaaaaattagccaggtgcagtggctcacgcctgtggtcccagctactcgggaggctgaggcaggagaattgcttgaacccaggaggcagaagttgtagtgagcccagattgtgccactacactccagcctgggcaacagagtagtgagactctgtctcaaaaaaaaaaaaaaaaagtcattatccttgaacttaggtcttcttagacgttatagctaaagcaaggtagagccatactagtcctcaaaagaattcttactattttcttagttactttacctgtcagtgttcatgcttccattcagtaaaatgcctacagctgtgcctggtattggaaatacagaaatggataatatactgtccatgctgtcaaataatttgtagtctgataggggagacagaagaggaaaattacagttcctatgctgagttctaagtgctgtgcagcaccaggggtgctgtgtgcatctggggcaccctacgttttggggaaggtgtcaggcaagacttcttgggaagcctgagggctaatgatattatacaagaataaccttgaatctgctttcaactcttggcaaactttggtactttagcaattatttgtaacaaattatttggatatagcttacaactgattttaacaggccgatgatgtgttataagggttacaagactataaaatgccttcctatctgggttcccagtcccaagccatccctattctaggacaacatatacgtaactgctagagttactctcccaaaagtcctccaagaagaagtgtcaagttggagttatccaagagaagggggagagggagaagcaaggagaagaagaaaaaggcatactgggcaaagtaatatcgtacacaaaaggcaaggggtgaaagaggggaatgtgtagtgtgtagtgtaaagggagattggtggaagtgacaagagaagttcagagaatcagcatggagggacacgtatgccatggtaaggaagttggattcagttctacaaggtaatgagaaatcacagaagcagtttttttaagagtgaccatctatctatgtgttatcactgtcttacctcagtgtttgtcaggtggggaaactgaggccagggtgtaagcagaattttatcaaattccaggttggagtggtattttagggccaaagctgagatggagtcaaaccatttcatgcctttactgacaagccacctagctctggtctagggactgtgaaatagtaagcagagaaggcttagacttatcagtaacaggtttggggaatcatgcatagtcttgttcccagtgtgtataatgataagactctgccagaagtcttctagctctaacattccttttctctcttgtctcagtcctgtgtattttcaagctctctacccatcattgtaagcattcactgagtgaattatctatatttgtctgtttgtatatatgtatgtatgttgagaaggtaatactagaaaaaccaaactgctaaaaaggaatagagaacagcctagaaagaggtaatataaataaaaagcatttagggttcgaaacatttcttttttctactttaaatgcatggaatagagttttctactctttgttgttgtatcatgaggatgatgaattaatgtctgccggcatttttagcttttttttttcagatgaaatgtgcttcttctgctcttattattctaatagataaatattacagatgaaaaattccaggaaaataaagaatgatgattacatccctgaactgtctgtattgatgacttgttgccagtttcttcatacttatcttaaagccatttaattaaactttttcttggagaactctttcagtaggtgatagaaacttggatttacattgtcatttatgtgaagggctaatattcttacactgtggtatttcctgcctttttttcagacatttctgcctgttatggaaaagtttaagtcttggggctcaggggtaacttgataaatcaaaattccatgtttcaaatctggctcaatatgaagtgagtttttcacccttcaaacctatttacttcctaggagcctagctactggtttagccccatatcttcctaggctgcttcacaatacttttcagcctttgttatgtaaattccaactcttaaacatagattcctatattgtttgaacacctcccctcccatatggttaagacagataaagactttcttttttttattttattttattattattatactttaagttttagggtacatatgcacaatgtgcaggttagttacatatgtatacatgtgccatggtggtgtgctgtacccattaatcatcattctcagtaaactatcgcaaggacaaaaaaccaaacaccgcatgttctcactcataggtgggaatggaacaatgagaacacatggatacaggaaggggagcatcacactctggggactgttgtggggtggggggagggggaagggatagcattaggagatatacctaatgctaaatgacgagttaatgggtgcagataaagactttcaagcaagatcgcctaggtttcaatccttgacctgacatttactagctgtcaatcttaggtgttttttagcttctctttggcttagtttcctcctctgaaaaatggggttattagtagtatctaccttgtcaggttgtaatgagaattaaataacttcactacgtaaagcatctgaaaagtgcttatcacataatcaatattattatctgcctgctaattatctgctgattttgttattccttctattttgtatttgttattccctcaatttataactttctttcctaagagttttgcatggctgactctttatcatcaggcaggtgtccattcaaatgtcatcccctcagggaggcattccctgtccacccaatctaaagtaggtccctccctgccaggctctgtcatatcaccctgtgattgccttaattgttcatgtccaccatctgtaattatctagttttttatttatgtactatttgagtactttcaccagaacataagctccatggggccagggaccttgtctgccttgttcaccactgtaccaaatagcatgtggcaatgttcagttgaaatgcattgaatgaataaacaaatactgtgattccattttctgaaccaaagccagtgcaccttgtctgtcaaagaacctttatttgtgtgcttctaggtgtagaaactactggatggtatattttggattataaaaatggaaacttcttgtacatttttgatagtttaggtggagacagcactgagaatgtcattagaactggcttggaaaacccattcatgtgatctctgtaatgccagtgtttcctacagtggtccttgcaaaatgggtacccgatagtgttagtcactccctcctcttgtcccttgggtctccttggatggatctggacatctcaaggggtatgactttgtaatttttattttgatgtctctagagcacttagtacagtgatttgtacacagtgggtgctcaataattgtccaccctgtgaatgaaccttctctttttctttaacatcacaacttcatatatcaacgaggtgtggaaagaaaagagacaacttacgtagggttgtcaagagttatgacttatatttgagggtttgaatagcaaatacactaaaaacagccaatcacctaataagagattgtctaacccaggccctagatacttctcaaagagaccattgtttggtgacttcaaggtgggttccctgtcagactttcaggttgccataragatgacatgtttttcttcctaaatgatatttgcttgtaatctcagaactctgttcaggaaattagcacaggttatttgggagtgagaaaggagtgactatggcagcttcgagccttgctacctggtaaaggcctagtttgctaaatgaagtaaaaaaaaaggggggggggagggatttaaactgcattctaaggaaaaggttagagttgtgaagcctttcttttcccctactgtgaatgaggaggtgatatacaaagaaagaagaaagagttccaagtcacagggttcaaaattcagggctatattatgcctgtaatagttgttgccacagaaaatgggacttgtggaaagaaaaagttatcatcagtatcatctaataaagcacttatagaaatgtactgagcaccatggaaacattttgtggtgtctggtagttataatttatcttagtatatgcttgttgagggaagagaccacattttaccattccctttgcatccggtgcagcaccttaacctgtctcatctgcaaggtctctttccttttcctcctcccttgtattaatctttctaaattactcttctcatagcgtcacttattttttttttgagatggagtctaactctgtcacccaggctggagtgcagtggcacaatctcgcaatctcagctcactgcaacctctgccacacgggttcaagccattcttgagcctcagcctcccaaatagctgggattacaggcacatgccaccatgcccagctaatttttgtatttttagtagagacagggtttcaccatgttggccaggctggtcttgaactcctgacctcaagtgatccacctgcctcagcctcccaaagtgctaggattacaggcgtgagccacagcgctcggccagcatcactttctatcaaaacatttaatggtgcctccttgtcagttgaataaaatcaaacccttaagcctaacactaaaaccctttcaagatctatctttctagcttactttcccactacttccataatatacgctaatcycagacatcctggagtacttatcttgcatttcctgtatatgccctgtgctcttttggtttgatctttcccaccacctcctcctccactgaatgtttgcttatgctgttccttccctctggaatgcctctccctcaccctataatctctagctaatgaaattcttcccatcctttaaagctcatttaaatgctacctcagtaggaagtgatcttttggtgttgtgaattcctttagccttttctcctaatcttcttttcatcctcctgaggcttaatacaaagcctcccatacaggtattcaaatatttgaaaaaattataaatgaactgtaggttgagtcacatatatgcctcccagaggcagaaatgacagccatcttgcaaggctagctaagaggtgttctgtatactgaagcttgttttctcattgtattccatgataaaaagagaagatgaatttcaggattgtttgggcagcaataatcagggaaagagaaggaaatttacatgagtacaactaaggattttctgagaagacctggcttgtcactgcttctaggagtagaacccaggccttagggggaaagatatggagacctagaaacactgaggacagtgaacttgtctagccyttttttcttcttataaccactaccctgtatagctcagccacgctggcgttgccttcaccatcacctcatcaaacagtgtcctgtcattctgttgccaaggaaactatatggtgggattccactgatgggggattaatacaaggaaagaaaacaaatatacattccctcaattaagacatccccacaaggaagcccaaagttctgtcaagcctcataagatgacaggcaaaattgcctgctaccttgtccagaagcagcatggcatacatagctcaatgctaatgacagagggctgtaagcacgtaatcccttaggaccatggcatgatggtccaaagcacctaccataagtgtaattctcatgccttatcttaaaaattcagacctattttgcagtcttctctaaaatgtaattgtgtttgttgggatatttaaaataatgttttaagatgaagttgatgttccatagatgtgtataggtttatgctgtagctttaaaggactacctgggacacctctgtatattccagtattagtctcagccctgatgtggtgaggattaaatgagataatatttagcatgcaacccagtgctagaaacatagtaagtgctccatatgggacttgtttgtggttaatttctctcagaatacagtttctttgtccattaaatgagattacagtgataccttcatcaaagatttgtcactaggattctgtgaaatatgcatgcaaagtacattgactccttgttgcctggcaatgtaaaagcccacttttgaggggaggactttgctattcacattccacagagtaaaatgttgggttgtattcacattcaacacagctttagtgttcatttcttatgcatcaggcatgttcttctctttttatgtggagatagaggaaataaaatggaagcaacagcaggtaagcaacacttgggtgcacacgcacttcacaacagccgcagaaatacttctccaaatgcctgcattcacctgactccaaagaaaaggccgcaggcagagtattctgaccaagattcctgtgtcccaaagaccttgccacattgatcggggaaaaagaagttttgtattaagatggcaattacccagacaatttgcaaagggtattttacctgccagtatgttccctggcagaaatgatctctgattacaagcctcatgcagtgaatatatagatatcttgtttcactatcttgcctctgtgtggggtgtgtgtgtatgcgtggatgttgaagtgtgtgtttaatttatgtttcttgctgcttgaagagatacagcttcgatgttttttcttttcacataaaatcactatttatccccagctgaaaataacctttttattgttcttgtttttgtctccttctttctgtgcctctacaagcaaagcttcctgttgaatcttgaaacatctgactttaaaatcagggtacagtcttgtgagggtatttccacgtgcaatcagtcacagaagccatgcagccaagtgccttagtagattgcaatcacagggttgtattcactcgaggtgtggctgtgagggtctccccagctacccttctaacatacacatagatatacacaggcatacacacatacacacacacacacacacacacacacacacacacasagagagagagttacctccttttttaatactgtttatttgtatgtttaaagactgaattttataaattaaaaattaaattatacacattgctacaatgatttattttcaaatcagaaaatgcagacaagtataaagaagaaacaaataccattccaccccccaaccccaagaaaatagccactgttagcatttgtagaagtgacttacatttttctaggacacaaattcatttaatttcaccttagtaatgaaaagaaaactgtcaatagggcacaattctttggacgatgacagtaatgtgacttgaaatgaagcaaagtccaggcgctaggatgtgcacctgagagatgattgggaccccgaggctaagcttggctgcagcggaattcattgtggggagaacagagaattaaatgccagaacagaagctattacagagggattgactgtccttgcccaggctctatagcgtaagcaaaactttccctactccttgctggctgaaaccctgagttctgactcttgagaaggaaagggttcgattttgacggtcaactacacataatcaccttcccgcattgtcccgaaaccagaaacggagtcagtactaagtaccaaggtcctttgaacatcatttatttttcaggaaccactctttcaaaaaaaaaatcaattacagatgctttttgggagagtgggatgtgtggcaaagagacatgaaagtcagcgttccgcaagatttagttgttacttatgggaagatgaatgatttaaatctctcttgaagctgaacctccttaagtatccacttatattgtcactacccatgagcatgtcagggcaatatatgtatatatagatttacctagatgcctgaattggttttttcattctttccaccaattcctacaactctggttctcaaactgtagccttagaagcacctgtagagcttggagatggaagggggtgctacttccagagtttctgactttagtaggtctgggatgaggacctgagaatctgtatttcctacaagtttctaggtgatgatgataatgctggtttgagaaccagattttgagaatcactgccctacaagaatatataggcatgatttcatctcaaaatatttagggaaaagatgaaactgtgaattttccaaaatattattcctgatttaggctaattttggtagaaaattattgaatttagccaccactactccattaccccatatatattgcagattgtatttttcaatttatgatagcatttttgttttagagttcctttttatctatccttctgccctccgatcaacagaatttctcccatctttgtctttctgaaaaagtataatttcctaatacctcagtggtatgtgggcagtcttttttggagaagatttctagctctgccaattattagctgtagatccttcagtaagttagctgacatttctgaaccccagtgtccacatctgtaaaaaggacaaaaccaaaacaaacagaaaaacatgtggctcacctagggagtgtgtgcatcagacaagataaatagtgtataaaatgcctagcatagacgaaaataaatgttaggcccccatatcccttctattatctgtatttatgttgcagggattgttactactatttctagtgttgattcatctataatagaatatagtatctatctaatggagccaaggcaacatctcctggagatctcagcaaatcaagatttccctatggttctaagacatattttatgtcagggacaagtgggaacaggaataattacagcaagcatttattggtgcctgctactatgattgttgagaatgatctcatctaatcctaacgacagcccyatacggaaagtattattataatcattattttacagatgaggaaatggaggctcagaaaagttaggtaacttgcctgaggtcccacagatgctaataaatgcagagccaagatctaaaccaagggctatcttttctccaaagtctgagccccctaattattgcacaacactgcctctccagttcagtatcataagctgtccctgttgagaagggaccttagacatcacagagtaatcctttcatagtagagatgaaagaactgaggcctggtggtggagtgagatacatcagctcactgatggcaaagccaagagctaaacttgggttgactctaacctctgaactttttacagcaatatagttttgctttcgtacaaatgaaaagttttcactgtgccgttcaagcatcagacaaacaaacaatgactctactgaattagagggaaaatttaacaatcagctctctgtgggaggaagggaaagccctgatttgtagcttttgccaatttccatggtataaatactcccaccaaggctgatttcaacttatccatgtcatggcactggatgctaagttgggaggagatgcacacaatccactgcctcaagctggtgtgatctgactctagcataccactgcatccgtcctcatggagaatgacaaccaaaccctgagtattgttccaagctaagattctgatggtgaagaaaaaaatgagtgtttcttatatgccaggattctgaaattcaatagaattggtatcctcgccaactcttcttttagagtttaggactggttctattactgggattgagcctttgccaaggccctcttgtgacttatttatagaacttttcccccccaaaggatatatgaatatattgtgtcatgctctatctttagaaatgctaatcccttgtctcaattgatatctttgaaattgaggataaattaaagtacaccaaagaagttgtttgtttttattttgttttaatttaaactaccaaaaaaatagttttaaaacttataaaatgacccaaagaacacatatttattttaggaaatttagaaaactcatgcaaacaaaagaaaataggttttaaaaaaatccgtttttccaaaatccagaggtaaacatggctaacatattggtgtacatatttctaatgttttttccttcctatatgcagatagaatttttttccaaaaaaaaatagccctacaataaaggaaatccatttgcaaaatgaaaagctatcacagattattatcttccatgtacaggtcctgccattctattcatattcacggaaatgatatgttagctatatttatgctgatgttcttcacgcatttgaagataatactgctaatggggattgttatctgtgagtacagatgggactaaaaagaccagggtgacagtctcagccttttccactccatagaccactgtacacacaaagactgttttcgagttacaattgcagctgtgcggatatggtgactgattgggactctgcctctgagacccgaggtcatcctagagctcagaaaacaaccccctcctgcactcccttattgctgtagccagcctggcctgcctgctgcttgtttcctgctgcctgcagctcagccccattgtttgaagtggggcttcagagctgctttaatgggttttcttctgccctccctgcttggggttgcctcacttcagttcaccatacaacagtctgatctggtgtcctggggccatccatccttcacacatgtccagcccagtggggcgctgttagaaatggaatttgttcattccctctcctcagtcttgatttttgtgaaacaataccctagaaaaatttaccagtcataataacaatgctagatgactgactctgggaaattaatgtttctttctgaagtagatgctcattaataagttggggaatagtggccaacaagacttaccagaaggtaaggtaaagtaactgacctctctggaatctttgcttttggctgtgagtctcaaatgtggatttgacagatccttttctgacatgttcctgagttcaattccctccttgaaggccaacgttgaaagacagataatcagcaaatgtttgggaaatgcagctcttaattaggagttgcttaaacgtgtggtaaattgtatatacagcaggtcctattcaatgccattttattaaaatgttaatgaggaaaaaaattgattctccccagggccactgcccatgtggaaggtgcacatcctcctcatgtctgcgtgtgttctttgggtactccgctttcctcccacttcccacacttgtgcacatgaggtgtctaagttgtcctagtgtaagtgggtggtgtgtgagtgctccctgcgacgggatggcatcctgtccagggtggttctcaccttgcatgccccctgtgctgccaggatgggcttcggccacccacaaccctgagctggaattagcgggttggaaaataactaaatgaagtaatacaaattattggaaaataaaaatttgtaaagtatatgataaccatacaaatgcatgacaataaacgacactctaggaaagcactcaacaatctgccacatttgtgattcttctggaactgctgggtggcaggaggtgctccttatgatttcgctttgcaaacatttatatcttgacctgacccaccatcactacgaccgctgtcactcaccaattcaccaaaaattgggcaaataattctctttcttgttcttattaacttttcttaaatgtatgtatagctcacacttatttaaatgtttaatattagaagtgttttgggtctttatttagaagtttggtggctttgaccagatgtatgctgtaggaacttaacttttgttactcttgtttgtatcaattagcctagagtaaaattggcttcattatacatcatttcacttacagtcacactttccaagaacctattgatgttaagtgaggacttaattacatatcattgtataaatgggtgatatttggtgggttcatgctgatatttttcgtgtagcacattatttattggtagactgtcaggctctctccaaagagaagaaacctttttggtgggaaaacaatgtaacaaaagagagcccaggcctctggacagtttgtgaaaggcggtattttttttttcatttcagaggagttaagagtactagttgagtgaccttaagaaaataatttcacctgtcctgtctcagtttccttcttagtaaaagggaaatactaatatattctctatggtgatgttgtaaagattaaatgaaaaagagtagcacttgaagcgcttcacacacactgcctggcacataataaattctatgttcattaaatgatggctatattctccaaggggaaggcagtatccacatggctccaggtggcaaggtagtgttccccatgcaggggaaccagttgaccctccagttaaatgttggtgccacggtgtgtggggggtgcgggggtgtttctggtttcccctcttgtgttgcttcaaatcctggtgaatcacaacatttagacttgtgtttctcaaccttggctgcacattgcaattatgtggggagctttaaaaagtatggatgcctgagtcccaccttcagagagtctgatttaatttatctgcagtggtacctgggcaaagggatttttcaaagctcccccaagtgattctaatgtgcagtcagagttgagaatcacttgattttaggcagatgctccacatctgtgacaaagatgatgaaaattaacatcatgctataggaggcagcgtgccactacagccttgatcatggattccttccaaatctcttgacccagggcaataatcaccaacccacaaaatttgcattagccccacctgtatttatcaaatgtcaccatcagccatactgtaccacactccattaaatgcgcgtaatttgcataaggggcagggataaaaagctcacacctggttttgtaatcaggttaagaaaatgtacagtagtctaagagttaatctcattaatgctgatctcctatgcttgggttgttagctattactcagcttttattaatttaggcttgaacatgtatctgccttgtccacaattccagatgatgctataactcatgcccttctgtcagttccagaagatgactacatgtgttttatttagataaactgaaattatttcagctttcaactgttttggtaattttgtttcatttatggatgatgagtggtaagatccactcttcatttttacatactaaaagtcatctgaaaacagatttgtttggttaatgaagtcttatgggatgggaaagattgaggagggaacatagtacttgaagttttagttagtatggattaaaaacaagtagggcaacttttgtttgcttggagggctcaaaaccaggtaaataaaaccctacgttgagattcagtagttaggaacaggtattcactctatatgtctatgatgtgtactagcttaatttaggtttagtttagcttagtttagacacttaatccatgctggagacactattagtaacataggaacattcatcccccacccatggttagtatccatctgggtaacaggccagatgaagttaatttctatataaaatggaaatataagtcatatccactcaaatatttgaatttatatctggattctttcctgtaaatgtcttgctgctcttgatggaggaaaatggatatggtttttacataaggacatgatttatgaagcaactctctgaaccccaaaaagcctagtggcaaataaatttgtcaatttgaaatcaaaggatcttgaatcagaaacaaatgattgttgatcatagaatattgttttaatttaaagcattttttctcataatcactcattggaaatgaattgttgatactatggcttttaatatgtgacttaaattgctcaaaaaaaatgaaaagtatctttttgaaacatcaggaaaaaaaagccttctggacaggccttagtgctgagtctcagcaaaattcaagttttatcttaagcacatatcttttatgttccaaaatctttctgaaaactctgagattctgccaagttggatgaagaaagcagaaagggagcatagttggtttttgttttgtttgtaaagctgttccctctttcttgtttattcttggtggccaagagacagatcctgggttgctttgttctttggctgggatcactaccttaccatatgaagggatttttaaagcttcggtttgcttccttgaagtaaaaggcagatgcaacttttgcctttaagtacattctcagtggaaactaatgtttggggtgtttcgaggggctgattttagacatggagtcctgtcctggaactttcaatgcagatctgagcctgtgagaaacattactttttgaaatggagttgattttattcttgggattgacaaaatagaaacaatacttactaactacaaccagtaaagtggatctttacaaacagaacattcatggaaaaaaaaacatgcaattttattttatccctaccacttgataatagttaagattgtctaatcaatttcactattgttgcacttccaggatgcttgattgggtcacctttcgttaatggctagtagtgctaactggcatgcaacttaactccccccaacgctcacccctcctttcttcactgccttttttttttttttttttggctttttgcctttgcagccaaaaatagctggcaaattatgttcattttcaacctaatttggaatggaagggaaaaaccaaaattttattgcaatattttttattgcttcagttactctgaacatttattatttactattatcctttatctggataatgactgctttgtttgccatttcaaccaatagttaattcatcagcaaaatcaaatctcaaacttcacatctcttccaatccacaaatcctgttcatctctaattccaaacttacatgcctctatgactagggatatttattcttgtttagtaatgtttattttgttatgcttttccttgaaagaaggactattttataagcagtaacttttcttctgtaattaaacattccatccaaccaaaaatagaccttgagaatctcaatcatttttttactgccctatatcattgtctatacatctcggatcttgccacagttccgtccccctgatttagatggcatgaagacagaagccacatttagtggcttacacatagcaggtgtttgttaaattgaattgagtcacttatgggcaccatgtcaactcccagcctttgtacatacacacacacacacacacacacacacacacacacacacactatatatatatatatatatatatatatttcccattaatctttttcatagcgctcttttcctttcctttgtagtatttattataaattctaaatttatagattgataaaaactgaacttcatatctacacacattaaaaaaagtactgcttagtacctttctatatgcttgtcacttggaacaactctatgagtcatgtaagttccatgaggccaagactcatgtcccacttgttttccactgtatccccagtagataatgcagtgtctaacacataccaggcactctcaaatactgtttgaataaatgaagaaaaattttttacttacccttaaactagctctatataactgtctaattccaccattagagggcatgtagggtcaaagtttcattcaataaatatccactgggtagctacctagacaagcactgtgatcggctctattgcaggcccaaagaatttagcaaaagatgcctgcaattgaaagccttgtttctaaatagggatgcaagacataccttgtgcagcaagatgtctacccataattattcgtagaatgtgccattgcttttctcattcattgtacagagtgtatttttggttcaaaaggggtgttagcttaggagtgttctcagaggaaggttacctggccctttgggtgtcaccttacttagttccccatatttctgggtctggccctaagctttgcccacttgggaatttaattttgtcagcccaggggtagtagggatatatcatttattagcctacactagccaaggtcacaagaggtggacacctagactagaatacaatttattgaattagcataagaaaagataattgctaagcatctgatggtcacatgaacaagtcttctgcctgtaggaaaatccatgtgggaagccaaaagataacagaaaggttgctttatgtgtgtagcaccattgcaaggggagttggttgcataatcttaatattttgtggcagccaactctaatggtctgatccatccgtcttcaggatggggatttgctaacctcagttaatggaaaatagatttcttgagccagaggttcttcctagccttgggagtgctgctttgccaagaacttccttctgaaaatccacattttcaatatttccaactaaccttcttcctctcaatggactctctctttccttagatatgataataacattgtytgggttactgtctggactggctttcagcctggaacctctgctgtatcttttaaggtgactttgcacctttagtcttatctaatgtgttttaattttattcatcaaattctcagagtttagtgggtgcatttatcggtcctctgggaatctttatataatctagtacaattctcaaatgaaagagggaaatgcatttctgacccaagagtcactgccattttttcagatggaagaaaaatttttcagcggtagaagtgattagttttgccttggggagtgtattagtctgttttcacggtgctgataaaggcatacccaagactgagtaatttataaagaaaaagaggtttaatggactcatagttccatggggctggggaaccctcacaatcatgatggaaggcaaaaggcacatctttcatggtggcaggcaagagagaatgagagccaaaagaaagggaaaaccccttataaaaccatcatgtctgctgagacttattcactaccaccagaacagtatgggggaaactgctccctgtgattcaattatctcccactgggtccttcccacaacaggtgggaattataggagctacaattcaagatgagatttggatggggacacagccaaaccatacagggagttaggaaaggctttccagaagaggtgacattagagctgaatcacaaattagaagctgtagatgtggaatggagaatatggtagtttccaagtggcgagaacaacttgtacacatgttattgtgtacttgtaaggcattgttgcatattaggatgaataagacacagcccaatggatgtttaggtaggttcaatgacagaaagctcagatacatcccctgttgcatgactctcattcagccttacaaaccctaggatacagcagctattgcccattctgtctgaaacactgcatccaagccaagtcttgatccttaaattattaaaatcttttctaaatacacaaacacaaatatgagagtgcttcctccataagcttctaaagcattttttcctttcatggcctttataaagtatagttatttgtgtaaatatataaatttgacctgccctcctgtccattccccccccccaccccactagtagattataagttcctggaagaaaaataactttattttttaatgaactattttagatatttgtcattcctatgtatgtctttatatttttactgcatttttcagaaacataaaagtgttttacatgtttttaaaccttatttaaatgatatgaaacatcattctacagcttgctgttttcattcattttacttacatcttaataatcaactatattatatttctatttatttcattttaacctttatttattacttcattatatgcctataatcataatttggtgatcttttcatttcttcctgaatatttaagttatgtttacatttttggggtaacagagacaaccattttggaaaacatttgccaatatatagtaaagttgaaaatgcacatgcttgtcaactaagtaagtcaatttctagatatatacactgggtctgtactatccaacatggtagccattaaccacatgtgaccatttaaattaaaactttaattaattaaaatttaaaaataaaatagtatttaaatttcagctcctcagtagaastagccatatttcaggtgtccaatagccatagatggctagtggctactgaattgaagcacacagatatagagcatttccatcatcacagacattctaatgaactctccaatgctgccctggagaataattttatttgtattttcccagtacactatgaacataaaaagcactaaatagctatggagtgaatgaatgaatgtgaaaatactgcattacagagctatatatggtaaatgttaactgagttccaggaagaagagctatatgaggttagagggggtgattgcgtataagggtcctgggcatgggcttggaggaggatcgactaaggtgtttatccagggcaatcaactgcagcatagcaagaggaagagttggaaatcattactgcagagaaaataagataactaaagaacagaaaagccgtagcaagaatcagatccaaagcaagactgtgagaggggaaaacgagttatgaggtcagaagccaaaaagattaaacggaggctaagaggtggagtgcaaggcaggtcagagagagcagttcaggacagatgctgtgaataatgtaaagtatctgaagtctgtgctctgggctttgagggctgagtaaactctcaatcctgtgatcaaaatatgttcatttcctaagtatattgccatcatccacaagacctatctactactttgaaagctatgtttaagagagggttatctgtaaacatgtggaagaataggatttgactcccacaacatatagctatcaaagtttgggagggtgagggtgaggcctgaactgggctgctaagaactgaatttctgaggttaattactctaggaagaggaagagaacatggagggagcaaatgtggtatagaagagtagatcaaaaaggaaaggaggatgaaaagggcgaaggtcagccaaaaatcgaayacaatgagaggggacgttgtgcaggtcttaatattggttttcagttaattgtagagttatttctataaacttaaaagccagcaggaatgtgatgtgggattcagaagctgttggtctaatttagtcaaaaactacagagagctctagccccaggctcttgcctggctttctgagctgctttgtagcccactcctggttttcacaaaagtttcttcagctctttcctgccccaccaaccccactaactttcagagtcagaggtactgattaaaagatctgattcccaacattttttttggcagggagagagagcaggtgtgtggccacaggggaagttgggtatgagtgaaaaatcagagacagccattttaaagtgcctgagtcaagcaggctatcctatgtctctctcatatcttgtaaaattcagcttgacggtaaaaatctcatctctcctgcccactcccttcacaattttacatactatagtctaaactaatttaagctttcagctgttattttcaaaacttgataatcagattagtgcctacatttgtttacaaaggtataaccaattctagggccagaccaaacaaagctctgtttatgtgtttgtttgcaacagtgcaatctcatttttaaccatggcttttgagaatagcagcatattacagaagggctagagacagctcacccaaaggggcgaacaaaccattctacctgaccttaggaaattaatccttcaagtgtcgattgtgcattatgaaagcagccaactgtctgccagcagtgggtttgcaatcccagaaatctgatgcttttctataccttcaagcaatactaacagaggtttggattcctgagcaagaccagtctgaaagaactatatgtgggcattgctaattctttacaaagattacaagtcttcattcccaagactattccttgttctgacctctctacttttttccatctcatgtaacttcactctttcaacctcaaatccctatgcctaggcacaagccagtctaccgaaatgtgggcagctgtcttggcatgcatgggcaatcagatgtttgaagaaaattgatgaataaccatgtgtccaagacatccaaagggcttagagaattaaaagccttattcttatggttaaacactgggaatgccatctcattcctccccagtgatttctctattatcagctggaaagccaccagcagatcccttgttcattggccaggatgcaaactaacacttctttcaagtctcacttttgttctcagggttaggaacactgccattattaaaaaaaaaatctggttggtccagctaattggacttcttaggtcataattacagtatcgtgacatcagcctacattttcctggaattgattattaagcctcattatctatatctttgtgtcctgacaccaccatttaggaccaaatcattgaacctaccatactatatacaactaggctaaatgttccctaagtcctaggactatgaataaactgtttccttaggaagatttgggaaagtaatggataatcataaatactaacatgtattaagtgcttattaacctagcattaatgcttgcattatctcattgaatattcacaacaaaccaacaaggttacttactattattcatatccccatgtttacagttgaggaaactgaggttcagaagggtgagaaaacttgcccaagattacacagctaataaatactgaattggaatttactctcatgtctgttttgattcaaagcatatgcacttgctgcttcttggaaggtgtctgtctgctcctcgcttcacgagcaagaactcatctgattttaatttgttagaaactgaaaatacagtagaataaacagatgtttcctttctgatggagtgatgggttataatgtcctgttttacatgtcagcaatagttttgaggccaattgtggacatttgtagatctctcatcctaagtatttattgggcatctattatgtaccaacacatggtgggtgattcaaataagtgtaaggaataggaattaccaggagtgagtgtcttaccagagaaatgaggttacctgacaggaaccccctcagaatatatatacacatgtaaaataatatgccaattcatgtgacaactctaaatattgggtgagacactgaggtgttaatagaaaggacactggtctgagaaccagtgttgttttagaaacagttgtgtaatgttaacttttaatgctaattttaaaataaagtgggcctacctcagtcattctgggtttcttgactagaggcagagaagaaataatcaggaaagtcttcatggacgagctggactatgaagaatgggcaaaatttgaattggtgggaaagggagaggagactccaggtccaaggaggaacaaggaaggaaaagtaggagttagggtaaagagaagggaaatgagcccagagtgttaaatggttacaaaggtataaccaattctagggccagaccaaacaaagctctgcttatgtgtttcattgcaacagtgcaatctaatttttaaccatgagcggagacatgcatacatgctttaaaggagcaaaacccatagttaggcataaaaaaatcagggaccaatggattgattaatcaattgatcaattgattgatttttattgtggtaaaatatacataatataaattttaccattttaaccatttaaacagtacaattcatggcattaagtacactcacaatattgtacaaccatcatcactatctacttccagaactttctcaccaccccaaatgggaaccctgtacccattaagcaactactcctcattaacctctctccccagcccctggcaaccactaatcttttgtctctatggatttagtctttctgaatatttcatataaatgaaataatagaatacatggcttctttaatttagcataaccttttcgacattcatctgtgttgtaatatgtatcagaatttcatttctttttatggctgaattgtattgtatttatggctgaattccattgtatggatataccacattttgtttattcatttatctgttgatagacagttaggtggctcccaccttttgactattgtgaatagagctgctatcaacattggcgtagaagtttttgtttggacacttgttttcaattcttttgggtatacacctagcaatgcaattgctgagtcatatggcaattytatgtttaatttactgaggaacttttaatgtaaatctgtcatattacttaaaaacaagggctttcaactttgagttgaatcctggctttgttacttgctagttggccgacgttgagcaagtgatataacctgtcagcctcagttttcccatctgctgaatagggttgttttggggatcacatggcatgatgcatataaagtctcaacacagtgcctgacacatattaagcattagatacctgtcagctactaggaatatcctgtagtagtcttattcaaaatgttctgtatagtcagcatcacagacaagtagaggcatgaccctcttatttattttgctacttacctcatcacccccaccttgtagagctctggaagtagtcggaatttccagaaaatgatctaccctcatttcttaacccccaaattttaaattattagaattgtgcatgtatgtatgtgtatatatatgtgtgtgtttctgtatatatttatacacatacatatatacatacacacttccatgtactgtacacacaaattattctagtgaaaacatttctttaaaatctcaaaagcctgtgtgtcttttataaaaccgacactttccaggaagaggcaatgcaatttagtagttaagagaatatgtttgaatcaaaatagacatgggaatgaatgaaaattcagtgtttattagctgtgtaatattgggaaggttacctcatccatctgagcctcagtttcctcatctgtaaaccaagaatataaatagtagtacccacctttgtgactttttgtgaataatagatgggataaggcaagcattagtgctaggaacacagcaagcacacaatcttcagtctggtgctacaaagatacccatgactttgaccttccttgctttcccacacaccacaggccaccaaagtggcccacaggagttaaagagccaaagactttagctaggcctgaaagaatatcaaatggtcataaagagtttttccaaatgaaatgaaattacaccataacaaaagctgttcaagactctgtaatctcaaatgcatcctttgagtatcctgattacgcttagtctctgttggtagttacatttttctaagagraattaactttccatctgcacagaacagtaccatatagtatttgagctgaaagggaaaatgacagwgaaaggagttaatatctgtgatactctgcactcagcttgtcttatttgatcattataacaactctgttatgaggtaaatatccttattcccattttggaactgcagaaactggggctcagaagaaacttgctcagaactaataagtgtcagaagcaagatttggacccggatccttctgaagactcgaatttactataccacacacttactttaaagaatttctgagattttcttttgctattggtgaggcagaaaccaagaaaggtaaagtgagttgtccaaggtcactcagccatttattataataataaagcaggactggaatccagttccaggaatgccatctcatgttactttattgcctctaatggatgaataatgtaatagttcatcagttaaaaatgattaaatgttgggagaaaatctgaaaataaatttcatccataacttattttcatctcatgtttcaccgaccttattgaaaaactgttttgtgtagttagaaatgaactaatgacctggtgttccctgatgtctgtgtgcccactgtattcactacttgatgttcagaagtaaataggcaaatgcaggcagtccacaggttatttcagttctagtttataaccactgtgatgggtaattttatgtgtcgacttggctaggctatgatgaccagaagtttggtaaaatactagtctaggtgttattgtaaagatatatttaagatgtgatgaacatttaaatcaggagacttcgcagtataatttgaagtcaggcaatgtggtaactccaactttataccttttgcttaggattcctttggctattcaggcccttttatggttccatatgaattttagaattgtttttttctaattctgtgaaaaatgacattgataatttaatagaaattgcattgaatttgtagattgctttgggcagtatggtcattttaacaaaattgattctttcaatccatgagcatgggttgtttctccatttgtttgtgtcatctacaatttctttcaccagtgttttgtagttctccttgtaggtatcttttaactccttggttaaatgtattcctaggtattgttttgtagatactgttaatgggattgggttcttgacttggttctcagctttattgttatcagtgtacagaaacactactaattttttcacattgattttatattttgcaaatttattgaagtcatttatcaaatctaagagtcttttaggtttttagatataagatcatatcatcaatgaacacagataatttgactttctcttttccaatttggatgcctttttttccttctattgcttaaatgctctagctaggacttccagtaytatgttgaataggagtggtgaaagtgggcaaacttgtcttgttctcattcttaaagggaattcttttaactttttcctgttcaatatgatgttggctgtgggtttgtcaggtatggcttttattattttgaggtatgttccttctccatctagtttgttgagggtttttctcatgaagggatgctggattttatcgaatgttttttctgcatctattgaaatgattatatgatttttgtttttaattctgtttatgtggttaatcacatttattgatttgcatattgaaccatctttgcatacctggaataaaacccacttgatcatgatgtagcatagttctagtataaaaatagacacatagattagtggaatagaatagagaacccagaaggaaagccacatacctacaaccaactgatctttgacaaaattgacaagaatattcattgaggaaagtgccctctatcaataaataaggctggaaaaattggacagccatatgcagaagaatgaaactgaacccatatctatcaccatatcctaaaattaactcaagatagattaaatgcaagatctcaaactataaaaattctagaaaaaaaaactaggaaaaatacttctgaacattggcctaggagaaaaatttattactaatcctcagaagcaaacataacaaaaacaaaaatagacacatgtgacttaatgcaactaaaaagcttctgcacagcaaaagaaataattgacagagtaaaaagataacctatggaatgggagaaaatatttgcaaactatgcatctaatgtctagaatctacaaggaactaaactaaaaaaaaaaactaacaaataactctattaaaaatgggcaaaggacatgaacaaatgattttttcaaaagaagaaatgcaggtggccaacaaacatgaaaacatgcccaacatcactaatcaccagagaaatgcaaattaaaaccacaatgacataccttcttacagcagtctggctattatttaaaaggcaagaaacaacagatgttggtgaggatgcagagaaaagagaatgcttatattctgttggtgggaatgtaaattagtacaactggtatggaaagcagtataggaagtttcgcaaagaagtaaaaatagaactaccactactgtgtgtccagcaatctcactactgggtatctaccaaaaggaaaagaaatcattgtttcaaagagacacctgcactcatgtatttatcactgcactattcacaatagcaaagtcatggaatcaacctaaatgtccatcaatggatgtttcaataaaaagaatgtgatatatatcccatggaatgacagccacaaaaaagaatggaatcatgttttttgcagcaacatggatggaactgggggccattttcctgagtgaaatgactaagaaatagaaagtcaaaaaccacatattctcactcataagtgggagataaaaaatgagttagacatggacatacagaaaggaataatagacattggatactccaaaaagttggagtgtagaagtggggtgagggatgaaatactacctgttgggtacaatgtacactgtttgggtgatgggtaacactaaaaacccagacttcactgctactcaacatattcatgtaacacaactgcacttgtaccccctaaatctataaaaatcaataaatcagtagactttgtgtaaagcagattaccctccataatgtgggtggaccacatccaatcagctgaaggcctcaagagaaaaagactgagatcccctgacaaagtagcaattctgtctccaaactgcctttggactttagacagcaacgtcatctcttccctgggtctctaccctgccagcctgccctgcagattccagacttgctagtttccacaactgagtgggctaattccttaatacaaatataatcacgtgccacaaacaatgtcttggtcaaggacggatggcatatacaacagtggttacatagtattttaatgctgtatctttctgtacctttttaatgttcagatatatttaaacacataattacttaacatcgtgtttcaattgcctgaagtattcagtactgtaacactgcacatgttttatcctaagagcaataggctataaaatatagcctagcatgtagtaggctataccatctaagtttgtgtaagtatgctatgatgtttgcacagtgacgaaatcgcctaaggatgtatttctcagaatgtttcctagttgttgagtgacaggagtgtacatacacacacacaaatatcattttggctatattttcctggagatcccgaactaataacaaccacctactaatgtaccaggcacagtgctaggctctgggaatatttagaagagacctctgtgcaaagaaatttgcacaatatggcaaaatgtgacaaaacacattgacaaaggtaggtcaaggcgggaaaataaagccacaagaaaagcatccggggcatttcatgatgtcctttacacatgatgataactaaggacactcagacatttatctgcaagtgggaaatttatttaatttagaaggagaaaccttgcaaaaatagaggtaaaaatagactcccctctttactttagactatcctgtttgttacatctactcaataaattaattcaataaacatttattgaatcttagctttgtgcacagtgtgtaatgacatagttgtgatgatataagaaacctcagatttgccagcgtttccccctaaacttggcttaatctctggaacccaagctagggttggaaaaattacttggtatagctgtggagtgaaaacgggcacacagatgctcctgctgagaccacctgtatctctgacaactttatttgggccaaattagttgaatatatgggctggtggcagttacctgtcccctgtcttctacctcctggtttccaggattgcctactcagttttcaggctctatcagtacttagtttgcattcatcaaccatttaaaaggccagccctgggtatttcagggaaggatcatgtccttaaaatgtagtgaattccacttattcccaaggatgcaagctcttctctgactccctgcactgaagtcatttagagtcttttgagagttaagactaattaaagctcatagagtacttggagagccgtgcatgacagcacatgaatattttcaaagcggtgtcttatgcctagtatctgggccaggaccaggcctatagaatttaattgaatgtgtatccctggttaaaggtggagctccccagtagcagagtctttgtcccattctgctgtgtatccatataagtttgagccctactttctctgcacagatctttaaggtagatgttcgtcagggctttttcccggaactctttcactctctgcacaaactcatccttgcataattctacgttctatcccaaatctgtcttccaagctccaagcccatatatatatataactgtttagacatattttcctggctattcacagatatttcaaactcagcatgtccaaaaccgaactcattttctacacacgcacatgcacacacatacacacaaattggtcctattccatgcttccccatctcagcaaatggcattaccatcctccctgttgctcaagctgaaagagtcaccttcgactcctctttttccttcccttcccacaaaggttcagtcattcaccttaatccgtccatttaccaactcagaaacttaaatcccaaacataaaataaaacttaaacttaaaacataaaaaaatagaatagtacaatgaaactcctcccatgtaccaattgctcagcttcaaatttaccaattcatagacagtctcatttccaacaatcctcacttctcaccctcaatcattgtgaaacaaataccagaaataatctcatttcatctgtatttcattaagtatctcttaaaagtaagttatgaaaacatccaaaatcccattatcacaccaacaaaattgacaataatataatataatcgaatatccagacaatgttcatatttccccattgtttcataaatggatttgcttccttacatttgagtatccaaataaagtccctacattgtgattggatgataaatctcttaagtcattgtattttttaagttttattttgtttttaaattgactcataattgtacatacttagagggtacagtgggatgtttccatacatatataaattgtgtaatgatcaaatcctggtaattaacatatccatcacctcaaacacttatcatttctttgtggtaagacattcaaattcctctattctagctattttgaactatacaaaatattacttttgactgcagtcaccctactgtgcagtagaacaccagaacttattcctcctctctaactataactttgtatccattgaccaacttctctccatcattcccagcccccttcccactcttcttagcccctagaaaccattattttactctctacttctgtgagatcaacttcttttagatttcacacatgagatcatgtggtatttattctgtgtttgacttttctcacttaacataatgtcatctaggcttatccatgttgttgcaaatgagaagattttgttctttttatggctgagtagcatttctccatgtacatatgtaccacattttatttatccatccatccaatgatggacacttaggttgacttcatatcttggctattgtgaatagtgctgcaataaatctgggatcacagatatctcttcaacatcatttcatttcctttggatatttcatattcctttggaattgccagatcatgaagtagttctatttctaattttttgaggcatctccatactgttgttcataatggctttaatctgtagcttctcctcaatctctcttttttctccctgaaatatttgtggaaaaaactggatcattttgtcttgtaagtttcccacagttttgatttgttggttggtgttggcattggtattggttggtgctggtattgtaaagctttggcagttagatctagagacttaatcatattccatttctctctctctctttctctccctcttcctctctgcctccctccttctctccccctttccctctcccccttccaccgcctcttccccttcccctctttctgcaaaactatttaatcacgtagtgttttattcttccatcattattgatgtacaaaatgtctgcaatgtctgcttgatcttctttctgaaatactagcagctgttgatatctattacctcaatctattacttcactgggagttgcaaatgttgattctgtaattctgtcttttcttatgcatactgtacttgaatactttatttaggagaaacatcccttcattaatttttatggttatcctgagttatagttcatttaggaaaggcagaatgaatgcttgattccactatcctttttttaacaaatttaaaaaataattatttccctggcatcctccaaaagtgacctgtgaaaggtttttttgtgtgtaggttaccattatggattcatgaagttccaaatattttacaaatttcattgaatgcagttatcgttattggtgttcaggccatcacttatttgggcagtgggaacctattcagaatgacttctgagtccctttgctgtgtttttttttaacagtgttactgagatataactgacttatagtaaactgaacatatttaaattgtacaatttaataagtttaggcaagtatgtacaagcatgaaagcatcaccacaatgaagataatgaacatgtccattatctgcaaaagttccctcatattcctttgtaataccttctctcactcttctctgccaccccccatccttggacaataacaaatctgttttctgtcactatagataaattttaatttgctagaattccatggaaatggaaacataaaatacatgtgcttttctacataattaaaaaataattatgctttttactcagcataattattttgatactcattcatgatgctgcctgtaccaatagccctgtatgacaaaggtccccaacccccaggaccggttggggactgctgacatatgagatatgtcagcagtccccaaccttttgggcaccagggactggttttgtggaagacaatttttccatagaaggggccggggtgggaggtgtggggcgagggatgcttacaggatgaaactattccacctcagatcatcaggcattagttagattctcaaaaggagcgtgcaacctagattttttgcatgtgcaattttcaataggatttgtgatcctatgagaatctaatgccaccactcatctgacaggaggcagaactcaggtgctcacatgcccgctgctcacctcctgctgtgcggcccagttcctaacaggccacagacaggtacgggtctttgtcctgggagttggagacccctgagatatgtgatatgcgaatattttctctcagtctagagcttatctttccattctcataagaatatcattcaaaaaggaagttttaatttagatgatgtccaatttcttcatttttttctttcatgcttcaagtttctggtgttgtatctaaatctctgcttaatctaagaggacaaagattttctcctaatttttctactggaaattttaaagtctcaggcttatatttacatttacaatatattttgagttaatttttgtacatagtgtgaagtatagatcaaagttcatcatttgtttattttgcatattgaatgtccaattgtttcagcaccatttgtttaagacaattctttctctactggactaccactgcagctttgtcaaaaatcagttgactatatatatgtggctctatttctggactctattctgtttcattcatacttttgtctgtctttacactctcttgattgctgtagcttcacartaagtcttgaagtaggtcctgtacgtcttacagctttttctttttctaagttgtttgggctatgctaggtcctttggattttcatatacatgttcaaattgcactgagtttatgatcatcaattgggggaaaattgatatcataaagatatctttccatttatttaagccttctttaattttctcagcaattaactttgccatgcaaagcgactgcacatcttttgtcagatttattcctgttttatatatttgatgttatcatatgacatttttatttcagtttccaattgtttgttgctagtttacagaaatgcaactaatttttgtatatcgaccttgtatcatccagcattactaaactcacttattagttctagtagtttttttgtagatttcatgctatattttatatagatcatgttatctgtgaataaagacttgttttgcatcttccttttgaatatggatgccttttttgcactggctagaacctgtagcacaatgttgaatagaagtgtaaatgtggacatctttgccttgcccccaatcttagcagggaaagcattcaggcttccaccaacagacacgatgatatctgtagtattttccatagatgccttttagcaggttaaagaagttcccttctatttctagtttgctttgagtttttatcacagtagaggctggattttctcaaattctttttctgcatctattgagataatcatagttttttttttttttctttttggtctgctaatatggtgagttacactgactaatttttagatgttaaaccgaactaccattcctggaataaactgaacttggtcataatgtaccatcatttctatatattgttaggttcgattttgtgaatttttgttaagaagttttgtatctatatccctgaaaaatattggtctgtaatgtaatgctggactcacagagtgagttagaaattgatgcctcatcttcgattttctgggagaatttgtgtaggatcaatatatttattccttaaatgtttggtagaaatcaccagtgaggccatctagcccaggagtttcctttattggaaggtttttaactgcaaattcaatttctttaatagataagggactactgggattttctacttcttcttcagtgagatttggtagtttatgtcttgcacgggaatcaccaaagataaagtcttgccacagaagggcttttaaaaattagttttgcatctcactgtggttagaaacaaaaagaaaagtagatgagttttgaagtcatgaaatatggaattagagacaaaaatactggaccgctccttcgcctatggctttgattaagcccaaaaagtttaaactggagtttgaactttgcttatgacatgcagtgctttttttctagcatgatgctttttaaagtccattcccaccaaccaagtagactacttgacttgtttctattttctgcctatgagaagggattagggctgtttctcctaattttagaaatgtaggcatacgtgacaagttggtctgtcttgttcatgctgcaagcaaaatgaaaattaacttctgaaaggatttacagcttaatattgcagccaaaaaataggtaaaagtaatatgttgttctttgcaaatgaagacagaggtcctggtgtatttgctgggttttgtactttgtaggattttttttccttctgatttttccccctagtcatgagggatggattttctatgaggcactcaattttcctggttagtcttctccacatgtaatctttccccatctgtgagcaagttaaaacatcttttgccttatcaacacatgtaagccttgtagataattaacaaataacagaatttgttgtttgaatcacagataaataacaaatagatcttaagtataagtatatccccaaatattgcatggaacatatactaatttgggacatactcatactaaaaagttacttgtggtttttctgaaattcaagcttaatgtgcatcctgtatttttatttgctaaatctgagtattcctcacatgctccctatgactagccttgggaagtgttgttctttcatagctactcagtaaattcttactaacagaagaaaaagaggcttctattttaagaacattatgggcaacatttagtttgcctgtttgtgtgttaaatgtggaaatgacctgtatttgtctcctattctgtctcctaatagctgctactactggagaactacacacatgaactcaccatctgtttcaactgggcatttttagactgtgtcccactagtccaaaagacagaaatggcactgcccttaaccatttggacttaataacagaggagacaatctgccaggatatttctaacgggacacagtctctgtcctggaatcccaacccttcctatttctgtaggcttaaaaacaaaattcttaatctcccaactagaaacgttaaaggattttgttttcaacttgtaatgattttcctaaagctatcatgttataaattagcagacaggctctgtgccaagccactaaaggccatgacactcactgtatacttaaggtctagtagcaagagtaagctcacacgatgtagaaggacatacagtttctccacgcattgcgcaactgaggaaattgaggcccagctcaatcacctgaaataattttgagtatttttattggaaaactattgccacagtttctctaaagtagtcaaaaaggaaggctgttagagtgagcaacgaatacaacagtgaaacattagcagtgctattgttggaaaagacagaaagtgaaatttaagaaaggatgtgtgaattgtgtgatatatgagttctatctcagtaaagtttttacaaaaaggaaaaagaacggatgtgactagaatttcgagagaaatggatgaaacatgaaaggtattccaggaaaatggaataataataaatagacttctatgactagagggggtgacaggtggacttgcaatggtaggttgagcctaattttgagtgcccttaaatatcatgcttaaattttgaactttgtgggtaatggggagctatcaaaggcttttgagtgaagacagaacaatcacatccaagttttagaagcatatctttttatcttctccaatgatacttctcactttctccttttgactgcagttatctcctgtatcaagcttttagtttcctgagtgcaaggaacatgttttctaaatatttgtcttttttccatagtgcccaacacagtgcctttatacatagcaggtgtgcattaaagattgtctagcaagcatacagcaggcactcaataaatacttgctgagtaaatgaataaatgtaatcattgcaatgctagttataactctactttcccctcctactttggaaagcatataagaaagcaaatgagtaggagtgactcaattacagaaagaaacatgaatcccctcttaattttctgaaaaattaaggggaagaatttgtattttgactattattactaacaattatttttgacacacatcataactgaatttgtcacacaagtgtgccatgatgctacttgtagggttttcagacaaaacagatgacactcagttaaatttgaattgcagataaataacaaatatatcttaagtataagtatatccccaaatattgcatggaacatatactaatttgggacatactcatactaaaaagttacttgtggtttttctgaaattcaagcttaatgtgcatcctgtatttttatttgctaaatctgagtattcctcacatgctccctatgactagccttgggaagtgttgttctttcatagctactcagtaaattcttactaacagaggaaaaagaggcttctgttttaagaacattacgggcaacatttagtttgcctgtttgtgtgttaagcatttacttgttggatttactttaaggtctaactgggtagtactatatcccctcaggccctggttcatactggctggctagagcttttcaagtgaaacctggcatgcctgttcctcttttacccctgatgccatcagttgtttttatctatggtgtgaacacagttgagcagatgttggagggaaatggcttcctgaaatattcagaaatgtctggtgtcagcttcttccttaaaataaagtataggtgacaagtcccacatggtaggaagccagctcccacagatcacttccttctcttctcagagtctttcattcataaactcatagggagctgttcttaaaaggcaaatgcacattaaacatgggacagaacccagcttggtttaatgtgtgtttgaatgtgtgtgtgtgtttgtgtgtgtgtatgtgtgtgtgtgcccgtgtgtgtgtatgttcacatttcaatgcaaaggttttaggttttgttttagaattgctcaaagtaaagccagattctttgtattattagcaagaagttcataaacgtagggtgatgttaaacggggcctagtttaagggaagagctctaagattttgagccaaacctgggtctgaatttatgctgctccctagctgactgaccttgggaaggcaaactaaccccttgaagcatcagcttttttatctgtaaaatgataatggtaatagtgcctacctcatggtggaggtggaacagttcagtgagataacagaagtgaactacttaattaggcacataacagatgctcacggtagccattattgtgaatgtggccccaggataggtctgatctagccaaagaggcctcagaatttctggaccctgaggccactggcagggaatgaagattatatatatatatacctcagcatcttgtattatttttctcttttagatgtttggctctcttcactttgtcacttaactagcaaatgataccaactgtctgaaactcaggatgtttttttaatctggaaaatggtcatatgaaaaataattcgtttcaaaagtagttataagaattatatatgaaggttatttagaaaatgtacacacagtacaaataatattgtgaagtaagtagagtaatattgataaaaagtacccccaaataggcacctgtcaaccctcatcttttttttcctgactttttaagtttcaggccaattcctggaactagtggcagcagttccaataaaaaacaacaacaaaaacaaaaaacaaaatgaaacaaaacaaaaaaacaagagtcacacagttgaaggtatctggtttcttatccccactctgatacttaactttctatgttgaaaaagtcacttaacagctgagttttcatttcctcatctttaaaatgggaattagtcattgaatgagaacctattaggcatccacatgcacagtactagagactgtaattgtaaataataccagctgacatagattgagcgtattctcaatataccaagcacttgacaaagagcatcatcttatttaacctcactaaaccctayaaagtaaaatatccctattttatagtgcaggaaattgaggcttaaaggatttccattgatttgtcttatagtgaacccaagatcttcatctcaaaggaacctaatgtctaggagggtaggtgaagatataaataaatcattgtaatgttgcatacgtgtctatgtctctacacagacacatacatctaaaatatctatttcagatttgtggtggaaaatcaaatgagattttatgtgaaagacattttgaagaaacctgaagttattaaaaggggatagtttyattatgctgtatgaaaccaggaatgagcagccatttcaacaaccatttactgtgctaattcaagacaaatttattatattccaaggactgtcttgttttgcactgtgcagagtattaacagagctaacgtctttacaggaccacaccttctttcttctgagacatagtcacaatcctaaaaccgatgcatttctttaaccccgccagagtcaatcatccattgatcctactacctttctactgccccttgcccaccgcctgtgctcagttccttccacaggaaacctagatcctatggtccataatcataatcacttctttccatatacccttgactcccttgcccctcttttcctttatcatcctcacctagcagaccccaaccttgattaaatccaactcttcctctaatcttcatatgtatccacgtggctggacaagtctaccaaaaacctcacaatattgataactgatgttcgtttaagtccatgaccaccaaattcaagtgggcccttagagctgccttgcagtcctgccacatttccctagttcatgccttstccttgctctcctaactgatcatgtcacaccttatttctccacaaacctccagtaactccttcatgttcttattctcagttgataaccttgattcttgtttcactgagaggaaaaaataagtatgttgaagagaatgtctgcatgcttccattaccacatcaactaccctacctgcatctgtatctatgtattctgccttcccacctgtcactgtggatgaactttcaattctcttacctaagggcattccatcaacttctgtattagataccatcctctcttgtacacttaaagtcatccccaacaattcttccatctctctcctgtgtcaacacatattccctcaaactactaatatatttcaatatctccaatcttaacaaaaaaattaaacatacttcttaccccatgtccctctctggctacagtgccatttcttccattcccaatacccctttagataattggctatcctggactactccagttcctcacttcccactctgtattgaaccccttgcaatctggcttttagccacactaagccactgaaatttatctggtacagatcaccacattgctaaatccattggtatgttttcatatcttgtcttacttgacctgtcaacaatttaagtttatcactttttttcctccttgctttccaggacccctctggttgttgattctttactcatctcactggctactccctctcagattccttctcaagtacctcctcatgctctcttaacactgacatgcttcagtgcttaattctagggtgtattctcttccctttatctacctccactcccttggtaatctcatctactttggaggctttttgtttttttagagagggtctcactctgtcactcaggctgggtgcagtggcacgatcagcctcaaactcctgggctycagtgatcctcctgcctcagcctcctgagtagctgggactacaggcacatgccatcacacctgtctaatttttttgtagagatggggtatcaccatgttgcccaggctggtctcgaactcctcggctcaagcgatccccctgccttggcttcccaagtgctgggattacaaattacagacacaagccaccacacctaaccccttggctttatataacaatgatagcagagatggtgatctccagataaaccatgttctctcctactctccatgttgttaggttttccagtatgtctggttctttctaaagagaatatgaacacaagagatgtatcacttccagtaatggggaattaagagcagttactaggatctgagatagtggagttgctagacaaaagcagcttggaaatccaagtcacctttggagaaggccactaagaggagctgcttgtgtcttattggattatgactctataaattgccttgggcagtatggccgttttcacgatattgattcttcctacccatgagcatggaatattcttccatttgtttgtatcctcttttatttcattgagcagtggtttgtagttctccttgaagaggtccttcacgtcccttgtaagttggattcctgggtattttattctctttgaagcaattgtgaatgggagttcactcatgatttgtctctctgtttgtctgttattggtgtataagaatgcttgtgatttttgtacattgattttgtatcctgagactttgctgaagttgcttatcagcttaaggagattttgggctgagacaatggggttttctagatatacaatcatgtcgtctgcaaacagggacaatttgacttcctcttttcctaattgaataccatttatttccttctcctgcctaatcgccctggccagaacttccaacactatgttgaataggagtggtgagagagggcatccctgtcttgtgccagttttcaaagggaatgcttccagtttttgcccattcattatgatactggctgtgggtttgtcatagatagctcttattattttgagatacgtcccatcaatacctaatttattgagagtttttagcatgaagggttgttgaattttgtcaaaggccttttctgcatctattgagataaacatgtggtttttgtctttggttctgtttatatgctggattacatttattgatttgcatatattgaatcagccttgcatcccagggatgaagccctcttgatcatggtggataacaaggtaatttatagattcaatgccatctccatcaagctaccaatgactttcttcacagaattggaaaaaactactttaaagttcatatggaaccaaaaaagagcccgcatcaccaagtcaatcctaagccaaaagaacaaagctggaggcatcacgctacctgacttcaaactatactacaaggctacagtcaccaaaacagcatggtactggtaccaaaacagagatatagatcaatggaacagaacggagccctcagaaataacgccacatatctacaactatctgatctttgacaaacctgagaaaaacaagcaatggggaaaggattccctatttaataaatggtgctgggaaaactggctagccgtatgtagaaagctgaaactggatcccttccttacaccttatacgaaaattaattcaagatggattaaagactgaaacattagacctaaaaccataaaaaccctagaagaaaacctaggcactaccattcaggattatgacaaaagtgagaaatcaaactttgtgtgctaaaccattgcgatcttaagtttgttaccacaacgtagtcaagtctatactgactaaggcatcttccttgaattccagacttccatagccagctcctcaactcctccatttgaatatcttatacacatctcaaaaccagaattcctgaygcttcccaagcaagcttctccaacagttttctccatctgaataaatggcaattgcatccttgtagttgcctagtacagaaactttggagtcattcttgacttctccctttcagtcacatcccacatccaatccatcagcaaatcctagcagctctacctttaaaacatacctagaatcattttacttctgtcagactctataactgcctctctgttataaacatccakcatcctgctgaactaccgcaacagcctcctaggtggcctttctgcttctgtgcttgccccactacagttcacatggcagcttgagtaatcctccttaaaaagtaaatcaactggtgtcactcatatgttccaagcccttcagtggatttccaggggcaaagctcttacattggtctatgaaatcttctatgatctggctcttgctccaactctggctttaccatgtatcccatccccctattcactgaactccaggcttctggcctccttgctgtagccaaaacatcaagcatattctctcatttactgcctttgcacttgctgttccctttgcctagaatactctttcctcagatattcacataactcattccttcatcttctatagcagtgtttctgaaacattatgtgcatcagaatcacctgaagggcttgttaaaacatagatttctgagccccaccctaaagtttatgattcagtggatcgtggaggagacaagaatttacaactctaacaatttcccaggactgatgattctgggccaaggactgtgctttgaaaaacactgttttctgctcagaagtccccttataagcaaggccttctctgacttccttatataaaataacaacctaaccccaacacttcctaccctcttacccaatttagtttcctccataatacagatcaactgacaaatatgtatgtaatattcatttactgtttgtcttccctctaaattttaaacaccatgaaaacaaggacttggtttcacttatggctgtatgatactgccactatcacccatctctaacacagtgcctagtacatagtaggcacttaataaatatttgttgaatgaatggtgagaataaaattatacacagccagtcttctgtgacctaagcttctggagaaaattgctcacaaagataactggcctttgcaatccaatcacttcagctaagcctctgttacttcctatcttgcttcctgggttaccttttgcatcattgtcatccttgccaacccccatgcaagaaagcactggtgatgcctagaaaagcctattggttggtggtagaggcactgtgatgtaactctttatttcaggagacccaggagaaacgaagaatcccaagtgatgctgatctctaacacttgtaactcaattgttctgagagcaattatttcacagcccttcactgaatatctgctgtgacagggctgcagagaagcataagacatggtcctgatcccagtctgatggcagaatcaaattgagtaaaatactgcaaaactccatcagcaaagggaagagagtaagaactgctcctgaaattgctgagagggaggcagtgtataagggtgtcttcaccaaaaagatggttgagctgggtttaaaagaatgaatagaagttttgtttgtggtaaagggagtaggaaaacattttagacataggaaccagcatcagcaaaaggatagatgtgtggagtagagattatatttaaaatatttagcaatatttagggttatggtttagcaaaccctaacctttaaccctaattgctaaatatttttagcatttaaaaataattttggaggccgatgtgggaggatcacttcaggccaggagttcgagatcagcatggccaacatggcaaaaccccatctctactaaaaatacaaaaattagctgggtgtggtggcaggtgcctgtaatcccagctactcagraagctgaggcagagaatggcttgaacctgggaggcggaggctgcagtgagcccaggtcgcaccactgcactccagcctgggtgacagagtgatactccatctcaaaaaaaagttaagtgagtgcagtgattctctgaaatgagaaataacttgtagtggtgatctgggggaaaaaagtacaatcttccctttatttactaggcatttttattcagtaacaataaaaccatgaaaaattcatttcaatgtataaaatgtgattatgttcttgattcagataattacatatacagacatcaacaaatccaaatggacatcctgaccaagcaaagtgaacatcagctatagacaaactggcatgatcataccagtgcacagcacttgataaggagctccagagagagaccagaatgttgcaaaaaatgctgagtagtctagtatagctaatgttaatataataataatasctgacacttagtgcatactataagccaggtactatgttttgcatgcttaatcttattgagtcctccaatcaaactctgtacagtagatactgttgccatcctcattttacagataggaaaattgggtttcagagagataaagtcagttgcctaagttcatccaactcggaaatattagagctgggatttaaacctgtacagactgactccagaacttatattcctaattaagggatactgcctcagatattggctagaacatagttttgccccttaacactgtggttttatacaaaggagtaaaataaattgacttttcccttataaacgttatggtctggatgaggaaacaagactctcagctatgcaaccttaggaacattgcaaagactctcccataacaacatgagacacttacccagtgaatgggacttagggagtattgtggttcaccgaagctgaagtggtcatggaaaatatagaacttgaatttggccttgagaggtacggaacagtaggaagaatattgcattatgttcagaagtgttagaatccacttgttaacagtgtgacccaagccaaaataatcttcttcagtgttatcatctgtaaaatgggtgatttggattagaccaatacttcttaacaaaagtacaccccaggaggtattttggaacttgtgaggccatttgtgattgtcaaaatgatcagggagtcagggacacttactaggtggctgccaggaatgacaggtgttctgaatactatgcatcctgaaggatagagaagacctctggatattcatggagatgaaaactgtttataattatttaagtctagaacataaccacattttacatattgaaatgaagtttttcatggttttcttgttacaaataaaactgcccagtaaataaagggaagattgtacttcctgccccccacccacgatcatcaccatgagttgtttatcatttgagagaatcactgcacttactaatagcaactgcattcatgatacttgaatcatcaatactacatcccagtgtcattctgtgtcagcagcctgttacattcataataattctctatagagctgttggcctctgactaccacttcatgacatcttctaatatagccatgtatgagcttttatatattgaaatacatatctttttaatataaattacttttcttctttttttttctttgcaatacagttagggcataatatgtgcttttaaaatttttgcttaattaggagatatacctaatgctaaatgacgagttaatgggtgcagcacaccaacatggcacatgtatacatatgtaacaaacctgcacgttgtgcacatgtaccctaaaacttaaagtataataataataagatttaaaaaaatttttttgcttacatttttattataacttattcctatgaatttatttttaggatagcaagggagagtaataattataataaaaataataaagtactgctcggatagagttaagaaccactgtattagatgatctcccaaagcctttccagttttaattttcttgggtataagatgggcttgatcttgagagaaaagggagagcattccaaggtggaaatgacaccagccacatggcctggtcaagcagggggtggagtgtccccagacaagccaggataaggcagaggcttctcaggtctagtctggtcatgttccctggaagcctgccttcactcctcccacctcactgtaattgaagactcctggggaaactgccagggctggcattacaggaaattgccttgtggccaacagggcttctctggttactttcctcagtgacaaaggacagtgatgatttcctgttagctgagtgtctttgcctccttgttctggcgagttcctaagaaaccttagcttctgattcttatggttttgttcagctcctgctattgttttttttttccctgtcttatccagttcccttgcttccagcctctttgctccatgcttgaggggtctggaaatttttcatctactatagaccaattttatggaacactcaaacagacattgtttggaagtaggccatagctccaaatagatgccatttcaactttggcaacacctgtcaagttctcttccttgaaggggatgacttttatcacttaatattatgtattattttgtattcttaataattatatgtgcttgttgaagactgcttagaaaacacagaaatgtatggagaaggaaatacaaattatccataataccaagaaatatagtactcaacattagacaagggtgtaagcataggtgaagataaaattcaatgctgctctctcagttctctcttgtattccagcccctagcttcctcctgccagagtacctcttgatctcacccttattaaaacttgcctgtcctatattccataaaatggaaggtaaactggaaagtgtgcaataacacttaccatgtcaagggcttataagagagataaaatataacgtataaggaaggtgtttggaatctaaaatagtaatattttgtcatagctttgccatctttaccttattaccaaggtgttgtgatgataaagtgttgtgggaatgtctaaagagataagagaccatctgagaaattcacagtgctctctaggaattaggaaaaggcacacagtacacagaggcaagaatgattaartgtgaggtcagctcataaatatgcctttctctttggaaaaaacatccaacattaaacaaaaaagttggatggtactaaatccatcccagagataaagttcttgttacagataacagttagaatttatgttttccttttttcccaaggtggatatggtcagaatggcagtttttctcattgttgagtccttgtattgaggttctggtagacaaaggacttagaaaacactaaggcttaagggttaaggtcaagactttggagttagtcagacccgagttcaaatcctaactccattaatatagtcaccaaaaattccttgagtgtcatccatggtttcagacattggagatgcagtgttggacaaaacaatgaagtccctacttacatgaagcttacattctagtaggagtaaagagaatgtctaacgatgaaaaggtaatgaaatgatatgattggaagtaacaggagactcagcaatggcctctctgagaatggacaattgaactgagacctgagtgatgaaaagaggccaggatttttaaaaaatatctaggagaagaacattgcagaaaaaagtaacagcgagggcagaggccctgaggcaggaacaggcttgatgtttttaatgaacagaatgaacgccctcctgtgtgactgaagcagagtgagccagagagaaaggagatgaggttggtgaggatcagcacatggcaggtcatgtgggggccttgcagaaattcagctagcaatcatcacgatcaatcagaggagaggcaaaaatgaagttagagagcttggggggtactgtaaaataccaactgaggaatttggatctgactaactgggcatgggagtgccactgtaaggtgtgaattgtgtgctgaaatggagtttgaggagaacaattccgagagcagagtacaaggtagccattttcatttgtcactacatatctagcacttgaatttcactcaagttatctgctacagctacttctttaccaatgagtgcaaatccataagtcactggacacctgttttcacaggaatatgtctagagtctatttccagcccccaagtaaagatattctgttgtatattgtgcctggaatttctaccagtgaggaggtgtctaaagcaaagttcccaaaccggctatttatttgataaggtatagacctgaactaaaaggatgctagcttaagtttagtttttatttcatttgactactgacaacatcagataagatcattaagccgcaatagatttacttggtaaagaagctaagagttaggtctgctgggacaacattgcttcttggttcacatggtttattaactttttcctttttttaatagggagagaagtcttatggaaagccatgtgggggccaggactgcagtgggagctgtcagtgttttcctgagaaaggagcgagagtaagttgcttatttcattgttgaaagacaaatagtggcatgggagctgttatctgttttctttagaaataaactgcttagaatttactcttatgacctcatggaacaagcaaagtgatgaggaccagctggaaggagctttgctaactaatgatagtcagagttagattggtcaaactctctgaggtaccaagaagaggtttccttcattcacttaatgccaaggtttcctcagagtttcatctggagtttttccaaaagccaattaggttgtagagagccagattgtgacaatgtttgtagataagtgtacattttcatagctcacttgattcttccctcccagtctggggaacaggtgttccaattgttatctacagactgtggatgtgacttgtccaaaatcaccctgcttgttagtgatagactcaagagaacaaggtagccataaagtccagaaatataggtgacgatacataaagaatggtttataggtattaaattacaacataggatacgttttaaagtgttgtgacacagtccgtgtattgtccctcattagcaatgcacagttcaaattgttgtgcaaattgcaatgaactcagtcattgacacaacatttctatcaatccctgaatatgcatagcccctagatatttgtatctatgattttcactgaaataaatgcatttttattataacccaggaaaagtgttgaaaggggttcaatctgaaaaaaaaattagacacatacacaagttgagcatccctaattcaaaaatctgaaatctgaaatgtttcaaaacccaacatttcctgagtactgatgtgacactcagaggagatgctcattggagcattttggattttggatttttggactagggatgatccatctgtgtgtgtgtgtgtgtgtgtgtgtgtgtgtgtgtgtgtgtgtgtgtgtttccaggattaatggccatcctacagagttcagaacttcccatttctagcattgtgaatacactctcatcacactcaaagaagactaagggcttatactgtcaaaataaagtagtactataaataggtcaaccaaactttcaaacccatagccaaacagggaacacagtgaccgttccaccttctctttcattatcttacatttggggtaaagtaaaatgtcaaactatgccagaatttgaaggaagagaataaaaatccatcttctcatcaaaggggactagatctattctacattaaagacatggacttagagaatcgtaaaatatgagaaagggaaggtatcttagtaagcttcacatcttatttgttgattgtacagaggaaacagacgcagaagaaaaattacttcctgggatcacatagcaaagtgatgacagattccaggcctttatctgggtcctttgatttctcatctatttacgtcaccagcttatctactgctgcctctcacggaagacatgttcactgtagccaccaagacccatgccctcacctctgaaacattctagaaaaaaaatttcacaataaatatatgaacacattcttgaataacatgcaagcagtatagacaaagcaaaaatctctcttggtgctctttcagtgccattattgtctttcttatctttttccatacataatcagagatatgtacacgtatgtctaaaaatagtctcattatctgattttcttttccaaaatagaattctaagtatatattctgggccccttttgtaaacttaacgtgtccttaagatctttttctctaccccatagtttaattcagccacccttttgacagctacttaggttgtttctaaatttttgctatttgtaaaatggcagagctacagtgaaaatcttagagtaggcctccttgtgttcaagcatagatactagctcaagcatagatacatctctagcatagatactaaggatcataattacctggtagaagggtaatagacatttttaaccttcaaagccattgacaaattaggctacaaagtattctccaatttatattcccatcagcattgcacaaaaatgcccatctttctacacccttgccaacacttgatatttttgctaatatgatgagtgaaaatcattctaattccctgagtttaaatgtcttttcacatattacctggaaattcatatttcttctgtgaatttcctggacatattctttagccactttcctaactgatgattcttattgacttactttacctctgcaaagatacagcaaataaaaatgacccaaatcgatgcaagtgagatttgaggtttgacacaaaggacatttcctgatggattgtggcagggtgagaagcagttagacacaacaaccaggaaactgagaagctctgggctgtttgttgggttggggagcctttaaaagtagaaaatcttatatatctgatcggaggtcagtcctacaccaggcaaacatgcctacagtgatctcattgttaagcccctggctaagattttgatctctggaaatggagggcagtagatttatttcatgaggagccctcatttaggtttcaaacatctggagccttagtctggcttctcttttgaaaacatctgagtggctgaggggatggaggatggaggaaattagaatatccctgcacagatttttacctcaatatttaaaagacacagactccacactgtcaaatatgttcctaaaaatgtatttgcaaagtctaaagtttcaaagaatgtttgtcaaagttactgaaccagaccaagccatatttcatgagtcaagagcaggaatgtcctatttcccaaatagataagaccgatgctcatgcagaaaactgaacgtggatgcttgaagcaccaccaggtcctgtttagtcatcctccctttcctcctaccttcccagggccaagcagaattgtttaaattggccccagcactattgaccctgcaggacagcctctcagtaccccttgtgtgcagatgtcagaaagatttgggactgttctccttagctgagcagagggcaccatttatatttcaagctgttcctcttgagctgggagggcaacggaacattgggtcaccctgagatgtgctgcagcccttggcaggcctgccccctgccttggggaaacatcaagcgcatagcttgctgggcagtgtgtacttttcctttgccaaagtcctcttgaactgactaggacatttacacaacacctagcactcctgcaaaactgcaatccaaccctttttggatgaagctatctcaaacagatttctcaaaggtatgccctgcctggtaaaagtccctacctaatgttggtgcactgctttgcagtttccaaaacatcttctttcaggggctgtaatcctgtatgtatgcaacaaataaagaaactggtaagtgacttgcgcaaggtcaccagcctgctagtagctaaaccttatttagccaactttaagagaatggcaatctttaaaaatgacctgcctcatagtgttaaataaacactatgttcagatttgaacttaatatatgactttcacttttctttcttaggagttaggtgttattatctggaagaactattctttcgggttgttctcttccctggtattttttttcccctgccacttgatcaaacaaaacattttaggttgacatttccaacacttctctttttttccctactagatctgaaagctatctctgcattatactccatcagtgtgtgtttgtctgaagttggggttgggaggagggggcagtttgttttcttctgagcctagtattccttaatactcttttagagttttccctgttgtaacattgttctggtgtttatctaaaacatggtgaccccctaattatccatgccatctaaagaagcattatcacagataatccaaaaccatggggaatgcttggattgccctctaggtaaaggctgtttgtcccccattttatgacttgggactttatgcctagcttgagagtttatgaagttagcctgagtttcatgagaaactgagcccaagtttcttaattccttatatcctgcctacatcctgctgttccactgccgcaaaatgtgtttcccatgaattccagaacctagatgcattaacaactagcccttcaatttattctcctcctgcaaacatctggcattccctgtgtcagctgactggtgccatggctaccaagaagcctttccattttctccttaattaggaaattgcaatgtacatctttcctcctccctgtgtatcccctcatgtccctctcctgactacccactacaacacacaccaatgtctttgtcctctactgctccaacatgaaagctcatattktatatcacctccttgggtggccaggcctttctccagctgcctgcacttaagttttgtgccttatttcatgacaaatatttgccctctcactcctcagacatttgtgggctggccctattgctgacactaatcactactaacttacttgttgccaaatccaatggatatttttcattccttatcttccttgatggccctgctatataagacaccttcttctctcctgaaactttctgttcccttgaatgttatgctatcctttcctagttcttttcctactgtgattgggatcccccagcattctgtcctcatcccacttttcttctcagtgtaggcctctcccagggtggttttatatactgcagggatttcagccaccatccataaaatgataaatattaaatctctagctctagttcagatctttcttcttagtttctgattggcattgtcaatttcttgctggatatctctgcttagatttcactggcaccataaacatgtctatacagaactccattaccaacccccaccagatgtactccttcctaaattctatctatgtcttccccatcacaacaaatggcatcaacaagcactgagctgctcaagccagaaaactgggagtcatgcttgtcttctctttcctttccctactacctccaatccatcattaagtcctgtccatttgtcttctgaaattgaacttgaatacatacacttctctccatacccatttctccaatctaggctcatataatttcttgccagaattacctcaataacctcaagactgatctctcagcctctaatctcactctcccccatcaatttgccactgtcctgccataatctttccaaaacacaaatatgtatcatgaaactcttgcttaaagtccttcaatggctcccccatggacttcacaataaaatccgaactctagaaaacctataaagtcctttattacctggccctggactacctctccaatattatctctcattattaggaaccctcctcacttcagaaaacaaaacaagacaaatattttcaaaaaacatatgagttcactgaactatttatagtcctcagagctactgtgttgtttaatgtgttgcaggttttatacttgccaccccttctacatatactagtcttccactagctctgccctttctctgttgacttgcttctatttttccatcctttaaaactgagcacagatttcacctctttgggaagatttccatgatctgccaggctggggttgtctactcttaccatcatttctcttcacttgtctgctctccactatcttaagaacaattaaagggcagagacagtgttcttagactctgcagagtccgtaggcactacacactgtctcatgaaagactgaccaactgaccaagcaattttgcataggtgtggttctagccctactctccacatccaggattagctgttaggatgctgtgaagttgatgggaagtctcctgttgagggagtaatccctgctgctgaaagaaggcaaagagctggggcagtcattttcacatcttctttagctcctgttagctgcaaggaccacacatctgatttcgatggttttctctgggattctgctttccttaactcctctgagtttttgacctggcctcttcttttgcttgattgcttcttactctatacctaataatgcaagggacttggcaaaatgcttatcttttacttccaacaattcattctttctccaagatgagaacattaatgaataattgtgtcaaaggtaatccctaactttctttgtgacgttgtttccaccctcctctccaccaaacctttcattaaaaacctcttaaccttttgcaaagttgatggtcttgttcctcttccttgtgggaggggggaagtaacgtctgagcagagaagtagccactaggtggtagtaaaggacggggtagaaaatcaggggtctttgtatatttacatatggttctttcggttcaggataattaatgatagtgttaaaacatgtgtctctgcacagaatcaagatgcaatcatagccctgcagatgttcgtggttatcttaatcatttatttgattgtattgtgacattacaggatttatggaatatattatatgtactagtgagggaggcttctgctagagaagagccaaggagctggagaaggagatagataaatacacagctgtggagacaagaacactgctttaactatccagagacctaagtgtcatgcgtgagctttgccaactggatgactttggtttggtgctttcccctctcaaggtctcagttttcccataggtgggatgagagatttgggatgtgtgatctcaaaggacctgcaagctctgacaatctaagtcagacaccacattactgtaccctgatggttccttgcccctagagtgcattatcgtgctttctagtattgaagtgagatacggaaggtgatgtttgacaatgtcctatcctctgaatggtgtcttggcagctgcctcagatataactcatttgctgtggcttctttactgctgctgcttctagatgctcctgacagctgaaattgtgcttctgcaggaatgtgcaggactctccttccttggtcatctggatggtgtgatttgaagagtcacaggaatttctcttcaccaaaacccaacaaaatcttccctgccttgcctaggagtcattctgcttaccgttctagctttagaaactcgctctttaaatgaagcattgccctgtccttgcattgcttgtataaatctcatgtgcctctctgatgagaggagccatgctcactctgcatatctgtgtgcacaaatcacaaattttgggggaccactcagttttccttttgctgtccctgctaagtcatatgacagagacatcagatattaagacatgagtgagcatcttgcaggtcaacaagcgacatattatctcctcctagtctaccccctccttcagttgccagatgtgtgcccctttttgcttcttgttcttcctttcctccctagtctctaacttccccttttctccctcaagacttccttccctcttgctccatttctagctttccatccctcattcctggtttctccaccatggcctcctcctcacctagtttctcccctctgccttcagttgcctgggattgcttcctatgtcacttatctttgactccagtttctattttttgtcatttatcagcacacatgaaaactgcagcagcaggatagcagggaggagttgctgcaatgtactttatagaggcatcccacttatccaaagattcttaatctcagagcctgaataagtggtctgcaaattgggggggtggaggggggagggcatgcaggtcaatttgttgggtatagaagaaaatatgaaaatttctattcacatttaatttgagagacactagaaagaaattaagatttaggattaaataatttatataaagtgtttaaagctgtgtggttcactaaatgctatgtattagactattattattactattatatgtaacatgtgtattttcactggcatcctcatcaggtgagttggctttcttcggctttcctgttgtgcatactctgtaaggtatcctgagggaagagtgggggctccacaagatggaggggtgtccttggggcccttactttttttcctgaatgtataccagagatattgatgtttccttggacctagttaagtagatttatggatattatctaactacatttaaccctcacaaaatggacaagcagcttaagaagattcctgcaaatagaccatgtattggagataatactagtaatgtaagcacatggcagagctcacacttctactcctaaaatgagatttttatcagcctcattatgaagtaaaaaccatggtaatctaattacacctgacaagaagtcagcaaaaacatattgcaagaataatgaagactatatgaaatatggatttatgtcaattctcaatgatgaaagatcttgccctaagtatataattgtgccttaaggtattagctaataatataataaagccatcacaattaacaagacatttaacatgctgtttatttcatctttgtctcatccttttacactttttatttattgtgtgtttcattttatatatattatcattaatatatgggggagagattaggacatgtgtatgatttatataattgttaacaatgtataaatatacatgttttgaggaagcatgctcaaagcttttctaattgaaaaagggtgtgcaatcaaaaggatttggagaccactggcctaaaccatacttaaaatagctgggagcccgcagacagaggcaaaagaactctggataagagaaaaataactgtcacaaagtctcttgctctttccttatagcatagtcatgcaaccaactttagagcttcaccttgacaatttcacatagaataaagcaatggagatctcaggaactgggagaagtgaaacaccaaaggaacttataaaataataaaattgcaaggctggaaggttggatccagccctcaagaggtacatcgtaggttacaaaaggctttcctggcatgcctatgaatgctctttccctcactttaattatgaatgggcttggaagaaagtttcagagagattaagagactgtcccaagatctcttgtaagtgacataactgagatttaaatcaagtgttccattcccctccatagtgttctttccaccatgtcaaatggcctctgaaacctttgtggccataatcagctgagctccctgcattactcgttgcagtcagattgttgtgattggaggaatacttggagtggagaaaatctgctaggaagacatccacgagatatcaacaaatcaattgcccttcgtcctccaccctagtgagtagtaattcctgactgcatgtatagcatccatttatatccctgtctgggttttaaagtgtttttctaatatccttctcttttaaaggtttaagaaatgaattccaagcttaaggaaagcatgttttttatatgtgattacaagttctgtgaggagtcatgtcagttttcacagctgtaatgtgtgtctgtccctttatgtaggccactgactgtatgaaagttcactgcaatggagttagaaacatgtggagatgaaattaccaagtatatgtcagggaagtaatttggtgtctactttgagaagactcgcattaatggaagtcttccaagaatgtttaagaaaattaattgcacagcaactctctaagctatagtaaaagttgatggaaaaatgtgcattgctttgcagaaatttgcttcactatcatcttttcaaaagagcttttattttaacaaatgaagcacatagccaattatttaatgaccatctttacttttagaggtggaagtcctagactatgttctgtgttttcttttatctcattgtgttttgtgaggttcaagccccctagaaaaacatttaagaaagtactctgggggctaaatattggtgcaggcactgtggggaatggaaacatttcataagtaccagacttctacttagggcggctacacacacacacacacacacacacacacacgccaatgtttgactacccatcactgcatctgattaaaagtctaaatggtaaatcacgaaacctcaaatggatagactggtatggtctgtagtaattaagctatctctttttaaaaatattatgacaaaaaatatttctttaggaatattaatttggtgagggttatccagggtggattggagtaagagacatgataggcagacactaagctccctatttttagatgtaagtggcatgtccaagaccccctagcacaacagaatggaaactttgttttttctgctgcttagatgctttctttcagtggttttctctattcctgaatacacacacacacacacacacacacacacacacagagagagagagagagagacccaaactagtgatttgatgatgtgacctagtcttcactttagatgaatgtatgacattttaatttttaaaaaattagctggaaaatagttctagctcctttccctcacatttgtctaactctttggaaaccagtgtccccattggttagtccctactaattccacttaaggagaattcatcataaaatcaagtggaattggcatcactgagatgatcctgtcttgattccagaggtaggactattagatgcttttctctgtgggatgttaaaagctcctgtaattactatgatgcccagggagaaagaccaactcaaagggtcctgaaagagcatctgtttcctacctgacaaattttattgtgggggttataagtataaggcagagtttggggaatcatgaaagaaggaagtcattgtctcatataaaacagattttaaagcttggtcagcagaaaagtctgcagagtaccttagaattgtgcccttatcctgaattactggctgtgaccatggcaggctcctacggtggacttagctaagccctaggctttgctatgacagcctttacaccttttatcctcagccttataagctcagttttactttttaatttttgaagaccaaaagaaaaaatgctcatttctttagccccaagaaagattaatgtatgtttggttatcaaagaaattgtggtctctgtccttgtacatgtctttgctagttcaagtaattgtagtgactttgcattccattacttcagttaggttctctctcagagctgacacgagtcagtgattgctacccccttcacaagttgttgggggaatgccaatacagctatgagcaagggagggagctgtggaggaacatgctgtggggcccagagaggaataaggggtaaccagggttcaggagccaggtttccccagagagagacaaaaagaaagcaaacaaaaggaagagacaggtctaaacaggctccccagacagggcccctttgctttaagaacagagccttaaacttcacaaagctcagggaggaaaggaagccaggggttaaacgtggcctttgaaattcagttgaagaattattaactgaaaatatacagagagaaaagccacacatatacacagcaacatttgctattcttaaaacccattcagacactctatgaattcagaaatgtgcttaaacctgcatatccacatagatactaatattgacccctcaggaaccacaaaggtaccacaaagacacagataataaacataagaagaggctcaacagcaggaggacacagagtcccaagatgcctaacgtgggttgcttttggaggcatgtggcagacagtttagtgatctgatgcgatccattatcagaactggggtcccattgctcctgtaattggtaccagagtaagaaatttaaacttctccctgaattttactttttaaatcaagtccaaactgagccagagctctgagagcagaatagaagcccgtctctccctcttcctcctccttcataaaaggagcaaggagacttgaaggcctccaaggtcccttggaggcaccagagcctgcaatgtggcaagtccgcctgccccctccctgcatttacagtccaatgacccaacgcccccagaccccagacagtttaaccagcccccgcagggcctccttgagagtttcccagattcctgaggggaacctgatcccgccctgggatcagcatgggctcttcacagcatccccgaaagatccttgctcctcggggatccccgagaacagcacccgttcccacacacagccatccctgcagcgccatcacccacccgtggctgggaggtgacctcccagggtcagtggygaggccgcccagggagagggcccggaggccaggcgggaaacagagcagaagcgacagaaattccccctgccagcccaggctgccaaggtagccctggacaatgccctgtctgacccgccgccccaccaagccaggccacggccagagccagagtggccttcggccctgagcgacaggagaaggcagttctgaagcaaacacggcacaaagacaaacgcagcctgggaactttgcaccagcttctacactggaaggcctaaaacgtcccttgttccaaacacccccctcattccccccaacaaaagtatttacctcatgaagaaagggagagcgctagactcacagaacagttggcagagccagaagggcaatcatctagtctgaccctttcatcttacatatggggaaacaggcccacagtaaagaagagacttaaactctgaagagtgtttttgaaaagtctttccttgattatgaaggcaagatgtgtgtgtgtgtgtgtgtggtgtgtgtactcacacacacacgtgagagagagaaaaagaggtgtggggacgagatgggatagaaaggagaagacaggagaggggagggaagggaagagaagcagaggggaggggagggactgcatgcaagcctgagccarggaacttgtgagcaggaacactaattgcagtgcaaacaaaaatatctttgagtgtaagttgcccctcactctagagaccagattttcttcccacttcccaggggcccacagggacccagaacagggtagagaaatttgccatttggggaatacaagtaagggcagtggttgagagcatggattttggagtcagatagctaatcttttaagccctggttctatcatttactagatgtgtaaatgatacacatttacccattgattctcaaccatattgccccccagggaacatttggccatgtctgggaacatttttggttgccacaactggtggggtcatactggcatctagtgggtagaggacagggatgctactaaacatcctataatgcacaggacagcccctcacaacatagaattatccagcccaacatgtcagtagtgccaaggttaagaaactctgcattaggtgaatggtttagctattttctgaacttcaatttatttatctgtgacttgagaataatattacctatctttcagggttgttaagataattaaataggctaatacctttaaagcaattaacataktgcctggcacaaagtaagcactccattaattattagatttgagtattatcaaaccctcccttaactccaccatctcctatagttaccatcctatttccctgttccccttatagcataatttcttgaaatatttgtttatactcaaaatttccactttcccaattctctcttgaacctattctaatcaggctttcgttgctaccactcctttcttataaaggtcacaagtgacaaacacattgttaattacaatggtaatctctcagtcctcatcttacttgacctaccatcagcatttaaaatgccttttcactctctcttttttgaaaaactttctttgcttgacttccaggatactattcctttgattattttcctaccttggtggacaaagcttcacatttcctttgttccaagagtagagggcttggtctgatttgttttgttgaatgaatgaatcaacaaataatatttactatgaagattaaaagagataattgtttaaagtgcttagcacacattaagtactcaatagtcatcaccaccatcactacgactgttagcattgatgttattgctattacaattattctcccctactgattatgagccccttgaaaatcagactaatggtactttgtcttggttctcctttgtatagagctttgttcaatagaacaatatatagccaatatccagaaaacagtttccaatgggcaggattagctgaagatggcgtgagaggagaaatattttataaagagttttactgaggttagaggtgggtggctagaggctcagaggaacagacatgcagtaggaggtcataccctacccattttcactctctgattcagaaatgataggaccacgaaagggaaggagtagcaattctcacccattaatcatcccaatacctccttgcctaggtatggaggagaagtgggcctgtggccaaatattagcatgaacagagcttatctgttgggtttgacagagtgaacaacataaattcacttttctcacagtactggattaacttaattttcagtcatcttgaactttgagtaactttatacactttcctgctcctaccaccatctttacaaatttgcaagtggcatttatattacccagagaatatggtcccttagggatagtcattagagaaagcacacaacccaaatctattagaaaacttttgaacactcaaagcatccattaggtgttgctgatcgttctgataacataatttggcagcattttcagttaaaatgaggtaataaccaaataggatctttgaaccaagtttcttttttccactaaaaacagaatgtctagatttttatataatattcaagccattaactaccaccaactgtggcattaaatggtggctagtctctcccttatccactttaccactcataccaagaaaacatccataatttggaccctgacttggaaacgtcattaaataaaacccatatgtttccaatccctgaccatccaaaaccccactcctactcacttgcattatcacccatatgcaataaccaacttgctttgcagatgggtcagcctatctgtaaattgccagataggacctgtccaagtgcagagaaaaagtttagtccgatttgcataagcaaccaaagaaaaatgtttgatccacaaaacccaaaccattaacctcaaaaggaattatgatgatacaactttattttcaaaacagcattttttcacttttttaaacaacagtcttattttttaagccttccagtaggtgcttaataaatatgcaagtgacataaaggccaccatgattttccaattggcttggctattggtggctttggcagttctactattatttgtcaaagatccttcagtatccatctgggcccacagaaagccagagctcccgaaagaagtgttgatagagcccaagggggaagttgcaattcattctggaaaggtgacccagctgccagcatcccctgagcctcctgtagatgccaaatgagctccttgtctagtaatcccatctgtgatctaaatgtatacagaaactgcccgatcatctcctcctcttgactaatgtgcacatggagatgtatttgtcctactaagatacagagattgctgtcagatctattaaagataacagttgtcatctttttaatcatcattattgtaaaaatgataaggataacacataataatgagatagtaatagctgttgctatctgtatttactctatgtcaggcattgtgctaggtattctatatatgtctcatttaattttttaaatgagatataaatatcataccataaagctcaccccttgaatgtgtagaattcagtgctttttagtatattcacaaggttctgcaaccatcaccactatctaattccagaacatttcattaccttgtctcgtttaattttcacagtagccctggggaataaatatttattttaaaccccattttgcagatgaggtaacatttacagaggttaaatgatttgcaaagctcccatagcacrtaagtggtggaattcagagtcaaagacagatctctctggaccccaaaccgaagcgtctctttctacctccctgatggttctttatttgtgccatggtctattttcattttcattcataggaacaccaaagggaacaattgtaaccttcttgttttgctcttctacttcttccccttttctcctttgttccttaaggaattgatggctttggtgtccctagcaactgccatcctcctgcctacctacaccacatacacacacacacacacammaaaaaaaaaaaaaacacaattgccctaacaaaatttattctcagctagtgacattagtttgcaatgaagatcttaaacacttataaaaccttaatttgttaccctttgttagacctacttttgtttaatagaaagtcattatttagcatagtgataagaaaagaacttaggtaccaagcttggattttacgtttggtctggtttccccatactaaacatgttaccctgggcagttgacccctgtaagcctcagtttcctcagctgaaaatgaaaatagtaatcctatgtacatcacagggctgctatgagggctaaattgaatatacatgctaaatgtttgatgcaatgtcttgaaacagagtacatgctcaataaatgctggtagttattttggtagcatcagtgagtggatagaatgtggaattatagagtacttgtcaagttatatggcctagaatcaacctaggcagcctgcccacaaggcgagttttgataaaaagcatttattaagcaaggaagtgcatgccaggtagtataccaattaagttaaatagctcctgcaaattcttgccagtttaatcaactaaaaacataaagataacttttggctttaaatcgctgactgctttcctcatggcagtcacaacattttcctctttaagaatctacaatgattcccaggtgtcatcaaaaaaaaaatcacttgacctgtagaatacctagtataacctggacttgtacagtgtcaggttgggtataacctgcctgagtaaaccaagtagcctcagcagacctgtatggttgggtagaatycgaagtcccaaatatagttcagattataacccatgggctattttagagttagcaggttgggatgagaatctggaatagatttcaagccaggttatcatttaaggttttaagtagcttccaaaatccattctaagcatgggcagggtgggcagttggcagaggtccaaataggctgcctgaacacaatgtaagagcaagtaccagagacccaaacttgactaataataatattaagtacttatcataggtgagacactttgctaagggctttattatgtattaattatctctttattcttacaacagttttgtgagaataagtggtatcatcctctccattttaaaaataaaggaaatcaaaggtcacataactggaaagttgtgaagctgagattcaatcccatatctgtctggttcaaatatgcataccctcaaccattatactgtaataatacctcccaaaacactaaagtactgctggcaaccaaaggcttggagacttgggcacaaggataaaatggtcccggcaataaagctggcttgctgttttgctagacaattattgaagtggaaatcatggcttttttttttttttttttttttttgcttttttccttctctttcctttcttttttttttttttttcctaagagacgggatctcactgtgtcatccaggctggagggtagtggcatcatcataactcactgcagcctcgaacacctgggctcatgaaatctttccacttctgcctccctagtagctgagacgacagtgcttttccttctactgtgtggtggcagcagtaagccaagaggctgagatgggggctgagactttcagggaggggctcagagaagccctgagttggattgaaacagattactgtggtgatttttcagggttttatttctcttgctgttgtacacaagttcactttgtcctatagatatgtccttggaattttgtcttgattgcttcacatattctaattttcattgttcacatatagaataatagcttctatcactctacctttaaagttcttatctccttcccttcatctagaagagaaaatgcaacaagcgggagaagatgaccctttcactcttaaagagcttcataaactcctaataaaggaaatgataacaatctttctaagaggcggccccattttgcaatgatgaagtctagatgctacagaaatagtcccagcaggaaatagctgaaggcggaaggcagtgttaaacagaaagcatgtgttgaaaaccaccttggtccctttggaagatgaaaatatgttgtaagctactgctgaatgttttctcccctctagtggtcagtggaaggaggagacaatggtggtataagtggtgcctactttttaactgtaaatgcaatattacaagtgatattcgaagaaaattgcttccataagaacaatgctataaatggaattatgtttcagaccaaggatactgtatcaaaaaaattaaaaatatgaccaacagtttgtgatactaacaaaggtacaattacagtaggagtataataattctacataaaaaattaagttgtatgccttatattgggcatagatatattctatacagtgattaaaaaraggcctctgctatatcatgtttgtcatctaaatctaaaatgccacctacaataaacaatacaatacacattgactaagcatttcattaacaattttgtttgccttcttagattttaactttaaagtgctctccaaggtaatctaagttctcaccacagaaccatttataaaaagaagctccacattcacccagatattgtttaaagcgtttccaaatgtgtctctaaaattaatactggcaatttcccgtctcagctaatcctctctgcatttttggcattttgtatcaataacattaaaaatgttcacagtctttaacccaggaattctactcttatgaatttaattgaaggaaatacaggagtaagaaagatttataagtgaagatactaatcagagccctatttgtaacagtaaaaaaaaaaatagaaaaagcctatatgtcttacaataggagaatggttacttaaagaagtatggtatatcccttacagtggaatatcatatggtcacataaagtaatgtttcttggaagaatgtttaatacttgtaaaaatgcttatggcataatgttaagtgagaattatggaaaacaagtatttatacaatatgatcacaattttgtaatgataattattctacacccaatttttaaaaaaggttgaaatgacatgcactaaaatgttgtcagtgcttatcaccagcagagaggattatggggaaattgttggacatgcagagaaagagaagaccacaaaagagactgagaaagtatcagtaaataaggtcctaatgagagctgaggaaatgaggtgactggagctagataatggagctgggtaggtcctcttggacagaagcctaggttgattctgtgaatgagagggcagacccaactagagtgactagccaccctggtttgcacaggactgagggctttcccaagacatgggacttaatgtgctaacactggaaatgtcctaggcaaactggaatgaattggtcaccccagactcaagacgtatctgatttggaaggccctatgtgatctccaaattcaacctctttctttttcagattaaaaagcacccaggaactgggagatgggtagtgtcatgaccaaagtcacacaggtagcagagcacaggactgagagttcaaaggatttagctctgctctctgctgtgctgcttattaacaagacatttaatctgaggtttaggttaaggacataacaccttgcgtgttcaccagattatgacaaagaccaaatttaattattcacaaatacaaggagttaccagtaacaataaacaagtattaagcacatactacattgctttgggctcaattctaagatcaaggaagtattaataattccaaatttatagaattatggtaaagtctaattgagattatatttctaagcaaattagtacaatgtttgccttctacaaaggactcattaaacgttagctctgatgattatatgtcacattttaatacatagatgtggaaatcccacaccacttaatagtaactgtgagacaggtacttttattaatgatcccattttagagacaagaaaattgtggcccagagaggttatttgccttgcttaattttatacagtcagcaagtgacaaggccatttgtctcctggtcaagccctcttttctacttcattaaattccactcagtagaaagcctttttggatgagagcacagtgaacactttttctttttacagtaaacttccttcttcctacttacatcttcagtttaatgaaagcctcctcttggactaaatagaggccaccagggagccttccatgagatattttgttagcaatcttctgagaatttcaagatcctttagaaacattgtaaaacaattatagagtctgcagaatatcgcttacagggtaaggattaaagttagggatgctctggtaaatgtttaaccactggctctgggagagggtgagagggggacactgattagtaacatttgcagatatccatggtgtaagtatttccagcatggctgatttcaaactactgacgagattcgctcctgcaaaccagtgccagccaatgcaggccagtgcaagccagttccagcacaccactggaagcagaattccatgaggccattgctatccttagtttatataaattcaataagaattaaagtgtgagcgttattcagggagcttggttttaatatatgcaaaagggagagagaagtgagtgcaggccaatgggctgggatattgcagagagtaggacaacttaagggaatgcccagaggaatggaggttgctgcctgcaagtctatgtctggcccttcttgaaaccttttaggaacaccaaagcttgcacctacaataattagagaagtttttttttaaaacgaaaacaaaaacaaaaacaaaaacttggcacaagccttttgttttcctgccaactttttaatttgaacattttcaaaccttcagaaaagttgcaagaatagtacaaagaacacccatatacctttcacctagattcaccaattgttaatatttttccacacttgctccatctctttatttctacaaactatttgagagtgagttgcagatatttgaattttcacccctaaatacttaagcatgaatctcctaagaacaaagacactctgatacacacacacacacacacacacacacacacacacacacacacamtatactcattgctcttgggaaatataacattgataaaatatacaggtttagagtctgtagtcaaacttccccgttatcccaatgatgtccttataattttgttttttcaatgcagaatccaatcaaagattatgctttgcatttagctgacagcctctttgatctccattaatctagaacaattccccagacccccacttttattcttttgtcttttatgatgctgatatttgttaagagtccaggccagttgttttgcagaatatctctcagttagatttgtctgattatttctcatgaatacattgcagttaaaccttttagtttactaccatgttatgtccttctcagtgtctcacatcaggaggaacatgatgtcatttttccaattattggtaatgttaaacataatcatttggttagggtggcgcccaatatatttctccattgcaatgataccagtaaagcttatcatttgtgtgaatattcagttccaggagaagcttctttacactgaaagtataaattacttggttcactgcagaaccatgggttgaaaaggcattatccctaattaaatgaaaaaaaaaagagatttatttaaaaataagctggcactaagcttcttagccaaattcatgaactattcacatgacaagggaccttatctaaataaggagttccatatctaaattgtgaactcctggtagagtattatgccccagtctatacacgcctttatgtctagaacttagcctagtgcctaggctatagtatatgctcagaaaaaggttattgaataaatttctgtccaattggaattactgtctccatgaatgagaaattaatcatactaaacaaaaaaaatgtactttttttgtcaactggcaccagctggaattgatttggctgcttaagtactatgtttctcatgggaaatgacagagcttttcgttttcatccaggtatttgaccttacttaggcactattcaagcctttggctgctctaaaaatcttagcttttctatatcaaaattagaagctgttctaaataaattaaagatcaaccctgtgcttgttaagattatatttggctacaaatgacagaaaacccaaaataacagttaattaaacaatacagtcatttatttctctctgatataaaagttcccacttttggccaagatggagcaacaggggctggacttaccctcatgcctaaaacaagtgaaaaaccagacaaaaggaaaacaatggttttcagacattggataccaggccacaaggaacagtgattcctgagagacaggaaactaacaaggtgagccctatgatgaccccagcttattacctggacagagtttcccggcagtggtacaaggacagggaactgaggcaaagcccagtagatgaggagatgcagctgggaatccagggagacctagacaggtagaatttgcagaacaagtattagagaagagagagctgcatgaaaagagaactccggagatatttggagtcctccttgaatcttcggttgagcactgagcaacacatgtgtgtaaggaaactaacctagactggggaaagaactacccaaaaggagcagaaggaacaatcctcagagatcatatagggctgtaaatagtgcctgccccaccagccagaatagaaaactttataactcacatagcatcagagtactaaaaggatcatgcctcagtagcagtgccaaattagccctaaactcaaggctgctctagagctgccaaataaagttttaaaacaagccttgaaagaatctgtttccaagtaagttaactgtgtcacagagcaaagccaaggagtatttacagaaacacaaaatatccagcacccaaccagataaaattcacatctgacttacaaacaaaaacgaccaggcatcaaaaagagcagggaaataggactcytaatgagaaaagtcaaccaaccaaaactgacccagaaataacacagattataggattacaagacaaagacgtttaaacagttattataacttttggtgtttttaagaacctagatgaaaaattgagtatattaagtcaagacatgaaagacccgaatagaacttctagagtagaaaaattcaatgttgagatgatgtaagagtccatgtaggtagttgtgggcttgaatggcatctccatgatcatcagggacccagactacttctatcttctttctccactattctcaacatatgatttccaattcagggtccaaaatggctgctctagcttgagccatcatatcttccttccaacagcaccatgagagactaggggaaaggagtatgcccctccatttaaagatgcttagaaatctcagccagacatgatcgctcacaccttaatcccagtgttttgggagacctggatgggaagatcacttgagcccaggagttcaagaccagcctgggcarcatagtgagactttgtctctacaaaaattttaaaaattagccaggtgtggtgatgtgcacctgtagtcccagattcttgggaggctgaggctggaggatcacttgagcccaggagctcagggctgcagtgcactatgattgtgtcactgcaccacagcctgagtgacagactgagactctgtctctaaaaaaagaaatatctcatgacatcccttttgcttacatcccatggttcagaacttagtcccagggtcacagtcacctaaaagtgagatcaagaattgtagtctttattctgggtggctatgtgcctagctaaaatgtcagagttatatcatttaatgaagaatgggaaaactgaaataggggaacagctagccatcacatctcaagttcagagcctgctcatagtgcagaagaggtcctgatccagtttgaatagcattatgatccctggcttaaaaataacttgaataagactgcccctcggtgtttttgttacctagaaattaaaaacttgtttgtggttgtttaaattccagcccccacacttctatatactttcgggtttatctcaaacaaactgccagagttgcttcattttccaaatcagtgacaccaagctagaggtggagcttaacattttgtttgacttatgcacatgtttatcattgccaagaaaccagggtcacccagcctatttataccctactcctgaaagagctcactttctttctttcctaataaagtcactaacacctgcagctgaaacaaacattcacaggagcatccacactgcattctttagaacaccagatccttcttcctgatggagaaaaaattggctcataatagatacaacccttttctatgggaccacctcactcctacccagaatttcttttggttagccatacagctattcctcaatcttgaatcacctggctgttacaacttattggtcctttttaacagcttttcagtgtttctgggtatattattgctctcataatgccaaagtggatgccattcttctcaagagatggtaggtgggcatacagttgatctgtttttatcaggcaagactgtattgctgaaaaayggcagtttttgcaaggtgccatacaaaccaagtgtcatggctggctcactgagtgttcctgcagagcattttgcactagctctgtgtgctgtcttgagcaactcagacccaaaaaaaatctgcaggaagtcaggcctgggtgctttccagttgctgatggctttgattgctttaacaaccctccgctcagacattgccatgtgacatttccactttaccccgataaaagctttctcatcctgtaatcacactgcttctctatgattagcatcacaactatcattattctttacaccaggtaatggtgaattgtgaagtataacattcacaggggttttagtatagccaactaacaatctagagaaatacttgggtggaagagattgggatagaacttccagtgctgatttggactccagattgtgacttcagaggaagattctttcctcttgggctctcctactgtgaacctgtccacagaggcatgatagaatatgcccaataaacacactcactgacctgctgtgccctatctgatttgatttcccactgggcacccagtagacscagagtatacagcctgggccgcttgggaaagaacaggtggtttttgacttgacaaaatgctgtttgtcaggtacaatttcgttttcagtaagacctygctgtttggataaaaggaaggataggggtagaaagttgaggtaaagggaagataacctgtgggattggccaggtgtttctataaagaggaaatggacactgagaggctaagttattttccaggtgaaagtaagaagtaaacctttgttagacatggaggcacgtttgaagcttgatgctttatgaactcgaaaaactaaaactcggttccatttattttaagtaatccttctttaatcatgactatcaaaagattggtgtaaaagcttgaactgccaatgactattaatactgtaaattgcaaacatttgctagctgaatgcctgtctttctgaccacttttttattgattgggaaagcataacattctttaaactggtttgctacagatctgtaaagtgtctggatccaaatagtgattttctccagttgaggcaaatcaaagagttttttggtagtttgttttgttttgttttattttgtttctgtatgttgtcacctgtattcatgctttactatattggatcatgtctttttctttttctttttcattatactttaagttctggaatacatgtgcagaacatgcaggtttgttacataggtatacatgtgccatggtggtttgctgcacccatcagcacatcatctacattaggtatttctcctaatgctatccctcccccagccccccagcccccgacaggccccagtgtgtgatgttcccctccctgtgtccacggttctcattgttcaactcccacttaagagtgagaacatgcagtgtcagttgtctttaagtaaaaaacttgagagtttcacccaattatataaaaaagaataattcagctttttaggttttgtatctttcttttcagtgggttaaacctaaagcacaagagctgtctgtcttctgccagtcaggcagagcaatggagtagtattagcaaatcaataaatataacactaaacctactgaatgtattacagttatttctgcctctgtattttgggcttcatcatcttgctcacatttctcaagtgtgacccttcttcagatgttgtcctctatcaccagagcatcttttcaaacagcaaattagtatccatcaatcttcctcccccacagcccaycttttattaaagaggctctaccttcctcccaagccctctttttttcttggaagaccattttttcttggaagaccatgtctaatacattcttgtcactttgtatgcctttgtcatggtagattttaaaggctttcttaagtgctccagctgtaaagcactgtgtcctgctgttctctgtaatcaaggatgtcagatctcacatgatcagctttaggtactgaagagaatagaaagatagtctttgagactcattccactccccgcawccccgccgccaaccccccccaaaaaaaaacttagggggatcaccctctggccaaaggagaatgttcatcttaaggtacagatgctctaaggcaaacattatttgaactgacaggaacatagcaagtacttactgaacacttagaagtgtacagaattgagctaggtacaggagcggaaatacaagactggcatggtatggttgtcgccttgaaagatgttctatttccagcttagggaagagagaaataaactgcaaaactgtaagagtaaacagtccatcttataaaccatcaaatgttagagttggaaaggacctttagttatcatctagccaaactgtgttttcaaactgtggatcaccaagccctaagattcagcagagtgcctcaaaggctgactatctgcccttcttgcctctatacctttcttttttttatttttttattttattttattattattatactttaagttttagggtacaagtgcacaatgtgcaggttagttacatatgtatacatgtgccatgctggtgtgctgcacccattaactcgtcatttagcattaggtatatctcctaaagctatccctcccccctccccccaccccacaacagtccccagagtgtgatgttccccttcctgtgtccatgtgttctcattgttcaattcccacctatcagtaagaatatgcggtgtttggttttatgttcttgcgatagtttactgagaataacaatttccaatttcatccatgtccctacaaaggacatgaactcatcattttttatggctgcatagtattccatgatgtatatgtgccacattttcttaatccagtctatcattgttggacatttgggttggttccaagtctttgctattgtgaatagtgccgcaataaacatacgtttgcatgtgtctttatagcagcatgatttatagtcctttgggtatatacccagtaatgggatggctgggtcaaatggtatttctagttctagatccctgaggaatcaccacactgacttccacaatggttgaactagtttacagtcccaccaacaatgtaaaactgttcgtatttctccacatcctctccagcacctgttgtttcctgactttttaatgattgccattctaactggtgtgagatggtatctcattgtggttttgatttgcatttctctgatggccagtgatgaagagcactttttcatgtgttttttggctgcataaatgtcttcttttgagaagtgtctgttcatgtccttcgcccactttttgatggggttgtttgtttttttcttgtaaatttgtttgagttcattgtagattctggatattagccctttgtcagatgagtaggttgcraaaattttctcccattttgtaggttgcctgtgcactctgatggtaktttcttttgctgtgcagaagctctttagtttaattagatcccatttgtcaattttggcttttgttgtcattgcttttggtgttttagacatgaagtctttgcccatgcgtatgtcctgaatggtaatgcctaggttttcttctagggtttttatggttttaggtctaacgtttcagtctttaatccatctcgaattaatttttgtataaggtgtaaggaagggatccagtttcagctttctacatatggctagccagttttcccagyaccatttattaaatagggaatcctttccccattgcttctttttctcaggtttgttaaagatcagatagttgtagacatgcggcgttatttctgagggctctgttgtgttccattgatctatakctctgttttggtaccagtrccatgctgttttggttactgtagccttgtagtatagtttgaagtcaggtagcgtgatgcctccagctttgttcttttggcctaggattgacttggcgatgtgggctcttttttggttccatatgaactttaaagtagttttttccaattctgtgaagaaagtcgttggtagcttgatggggatggcattgaatctataaattgccttgggcagtatggccattttcacgatgttgattcttcctacccatgagcatggaatgttcttccatttgtttgtgtcctcttttatttccttgagcagtggtttgtagttctccttgaagaggtccttcacatcccttgtaagttggattcctaggtattttattctctttgaagcaattgtgaatgggagttcacycatgatttggctctctgtttgtctgttrttggtgtataagaatgcttgtgatttttgtacattgattttgtatcctgagactttgctgaagttgcttatcagcttaaggagattttgggctgagacaatggggttttctagatatacaatcatgtcgtctgcaaacagggacaatttgacttcgtcttttcctaaytgaataccctttatttccttctcctgcctaattgccctggccagaacttccaacactatgttgaataggagtggtgagagagggcatccctgtcttgtgccagttttcaaagggaatgcttccagtttttgcccattcagtatgatattggctgtgggtttgtcatagatagctcttattattttgagatacgtccaatcaacacctaatttattgagagtttttagcctgaagggttgttgaattttgtcaaaggccttttctgcatctgttgaggtaatcatgtggtttttgtctttggttctgtttatatgctggattacatttattgatttgtgtatgttgaaccagccttgcatcccagggatgaagcccacttgatcatggtggataagcttttcgatgtgctgctggattcggtttgccagtattttattgaggatttttgcatcaatgttcatcaaggatattggtctaaaattctcttttttggttgtgtctctgcccggctttggtatcaggatgatgctagcctcataaaatgagttagggaggattccgtctttttctattgactggaatagtttcagaaggaatggtaccagttcctccttgtacctctggtagaattcggctgtgaatctatctggtcctggactctttttggtcagtaagctattgattattgccacaatttcagagcctgttattggtctattcagagattcaacttcttcctggtttagtcttgggagggtgtatgtgtcgaggactttattcatttcttctagattttctagtttatttgcgtagaggtgtttgtagtattctctgatggtagtttgtatttctgtgggatcggtggtgatatcccctttatcattttttattgcgtctatttgattcttctctcttttcttctttattagtcttgctagcggtctatcaattttgttgatcctttcaaaaaaccagctcttggattcgttaattttttgaagggttttttgtgtctctatttccttcatttctgctctgattttagttatttcttgccttctgctagcttttgaatgtgtttgctcttgcttttctagttcttttaattgtgatctcagggtgtcaattttggatctttcctgctttctcctgtgggcatttagtgctataaatttccctctacacagtgctttgaatgtgtcccagagattctggtatgttgtgtctttgttctcrttggtttcaaagaacatctttaattctgccttcatttcgttgtgtacccagaagtcattcaggagcaggttgttcagtttccatgtagttgtgcggttttgattgagtttcttaatcctgagttctagtttgattgcactgtggtctgagagatagtttgttataatttctgatcttttacatttgctgaggagtgctttacttccaactatgtggtcaattttggaataggtgtggtgtggtgctgaaaaaaatgtattttctgttgatttggggtggagaattctgtagatgtctatcaggtccacttggtgcagagctgagttcaattcctgggtatccttattaactctctgtctcgttgatctgtctaatgttgacagtgggatgttaaagtctcccattatttttgtgtgggaatctaagtctctttgtaggtcactcaggacttgccttatgaatctgggtgctcctgtattgggtgcatatatatttaggatagttagctcttcttgttgaattgatccctttaccaatatgtaatggccttctttgtctcttttgatctttgttggtttaaagtgtgttttatcagagactaggattgcaacccctgcctttttttgttttccattggcttggtagatcttcctccatccttttattttgagcctatgtgtgtctctgcacgtgagatgggtttcctgaatacagcacactgatgggtcttggctctttatccaayttgccagtctgtgtcttttaattggagcatttagttcatttacatttaaggttaatattgttatgtgtgaatttgatcctgtcatgatgatgttagctggttattttgctagttagttgatgcagtttcttcctagcctcgatggtctttacaatttggcatgtttttgcagtggctggtaccggttgttcctttccgtgtttagtgcttccttcaggatctcttgtagggcaggcctggtggtgacaaaatctctcagcatttgcttgtctgtaaaggattttatttctccttcacttatgaagcttagtttggctggatatgaaattctggattgaaaattcttttctttaagaatgttgaatattggcccccactctcttctggcttgtagagtttctgccgagagatccgctgttagtctgatgggcttccctttgtgggtaacccgacctttctctctggctgcccttaacattttttccttcatttcmactttggtgaatctgacaattatgtgtcttggagttgctcttctcgaggagtatctttgtggcattctctgtatttcctgaatctgaatgttggcctgccttgctagattggggtagttctcctggataatatcctgcagagtgttttccaacktggttgcattctccccrtcactttcaggtacaccaatcagacatagatttggtcttttcacatagtcccatatttcttggaggctttgtttgtttctttttattcttttttctctaaacttcccttcttgcttcatttcattcatttcatcttccatcactgataccctttcttccagttgattgcatcggctcctgaggcttctgcactcttcatgtagttcttgagccttggctttcatctccatcagctcctttaagcacttctctgtattgattattctagttatactttcgtctaaatttttttcaaagttttcaacttctttgcctttggtttgaatttcctcctgtagctcggagtagtttgatcgtctgaagccttcttctctcaactcgtcaaaggcattctccgtccagctttgttctgttgctggtgaggagctgcgttcctttggaggaggagaggcgctctgctttttagagtttccagtttttctgctctgttttttccccatctttgtggttttatctatttttggtctttgatgatggtgatgtacagatgggattttggtgtggatgtcctttctgtttgttagttttycttctaacagacaggaccctcagctgcaggtctgctggagtttgctagaggtctactccagacactgcttgcctgggtaccagcagcggtggctgcagaacagcggattttcgtgaaccgcgaatgctgctgtctgatcgttcctctggaagttttgtctcagaggagtacccggccatgtgaggtgtcagtctgcccctgctggggggtgccttccagttaggctgctcgggggtcaggggtcagggacccacttgaggaggcagtctgcccgttctcagatctccagctgcgtgctgggagaaccactgctctcttcaaagctgtcagacagggacgtttaagtctgcagaggttactgctgtctttttgtttgtttgtgccctgcccccagaggtggagcctacagaggcaggcaggcctccttgagctgtggtgggctccacccagttcgagcttcagggctgctttgtttacctaagcaagcctgggcaatggtgggcacccatcccccagcctcgctgccaccttgcggtttgatcacagactgctctgctagcaatcagcgagactccatgggcgtaggaccctctgagccakgtgcgggatataatctcctggtgcgccgttttttaagcccaccggaaaagcgcagtattggggtgggagtgacccgattttccaggtgccgtctgtcacccctttctttggctaggaaagggaactccctgaccccttacgcttcccgagtgaggcaatgcctcgccctgcttcggcttgtgcacccactgtcctgcgcccactgtctggcactccctagtgagatgaacctggtacctcagatggaaatgcasaaatcacccgtcttctgcatcgctcacgctgggagctgtagaccagagctgttcctattcggccatcttcgcctctatacctttcaaccagtggtacttctttgaaattctctaagattttgtttggacaaaggttccattgctttcgaaaatttccatgttattaatctagtccagctttctcatgatacagatgaagaaacagagccccagaaagtaagggaatgtttgaggtacatagccaattaaaggttgaaatcctcagtatcctgattctagtgatccacttccccatgccacctagcagccaagcagcaaacacctttaaaatggcagagtggcytgctgccttaggaagagccacctgccttaggagcaggaagaagttgcctttggttatcctgagccaggtgctcaggtctgcattactctaggaggtcaaaaaaaggagagatcagtaagggatgtagtttagccttccattttgctgccctcaaatgtcctcatctttcacaggggataagagtacctagctggtagagttgttgtgaggattaatctagatcacaaatgcaaagtatctgggacatagtaggtgctaaataaatggtagaacttaatactataactatttctttggaacataaagtgcctatcttctagctttgtggctcccaattattctataagcaaagacaatgagaatctgtgaatcagaatcyaggtccaaagtttacctggtttaccagctaaatgtcaatttcatgtcagttggtgggatcaaggaacagccttaacttgccagagagcttggcatgctttggcaaggtctgtgccctactctgccagaacaaagtgctaaaaagaagatgtggtattagggcttgtttaagacataggtctggaaaatacaattctttgctttgcctctcataatctgactggcataaatgagggagayaattgtcataagggatggttgtttttcttggataaattccattcttgagaaatcacgaatgaaatttcctcacttggaactaacatttgtatacattgctacaaagagatctaaacaggaggaaccttctgttttagagaaatggcctggaagacatcatggatggcattgcctgctttcatagagtatgtgcttcctgtttagtgtctgtgactttggctggggaattttccaaggcaaaggttacattttgggcttgaacttcaaagctctactcatgtgcacccgtatgccaatctcagtcccacacgattgatttcctcctgaaggcatatgtgctttcatttgggtttcggccttggagacttcaattccagtgtttgtactctgctaattcccccttagattatacattgcatcccctcttctttcaattgctttatctcctttgagcagtgatcctgatttattaaaggttaarcagtttaccccaattgcccagttagaatgtggcaagagccaagaatagaaactaggtaatatgactctagaatttgggagcttaacctctatactctattgctcagggatttcaaaagcaagaggaaacacctcatggctggtggaatcaagaattaactcatacaggatagagcaatgggctttgtgggatgcataggattttaacagaaacgaagcagtggagtaatttgagtgtgccatacagataggaaaacacaggataaatatgggccagggtacttggcttgtcttgaatataggattgcttgaaggaggtattggtagataattccttgaacatagttgamagtatcttatggagaaactgttttgatagaatgaactatgcttagttttggaagcaatagaaggttcttcctttcttccktatttaccttttcttcccttccttcatttccatttttcttcctttcctcccaagtaatacaagtgctttatagaataaaaactataaaatttcaaaatagaataccacttgaaagcagggatgattagtgttaacatcctaatgtatatacccctagatttctttcttattaaaatatattaatataaaataattctgtgctatggaagacaagattctaagactcccacccccgcctatatgacctgtataattccctcctcttsagtgtgggtgggacctgtgaatatgatgggatattgctctcctgattaagttatgttacatggcaaaggtgctagaatagtcattcccatgattatattatagaaaaatgtccagctggctttgaagaaaaatcttcatgctgtgagagggccatgtggctgggacctgagagtagcttctaggaactaagactcactcccaacaggcagccaacaagaaaacaaggaccctggtcctaaaaccacatggaacttaatttttcaaacaaccaatgagcttgggtcacagtcctggctgatactacaattttagccagttgagtgtattaactatattttcttattttctgtattcctgatgctctggcctctggagcttcactgaatgggaagagattctccacggctagctgtatcttagagacagcaaataacttgcctaagaccatgtatttcatatgtaagccaactaacccagagcccacactctgaaccacctcctgcgtctggttcttacataccagaaggcaatattcttctgccctgatcatcgcagagccagtaaccaggaaactagagaccatccttatacccaagacccactgaaatcattcaagctagccaatccaaaacatgcttatcctgccttgcctttcccatggaaaccacaataaaggctctgggccatgctttctcctcacttcttctgcttcctgactgaccctggtgcttccccatgtagccccatgtagcatggcaagctccctcctcttaactgtgagcaacaaaacagcttttcagtggcacttatctcttgctctgtagacctcatcatacctaattaataataaaacctacatttcaggacagtgagagttcctaagcagagggcccagctaaaacatgttcacacttcctgttcatggaaactgtgacaataaatttgtgttgttttaagctgctaagttcatggaaatctgttacacagccatagaaaactagtacacatgaaaaaaaattatatataaacatactctatctttctctaacctatgtgttcccacttaatattagcatgtatatctccatgccattgaaagattttgagtaaaggaatggaacaattgaagctgagatttgaaacagcagtaaaatgtgggacacgtgagaaaacatggcaggagattatagagatcatctggatccatggtactcagccttggaatcacctagaaacacttttaaaatacagataccagcttcatccatgtccctacaaaggacatgaactcatccctttttatggctgcatagtattccatggtgtatatgtaccatattttcttaatccagtctatcattgatggacatttgggttggttccaagtctttgctattgtgagtagtgctgcaataaacatacgtgtgcatgtgtctttatagtagcatgatttataatcctttgggtatatacccagtaatgggatggctgggtcaaatggtatttctagttctagatccttgaggaatcgccacactgtcttccacaatggttgaactagtttacagtcccaccaacagtgtaaaagtgttcctatttctccacatcctctccagcacctgytgtttcctgactttttaatgatcaccattctaactggtgtgagatagtatctcattgtggttttgatttgcatttctctgatggccagtgatgatgagcattttttcrtgtgtctgttggctgcataaatgtcttcttttgagaagtgtctgttcatatccttcgcccacttttagatggggttgagaacacttggacacaggatggggaacgtcacacaccggggcctgtcgtggggtggagggagcggggagggatagcattaggagatatacctaatgtaaatgacgagttagtgggtgcagcacaccaacatggcacatgtatacatatgtaacaaacctgcaagttgtgcacatgtaccctagaacttaaagtataataataataaaaataaataaaaaagaaagtaaaaaatatatataaaataaaatacagacacctagaactcactactcatagatattttactttaattaatctgagatacaacctgggaatctggtattttaaatctccccagatgactctaatgcaaagccgaggttgataaccattggcagatagaagtagagagtgctatctcgaattaaagttgtcctactgaaataaaaaatgaragatgggttaaaaaaaaaaagcatttctggagaagccactgataaccaaacagtaagaagactgggaatcctactgcttatctcgcttttgttgttgttgttgtttgttttgttggttgattgcttggttttaattaaatttccactcatctcatttttattatgaagagaattttcatggggagatagaaatttgaggctggctatgcatacatggagtgacaggattgttgaggaggtctcaaggaacattttaggcaaaggaagtggtttgagtaaagtctcaaaagtgagaatcagtgttctaggtaccagcctgaagtgggttgacacagtgagtgaagttcgagtaataaggctgctacacagaggctttgatgccataggaaaccaagagtcattcatattcctttaaaagaatgagaacgaactgatttttctaaacagtagctcagcaagatgacctgagtgcaatataaagaaaagttagagaaaacctagaggccaggaagtttataggctgttacagtaagcaaatcatgagggaacagagcctagactagggcagagcaatggaaacagagaggggcaggacagatctggagatggacctgaaaaaaaagcaaatgtgaaagacctattggatatgggagtgaaagatgacaggggttgcacttgggcttggtacaaaggtaataaggaatttgattttggcattttggttagaggaagggtaaactggttaattagctttcagatgttattgtgtatacccgaaggcagctggataatacaggaaatacatccactgtagactctctcttgcccagggtagctggatgaggaatggatttcacaagagaaacatggtgtaaatatagtagttaaaagtagtttgcttctttctccctcactgtaaaagagagaacttcctttggactattgcatgaagtgagaacaatcacaaccgccaatagagtatgatttttttccctttatagacccccaaggtagaactttctaggtccatatctggttatgatttgtgtttttsgctggggttcaggccttggcatgtgacatgtaagctggtcactcatacctggagcagcagatggttgttcctccctcccttttatggctgagtctgctctgaatccttaggactgtaaattatttactcttcatctgactgaatccatttaatattatttcttaaaatacccctgcctgcactcatatttacttatacttttcttgccaagattttctaartatcctttctgatatttattttatcagtggaaatactggcctgacacaaattttgaagtaaattgtgaagcataggatcatctttagtcagcccaatgggatttttaagtrccactgtccctctcccttgggggagtcttgtaccacaaacaatggtgtgagatcctgctttccatcaagagtttattggttaatgaagcttgtggctggtgtggttttcctgtgtttagcttttggagctctcagaaacagttgcttggaagagagctggcagaattattgcccagcaaacttgccggccacagcccacaagacttcaccaacgctgacaaattttatggctgatttaatgaatagaacaagtatttgaataaacagagtaaagagctgttggcatcctgctccatcgtctgaagaggtctgaaagtcttctcattaaaccatccttactatctccttttgctctaagccgcgttgccttttctcaagtgcctgaacaggaactcatgggcaaccatagctttgagatgaggtcattgggatggatcctcgggacttagtgcccctaattttaattgaaagggaactctttcaattaaaacctacaggaaccaaatatgacctaattctactttactttagcattccaggcctttaagttacttacccactcttagaacaataatttgtacagttttttgtgtaaacctttgaaaaaaggtttgaaaatttgaaaaaggactcattctttaacacatttaagattcataccacctctatgagttaatgtatcaattagctgtcaccatgtaacaacccactccaaaacccagtggcttcagacaattacttctcaccagtctgcgggtttgctgggcatcagtcagtctggactgggctcagtcattagtccaggttacctgatctaggctgggagtggctctgctgcatgtgttcctccttctcttcctaggaccagtgggcttgcctgggcagattcttttcatggttacagctgacatgcaagagcaaacaaaaacatagaatgcctcttaaagcataagcttgtaactggctcactgttttcttccatatcatcctatctgctaaagcaagttacatgattgaacccagagtcaatgaatgggaaatatactccacctcttttatggaaggaatgagccaaatgacatggatagagtagggggcaaagaattgggggcagtaatgcaatttgccacacttagaaggggcaggtatgacagtttccattttacagatgagaaacctgagactcagaaagctgaaattatttgttcaaggtaacacagaaaatttggacagtgctggaatgcaaaccctactctcaagacttctctgctttttgccacactgaattccaagattccataagaggctgtatgaactagttaaaggcccatggctccaaaggacaactccaaggatgactccttgtggcctgctccttttttctttttatcttatgtccctgggttttggcccatttgcctccttcatagttgtcacctactcttccatttgaacctgtttgaggtaggggttggttaaagttcccctactaaaacacaaattcttccacccctgaaacatacataccagtctctctatttttaataaaaattgatttttaaaagaaaatccaaacgtcacatgataattgaaccagaatggcctcaaacaccaaaatactatagttctttgaagaatgggagtattgtaatcatctgaaatgtgtcaacatgcttattactgacactgagcttcacttaaatgttaataggtctgagctagttttctgttagcccttccctgactgcctttgtagagttccttcaatggcccttgaattgtgaatctgccccatcctgcccagtctggtctgagtcaaattttagaccgagttgctcaaatctagcttgaaaagatttgagctagtatctctgagatctcaagtcattatctgtgagattttttcaggtgtgagtctccatggcaactctatgcctctggttttcagtacatttgcactcttaaatctggcctccagcatcctacaggtagaaaatatcattggatcttaaatttacctcctctaggtttccagctgatctgcactgacagtgtgctttgctctcacgaaccttctagacaaatgtcctcatgagtgcaggctccgaaagtcccttccttttcattggcacagtttgctttcctgatctattattttttttttgtctgcagcacaacttgcagctactgaatgatatggctggccggctctaccatttcagtgaggttctgcctaatctcttttgattctaaggggtaatgtggctcagccacagcaaggaggctgagttctgatgttctctttccccatacttctatggaagactggaagacagattacttgcagtgatttctggaggcagaagataagcaagtggcctctatgatggtagaaccaagaaagaatgatcattgcccttaagccttcagagatgacagctaaatccagagggaaaataaatagggataagattgtaaaaaaagttgctgctggagaaaaaatagctgctgctgataaagaacctcaataaattcaaacaatgtctgcgtttggccctcaaatgtcatgctggctcattgctcgggagaaagagccgtacaactaccatgtcagaggagatgaggaagcaaagaagtctgactaagggcactgccatggatattcttgcccctgctttggaacaatctatcattggattgtggagaggaagcaaggaggcagctggcagtgtgacaccacgtgctatgactcatgactgttttgcctgatggttggcaacatagtattggcacagttgtgggctctagagtacctgggcctgaatctctattgatatgtgccatttggyaaatttctaaactctaagtcttagctgtctcatatacaaaatgggcataatacatcctccctcatatggttgttgtgaggattaataaaacagtgtttataaagtgcttggcacagtgctgaacacatagcagtaaataaatattagtcattattaatattagctgatgcacatttgggggcaatttcaagaaagaattgattacaatagtaaattcagactatggcatctattgattgttcctttttaaatgaaccattttaaatacagtaaaarccctcctccctggcctctgcttaacttcctttatggagtaagtcgatgtttttccttcctattggaatatacactggccaatgctcagggcacaatggaagctcatgggcaggtaagttacttctggtgaacacttatatttctgcttccacacaacaagttgatcacttaccaaaagttagctgtgtttttgccaagcccatttatggcagttgtactcgttattacaagtaggtaatttaatgtaaatttgtgaaatatgagtataaaaagaaaactattattttcatgaaaactaagttcaatgctttggaaagacttactaaagaaaagttgcttttgaaaactgccatattgttaaaaataaaacaaaactgaaagtggaaatcaaatgtgatgcattaggaatgtaacttaygtgaaaaagagtctgtgaaatcccagggtgtggcctcacgctcaaagaaaaggccttggccttacaacacatcaccagagtggtgaatgaatgtactttgtgtgttttaggttgaaataaaatgttttatgtatgtatatacatgtgtgtatgtatgtacatgtgtgtctgtattgttttatatgattcctcactttaacaaattatcacttactctaagggctattcaagaaagcttctactgtatagtcaatgttctatgttaagtactttacgtgctgtgggcttacaagaagggarcacagtccagtagaatgtatttaccgatttatggattggagcttgtggtaggcagaataatgcttccccttctcaaagatgtccacattcctaatccccagaacctggagatatatcatgttattggcagggggcaattaaggttgcagatggaattaaggttgctaatcagataaacttgagttgaggagattatcctggatcatctggatggtcccaatgtaatcacaagggtgcttataagtggaggaggtaagctgaagacagtgtgtcagaatggtgttaggtgacaaagacttaccctgatggtgctggctttgaaaatggaggaagaggccacaagtcaagggatacaggcaggccctagaagctagaaaatacaaaggaatggatttccccctagggcctccaaaaagaaatgccattctgccaatagcttgactttagcccagcgacatccatttcagacttgtgacctaaagaatagtaagataataaataaatttcttttgtctggttttaagcccaggtttgtgataatttgttatagcagcaataggaagctaatacagaggttgagtcaagttgatgacaaaaaatcctatccctaaatccctattccaaatgtactcacaggatatctaggctcttcatgctttcacatgccctaaacataggatttacactaatatctgggtctaatcttagtagcaccatgttcattaagtccataccatttgccaggcaatatgctaaatgcttcagcaaattattgttatatgctgtttatagtaatgcttaaatatattctgtttcagaattctatacttacatattatatgctatttatagcatataacaaattaccaccaatgaacaaattaccattagtgaacagcatagacatagggcatgtctttattgagctttcaggttttgcccaagtacacgttttgaaatgagaaagataatagtgaaaatagcctgaatatctttatatttcaggaaagataatagtgaaaatagccgcaatacctttatatttcaggactgaggaacacctgcagtgtttgggggttttttgatcttttgtaaaacagaagatttaagcattactagctccattcttcctttagtcctttccctcagttggcctgtgattgtgactctggcatctgctctttcacctatttccccatcccaccaagtgattttctgaaattctgtcagcacagtcttccaacatcaaaatagcagcaaaacagatatttccaccaaggaaaaggaagcactcttccctcatgctctatcttcccaaggttcattttaagccaagttcacttcaagctttccactgcactcatatattttcttgcattcaaaataaaccacctcatcaaaccaaagtctctcccagttatcaaatgcagcttatgtctgcctccaaggatgccctccccagccctagctgctcacctttgcctctatagtacatatagttctgagtcatgcattaatatcccttattatttactgtgttgttttgttctgtttttttttatgtatgtcatctgcattttgacattttcctgaccagatatcccttcagtggtttcccacttccttcaggataaagtccaaactcttcatcatagcactctaggtcttcatgatctggtagccctgtctttctcttccaacttcatcccgtgccattatctctctctctatcctcagcagccattctgatatcttcaaacattgccatgttctctttatcctctggaccttgaacacactatttcgtcttcctgaaatagtgtttcatcaactgtttctttgtccactcccacctctaccctctccacttggcttcctcacccaacagttcacaacttgaatatgacttactgtaaaagttacccttgtattagacctccttagatactagcctccctcagacaygtaatcccttagcaccatgtatctttgcagccccaggcatttatttgtagtacttaataacttgtaattatttagagtttttgtcttcctctagatataagttccatgtttgtcaaaaaaaaaaaactgaataggtgaatgaatcaatgaattaatagtcttttagtcacaagtttttaaattgtttgctgtcactctcctccaactagaatgcctgattttcaaacccaaacccaattatgattctttagatccagaatctgcattttaacaagccccccctagatcattatgatgctgaatgtccaggaatcatcttttgaagaaggctaatatggattttgaatgggatgtcaaagcagtatagggacctctcaaataataatatcaastaccactgatggttactgtttgtttgccaggtactgatctaagaagctttatagaaagacattacctaatttaatcctttcttctagcctatgaggaaggtactattgtaatcccctattttgtagataagaaagctgaggttaagagaggttaagtaatttgctcagtgtcacacagctagtaagtgatggagtgattcaacatattctgcctccaaagcccatgctctttcccttaattctaggctgcttgttcctcacagagttttcctcatttgcagacttcaggatccttggcatgcttaatgtgcacttacctctccagtcctattagaattacgatctgttgcctttaaagatgcttctttgtaggttaccaagaggcaaaaactctgtctccctgcagttctttgttctgcacttgttgaaacaacaggccccagggaaagaagcccttttttagaagaaaaaaaccatgttctttcttctttccccacataccatattaattatcaagtacagaagaaactgctgaaacttctggctcacttggctcttctcctccaaagcaggaagtagcacagcaagagacaagtttaattctgaagctcaagcgctctcctgcataccatggcctaggagaaaggttcagtgaactcggtattagtccatgataagacaggcttctataaggtagaatgtttatggaaaatagattgggatatacaaacaagaacatagaggatcccatcagggatttgaggtaaacattaagtgaactcctttcatgtttggcctttcctgtacacttggtgttaggaggtyttacagaggtcctctgttaacccaatatgtatacagtagataaattactctgcataaagctttctacttttaacagaagctgggactgaaagtgcttcmctgggtagtagaggtagctagatgatagatctctctattgcacccacctccggcttttaccttctcctacttcagaacagtgtcctggcagacaataatctcgacatttaagtactatccctagaaacaaaacccaggaaggactctctagaagtcattaactttctgccagactggatcgaagataaagatagcaaatagtagttgtatgcccactcaatgcatgggagtggctgcctaggacaatatagtgagaagaattatgaggccacatatgggcactatagggattgattattgatgtctgccatggacatgaaaacacggagggtcagcaaacaggctaccttttatccatccttgcaccaagccagtggctcccaaacctaattgcacatagaattactgagagctatttaaaaatattgatacctgggatctacccccaaactaattaaattaaattatctggaggtgagattcaagcaatcaggcattggagcaacaaaggttgagagccactgctgtgcacagttgtagacatacagatgacttaattcagtagttaccaaatgcatttcttccaatcaggacctgccaggatggcttcataagaattatgtgaggagcttgtaaaattgtggattcctgggaccaactcctaaaaattctaatttggaagtatgggggtagaatacaagaatctgtattttttaaaaccacacaggaagatgttgatgggaaccacggtcctaagctattctcawtgcctcaaatgaatgagaactttgagcagaaccttgtactctaggacaaaagttttcaaccctaactgtacattggtatccccttggaaacttttttaaaacaccaatgcctaagttcatcaattaaattggaatctctagggtggaatctggatgattcgaatgtgtaggtaaaactgagaatcactggtctaagaagtggagcacaggaatctcatttgrggacctcatcagaaagattttattgttctttgtctatagatttagtccctgagttagtctagtagcttcagcttgatattagatggtagaactgcttctgttccctgaaccttgtttacaaccagaatctgtcattcatgatgtttgtggtggtctcatgaattatcctggacttagtaaacattggctgcaatcactcacccatgcttttaaacaaatgsttatggaatgtaccttaatgtttgtgaaatgtagattccaatatcttctactagtctaaagaaaggtttttgatgagggtttgtttatttttaaaaaaataatcaaatgaaatgtaggacaactgatggtcttaagagacagaggctttgtaaagacaaagttgtatttaaacttggaatcttgcaaggcccatcaactatgaattagtaggggcaaatagacatcttaaccaccaatccgtgattggtcctactggtctcttttgaagcaactggtaaagatataatttctttctcttagaagctttgcctgtatgtttatttgcctcacattagtcgtgtaagacagccagacaacctcagacaatcagccttgcatggatggtcatgaagtggtgagactggtagagttcagcaggactctccttcttcttcaaaatgcatttttaaaaaattacacccagttttttcacttatgcttgaatttccaccattagtgattaatgtatttggtttaaacattccctcttcagattactgtttctaaatataaacagaaataacacattaagtccctccaatactctcaggaaggaagagccatgactgtcttggaggacctcacaaatacagcctgaggttgagaggaccagctcttcatgttaatgcaagaattcaagggtcaatcctaaggagcaatgggaggacagtgaactagggcctattcatctctctagccccaatgtcttacattagcacctggttcagagtagtggaaggaatggcagccaaagaaaatataccatcttagaactgccatgagaaattttgaatccagccttggactcatccaaatgagacccagcagctgaacctccagaagacagcctcaccagccttgtaaacaagatcatttcctttacccccatggaaaacaggacccaacaaatcccttgctgatgcaataccacatgttgtaagaataaaccattgtgtttttgccaagagttggttatccagtgactaatgtgttcctatacatttacactcactgcagagtatcctgggacatgtttatagttaagaaaggttagtattaacattgtgtcagaggattaatccattttaattgtaaatgccaagaacaaacctgcttccttggggcccagatgtatgactttggttaaatatttatagatcagatggaatgtttactcttaattctggagctaggtatttacttgcataattacatactcctcccctgcctcctcttgatccagtgtcctcctgatattttctctctgaaatacaagtgtgttgtgggagatgatgaaaacatctggccaatggtttagagctactgatactggtgagaggtgactgtgggatagtagagtaactaggaaaatgctctatgtatataaccaggatcatggaatgagcaggggccacagaagcaggaaagctggattctagttccaactctactggaaattagctatgtgaccttctctgagccccattttcctcatctataaaatgagagagatgaattcaaatttttaagacttcttccagagatgagccttcatggcagctttctctaaaccatcttggaacccctacccactccaggtataatacttatgctttctagggcagtaacatccaatagaactttctgcaataaggaaatattctacatttatggtgtgcaatacagtagcctctagccatatgtagctattgagcatttaaaatgtggctaatgtggctgagaaattgaaatttcattttgttttattaattcaaatttaatagctatgcacaactagtggctaccatatagggcggcaccatgctaaatgattagcaatcgtgttggccagctccttgaagaaggccattgtctgtgctaatgatgtcttctaatttggggatgattaaagaggtagttgaaaaatactgctcagtgggaatcctttttctccaatgtggaaggtaggatacagtcaaatattgtagatgccttgaggttttcaaaatgcacaactcctgagtttttatttattccactaaaaagtggaaaggggtggcaagtcattgaactaattttcctttttttctatctgaaaactgttaatatgcttctagccacattatgttaaattaggaaaacagtatcaccatagggcattccaagacatacacagcagattccacagaatcaacttcaatcatcccacattaaacatttttcatacaaaaaagaacgtgtttactgcattagtccattttcatgctgctgataaagactgggcagtttacaaaagaaagaggtttattggattcacagttccttgtgactgggaggcctcacaatcatggcggaaggaaaaaggcacatctcacatggtggcagacaagagaaagacaaagcttgtgcagggaaactcctgttttaaaaccatcagatgtcgtgaggcttattcactatcacaagaacaccatggggaagacccgcccccatgattcaattatctcccactgggtccctcccacagcacgagggaattattggagctacaatatgagatttgggtggggacacagagccaaaccatatcattcacttaatttgcaaaatgtttcttttccatttaatagtttgttgatctatttcccatagcattgatggcagagagttattaaactgtctgacttaaaaacagtgacaggtcctcattatgcaactcattgagttgaaaatcagctatggaccagtagatagatgctgtttctggacttgacttttctgctttcaaatttataataattgtaataatatagaaaataattagtattattattaaatattagtattatagctaaataattataagcatttcttatctagtcgagacttttctgtcatactttttagagagcatacgacactcatgataagttttagtgcatccgaaaaaaaaatactaaactttagctccataaactggttagaatggaggcttctaattagttatcattcagttcccaagtgatagtatctatatctggaatggtaaatccatcgcacgaaaattgtcatttctcacctcttcatttgtctttggcattctttcctgctgagtttggacgtagcctcagaattcttaacacagcattttaggcagctagcatcaagcagctagggcatttaaattacaacatttaagattaaagttattttccctctctaatctttgcaggtggttgtgatcaatttgtaagagataaaaacacaataaaatacatacagtcctagagctgaaagggaccttagagagcactcaaccttaatcctcttattttatagatgagaagagcaaggcttaaagaataatggggaattgtccatggttacacagacagttggtggcaaaaagtgggactagattccggcctcctaactcggagagaatcccgcaagacactgccttgagcccaccatgtagtagtacttgtacattagatgtttggtagatgattataatcacttttaagtttactggaaatgatttctgcttgcctggaccattgaggctagacaggcctggctattaaactatgataaactatttatttgtggggtggtcatatccaaatagattatttggtggattttcccataagttagacttacatgttttccaggcatctgtgtccagtgccacctgattagaagaaagaaatagcagcccattaatttaaacgatgggattaactgtggggtctkactgaaagaggagctgcttatcaggrtctgctggaatgtgtagctctgattaacaaatgcagtttccattattataatgagcaactttctggatgtttgcctctgttaatgtgttgttctccacctaataatttactcctcttacttacggtctatgccttcaatagggactattcttattccaaaattgtgtttattaagtgtactaacattgatatcactgtcaggcaatatctaagagtttagccatcacagtttcaatagagaggagagaatcctgctattccagtcagaggcaacagtgggaacataggagtcttggttaccagttctttaagttgttttttatgacctaaagttttgaaatgttaagtgatttctaaagtgagaaataccattattatttattaaatactataattactacaaatggacactcaggagaggaatataattgtggttaatggcattatcatttaatttgcaggtgcatctgtttctaaacaaatattcagtgcctctgtttagaacacatgtttatatcctaaggtttcccctgctgctgaacattcccactgaagatcaagttgtattcaggtagtttaccttccctcctttttatttccttttaactatttgttgtgtcttaaagattccaatcttgtttttgcagttggttccttataatcctttaagtaaactaaatttcaatgtgcttgaagcagctcagttttccaaagtcattagtaagataggcctgatcccccagtttccactggaagactcactctttagctaagtgacttatacctctagttttcattacaagactggcttgtcttttgccatatcctgaggtctaggaagaagtgggtaagacacccaggtttctttgacagaaaagagggtgtgagtgtcctctccaccagagccaaagtgtaaaaggtaaagttgtaaaagtttgtttttttcatatcatctcagctcctcctttagtcaggccccagagttcatccttaacaagctgtcttctgttttgcagatcatctcctttaagctattggctcctaaaatgttatttctcccagaggtgtttttagcttgggggaggtccctcctgaagagcattataagtgtacactcataaaaaggaaagtctgactgccaacattagccccttcaacttctgacaaacattcttctttctcgatcttgctgccattcccttccctattttcatatagaatcaaaaaccttttgactattcaaaacttaaggtatcttatccctcacttctatccttctttacctcattacccacgcgttactcttaacctcaaatcattcaaccatgaaatatttccagagtaaacatcttcactcatacagcaaagcatgattggggaagaaccttttattagtttggtacctctgtagagcagcttccaagatcgtattaaatatgcaagagatcttccgggggaaggtgactttgagagaaaaaaaggaagggagccagaggaggtgtgacttatccgaccacagggcaggtccaacctctgtggaggagagaaggaaggaaagaggtttggacaagcagagtctcagattggagcacagttctaagaaagtttcagccaggccaatagagttctgaagccagaatcagtgatcagaggagttttctgtctcacagtaatgggtctaccttagtattcttaccatgcacagtcattagctgagaaatgcccactggacacgtggccttggctcaagtgcagtgatggactcaaggggtcagcaactaagtgcatggatcaaatatgctccctaaagcaggagatccaagcatgactgctacaaaaccctaataatcactgggcttggttcactggaacatcataatctccagctgctactctaacttaagtattacaagtaaatattatttcacccatgtcaatgttgtggctcacagcaaagtttgtttgaatcaaccatctctttcctcaaaacccggtcagttcctctttccttaaaacctctaccatcactaaaagctattactcatgttttgtcatacaggcaaaaaattaaaaccctcaacttcttgccttggttcgtctttctttgccttttccagttctttgagagataaccatcctcattttcctttgggacctccaaactactttcttcccctcttgtgtttccataatcttaaactgccttcctcctttctgctattagatgtatccatgcttcttcaatcttgcataaaccttcactctacctcaatttgacatccaaattattttcctctcattccacacttgctgccattggttcagtatagtgtagtacagtgcagtatagtctagtatacactcaaatttgaataagaaactcaaatctgaatcacctgctgggcttggaaaacaaagattattagactccacctccagagtttgtgattcagtaggtctcggggtgagtacctgataatttacatttttaacaagctcccaaatgatgctgatgctcctggtccaggaaccacactttgaaaagtactggtatggctgttaaagagtgtgtcctctagattcaattagcccaagttcaaatcctggctctgactcttaagatgtgtgaccttaggcaagttcctagcccctctatatctcagttgcctcatctataaaatagagataacaatgatccctacctcataaggttgtgaagattgcatgatttaatatacatgaagtgcttagaacactggcacttgcctgacacataataaatgctgtaaagtgttagttattatttcattgactcaggatgctagagccagtaagaaacatttaagcccatcattcaccaaatccaagtcaaaatgtgcataactcttgctatatgtagtatttattattttaataaatgcttttctttaggttggttctcaggtttacctgaataaatttatttcagaatgaaactgggaatggaaaaccagtgttttgctaatgtaaaataaaatacatacaatacaattagaatacaaaagatttacccgtgtggtttgtgtattcctctttgcaaaaactctgatttcactatataattcttcttttttcaaataaggaaactgagatmcagaaaagggacttgcttatgatcacagaaagttggtggtagagctgagactaggtctcctgtctccctggctagtatactttacgtaccacctcttgaagaaatgccccactcctccctcctcctgccttatgatgactccatggcagctgtatctctaatgctgaagatacttaattttctatgaagccttgatcattcaacttaattttgtatgttctgtgaaggtatatgttgttatagcacagatgttttggctgtggttgattattgtcataagagcttggagttgaaagagagtccaaatgtgctggctgctagatcattaggtggaagtgtgaaaaatgaacatgggcaagcaaagagtcagagtttgttaacagggtgaggttggcagaaccagtgacaagagaggactgaaaaacagattcagggtacrtacagaacttggctctaaacaaaattaggggaaagaaaagagaagaatgaggaggaaaaatgagcctctgaatgctgcattttttgtggcagaccttgggcaggcaagggaaaagtatattttgccactgagtccctttattgaactatctttctctcatacacacaagttccttcagcccccaaggtcatcctgaccttccctttgagaaatgctgctttacgttttaaagttactaaagtgtggagcactaacacagactyttytagataatgtagcctctctccttggtccaattcaaacagcaggctatcagagcagaactttggagaaagctctcttcaggaagtagcccccccmcttccatttgaggatgcctttccttttttttttttttttttttttttgccccctgtgggactcagagtggcttgagcaatcagcaaaactaatactgggggttctttgtatatttgctctcaagatgggtagagccttcttaaggcttccaacttttggaaagctttcctggcagatctagagaagagtttatacaaaacttgggcagagttcactttttccctgaggcaccattttccattgttacttttttaagatcactatagttaagaagttaggatttgcccagataaggttaagtaaataaaatgttttactccactagtggtttctccaaacctaacttctcctctcctcacctactcccatacctccaccccagccaccacattcctggcatgtactcacctctgacctctattccattncacacaattcccccaagataagcaaaactaatacaagtaggtatatttagagtgcctactggtatcaccacatctattgatgcaagatttagataagtgtgtgagccatataaaatggacattccagcctcaaattaatgtgcatttaacatgtacaattgattgatttcactttttcttccctaggcagcaactcattattcccacttgcattttagcaaatcaacctgtcaagttgtttgggactaggagtgtgttgattcaaagtgaaccaaaaaaaaacaaaaaacaaaaaacaaaaacaaagtgaactacaagaattccctgatgtcaactgcaactgtctagaagtgcttttgttgaaaccctgtttctgccaccttatggaagaagattgtagaatgaaagtaatttctcttaaattaagtgtgcccataggattacaggtatgccaccgacatgctcagtaaaatcctgataggctagaacctttgctatctggaatgtttgtggcattcctcttttaggaggaatcatataccataggaaaatgatctaagaaaagatcagggatataagccaggaaaaaaaaaagcagcctccaggtagtgtccagggatcctcagtcacttagtctccctcctatacctcttatacctgcagtctcagacaatggaaaataatctactggaaaataacttggcracacagctagtcctcaaatagcaaagaaagattttctgtcatctccacttgactgtaccttgtgaggcaggaaggttgtgtctgacagtttagaaagattttcatcaataaaagttttccccttaggcctcagtgaaccaaacaattctgtaaacttgcacggtctattctccaagaggtcccattatatgaaagattcactgtaatctctaacaaatgccttaataaagtaatgggctatctgacagatgggggccataggaacccacaaatcctagaataaaattcccaaaggcttgtgaatcaagacagtgccatatgcacttaggaaagaactaggggttatggatacgttccatcctgtcctggactccactgggctggatgcatcctttattcttacttggttcctgggcttttacatgcaaatcaccaagtggtatcagtacctacacagggctctaggattctcatttcaacaaatatccctcaaatatttcttgaacacctaactgggctgtatggatacaaagatgaataagacgtagtccctgccctcaagcagctcattacatggtgatagaagaagaccaggatattaacaatcacaatttagagaggtaaatatataaaggtataaacataatgtaatgtgaacatgttttgttgatttaacagacagtgggagtatctataaaactgattatttcctttgttgatgaccactttgttattatgggttaagatcagatttatctgaacaataatttttaaaaagatagatttttgtgtcctacaactttgcttaattcatttattagttctgagagtttcatagtggagtctctatggtttttttatataaaatcatttcatttgcaaatagggataatttgacttcctcctttccaatttggatgctctttgtttctttttcttgcctaattgctttgactaggagttccagtactatgttgaaaagaagtgctaatcacaagtgggtatccttgtcttgttccagatttttaagggaaagctttcaactttttttcattcagcattatgctagctgtgggtttgtcatatatggcctttactgcgttgaggtacattccttctatacctaatttgttcacgtttatttttatgaatggatgttatcaaatgctttttgtgcatctattgacatgatcacatggttttgtccatcattctattaatgtggtttatcacattgattcatttgtatatgttgaaccatccttgcatccctgggaagaatcccacttgatcatggtgaatgatctttttatgtgctgttggatgttgtttgctagtattttgctgaggatttttgcatctatgtacatcaggaatgttggcctgtagttttcttttttattgtgtcattgtctggttttaatatcagggtaatgctggccttgtaggaacagtttggaagaattccttccattaactatttggaatagtttgagaagaattggtattagttctttaaatggtagaactcagcagtgacactatcaggtcctgagcttttctttgatggaggacttgtttatcacaatcttactactgggtgtatatgtaagggaaatgaaatcagtatgttgaagagatatatctgtacttccatgtttgttgcagcactatttacaatacccgacatatagaatcaatctaattgttcatcaaaggttaaatgaatttttaaaatgtggtatatgtacacaacagaatattattcagccataaaaaagaatgaaattctgttatttgtgacaacatggatgaacctagaggacattatgttaagtgaaataagccaagcacagaagggtaaatamcacatgaactcactcatatatggaatctaaataagttgatcttgtagaagtagagggtaaaatagtgattaccagagtctagggagagtagggagaaggggagaaggacattggttggtcaatgggtataaacttatagttagataggaggaaaaattcttgtcttctattgcatagtagggtgactacagttaacaatagtgtattgtatatttcaaaatagctagaaaaaaggattttgaatgctcttaccaaaaagaaatgacaagtgttgaaggggatggatatgctaagtaccctaatttgatcattaaataatgtatacatgattgaaacatcacactgtaccccataaatatgcacaattattatgtgccaattaaaaacaaaacttttaaaaaaggcaagtagaaaaagaaaaagaaacataattcgtcataaccatacactgtagaatatatattgaccagcataaaacttgttgcaaaatatgtttggcatggaaatttatgtttgtgcctttatttactctataacattacttttgtttatctgtctctcctcctataatgtaagctacttaagggtagggaattttgtctatttcattcactgttgtatctacagaggcagtaaatgtataataaatatttgttgaacagatgagcaaatatgaataatttaaaattatgataagtactatgaaagaagttaacatatacgattagagattataacaaggggatctgatgtagactggggaaacagtttaggcctctctgaggaagagacatttaggcagagacatgagagagagagaaggagttagccaagacaatcagacaacagacagctcacatctggcttgcaaaggtctctggaaatctgatgatgtttggtttcaaatgactcacatttgcaggctacttggttgatacattagggaatcagtttgattgacatattagggaatcagtttgattgatagcaatttttgtgtttttcctgttcaaaagatgttttcattctcccatctatatctaaatctttgggtttaaagccaaggaaacaaagttcagactcaagtttccctcctgcctcagtccgcatgtggaatcctgagttagacttagctctgtgcatttggccccttgaaactcccctgtgacccgtttctggctagcacctcagctcagaaggctcttatttcttggtttgcctggcaagagatgggttcaccatctggagtcaaaaaaacagcctgccagccactgaacagttcagcctaggccccggacaatgagaatcaggcaatagccaattccttgtctgcaatttgctgattatcacaccccagggtgtgggattgtacagccaggactgctttgctctgcctctcatcaaggcagaatgaacacagatcctgacaggtcaaatcttcccccagacctcagaggttgctgtacaaaggaccaggcttaatctctggccaagtgtataattcatttatctgcacggtcatgaattctgggctctcagaattctgggctctcagggcaggaagcatggggcattgtgactggttctacaggcccagggagtcacttaagccttgattgtattgtggagggagggattttcgagacaaagggccctgtcctcccgagattgagcagatttgaaggggagcctatgcacacaaaggaatggtgctttagggagaggttgacagccttgtcatcaatgtccatgaacttctctagatcatctaagtgatgacaaggrggctagaattaattatttcatagactttggccaagaggaattgagataaataaagagttcatctcaggatgtttgcccgatgctcattcgccactttgtagtggagggaagttttaaacaccgagaaacgttttctcactcggccccttctcagaaacttgttgggggtcttaatctttgcctccagctttcagagctcctttactaccaccagaaagacttgaagtaaaaggcagtactctatagagaacagctacattaaagcraattggaaattgtttagaaatttatagtttcccaacttggccagctgttttgctttctctgatcctccagacttcctgctgaacagagatgggacttggatgccattctgtgttcctggagtttcgtttgcacagttccacagcctgaggggggttgacccattgcaataaatccagcttcagattagttatttggattttgaagtatttcaagctccgtgtccctcatgtcacttcactgcaacctaccttgaactttgcaatggaagacattttaatcatggattgtatattatacaactgcagactcctgaaagggaggaagtggatgttgtggaaggcagatagcgctggagaggaatggagagaacagaggctctagtgcttactcttacctcggacagacatttcacctctttgtgtggttaaaaaaaatcctgatgctcctccatttttccttttctccctattcatttttggggtggatgtgaaggacatgaggaaaccccaagtgcagacctccccagctattcctgacaatcattcttcacccctatgaagatatctgagtgctgtcattatctgagattgggacactcattaaatacattatcagtcattaatgctttacccctcaaatacatttaataaattagtctcagcaaaaattggaacccctggggaaatggactagaagyataaagctttctgggatggctggacaggattgtgtttgctcaggctttttactctttgacacctggtttstagatcatcagcaataactaaagattccctgcttcatatgagtttcctcatttgccagtcaatagccttataattagtagaaatatgagaggactctatatcctgttgtatcccaagcagtttattcaggaagtctctactaaacacttgttccagcactgtactaggtcctatagagcagcagtctccaacctttttggcaccagggactggtttcatggaagacaattttaccacagaccaggggtggggtggtttcgggatgatatgagtgcattacatttattgtgtgctttatttctattattattattacattgtaatatataatgaaataattacacaacttaccataatgtagaatcagtgagagtcctgagctgcttttcctgcaactagatggtcccatgtgggggtggtaagagacagtgacagatcatcaggcattagattctcacaaggagcatgcaacctagaccccttgcatgtgcagttcacagtagtgtttgcgctcctatgagaatctaatgctgctgctgatctgacaggaggtggagctcaggtgataattcctgtgatgggaagctgctgtaaatacagatgaagcttcacttactcaccctctgctcacctctcactgtgcagctcagttcctaacaggccacagactgataccagtctgtggccccagggttgggaacccctgctatagaggttatgtcttcttttaatgagcttgctttctagttgtggaagatatgtcaataataaaacatgtaacatatatatctaagaaccatctgcttaggtaatacaatgagtgttagacagagagttttgtagtggtgtagcaggtggatcagtcagaaccagcttcttggtggaggtgagatttttcctcgagccttgaaaaacagatatcattttaatatgcagagaagaagggagagggcagtctgtgcaaagagaagcacataaaccaaagtccacaggtgggaatgagcccattatatatgtggaagttcacatgaaagagtaagggtagaaaaaatagcttcagaccacagagtgaagtgcaaaggaatatttatttgatcttttgtagcagtatcctcaaaacctttttgatcatacacacatataagaaaaatagcacaccctcaatatatgtatattcatatactgtatacttatactaatatattagtacattataaaacatacacaaaatcatacaggatgatgtaatacaatgaacaaaatagttctgatagtttcttctcataccccagaaaaccatcttgtactctccctggggtatctgtacccctactctggataccactgctttagagcatctgttaaacattttggggaccacagacccctttaagaatctgatggaagctacatatcctctcctctcctcagaaatgtatgcacagatgcttaacattttcttcatatagttaatttcaaggaaaggagtgggctatggacctcctgaagcccattcttataccccagtttaagtttctctgggtggagaaaggcacagaaggcttttgagtagcttagtggtacatactctttaatcttttaggaagttgaatctggtagtgtgcaaaatgaattggtggcagtggggggcaggtggacaaaaagtagaagcagggaaacaagttaataggctatttcaaaacttcatgccggaaatgcaaatgctatgtaaatagaaaagagaggacagatacaaatggtatttcaaaggaagcataggcagatctcaatgatcaatagtggatgaagggagaagggagggaagagaatcaatggcaastctgaggcctcaagttgggggtggtgggggaagggtaattattaactggttcagatgacagcccagcaccccagcagacatggtctgagggcagggggaaatgtggggataaagctagggagaataattggataggagacacagattggggtgttgatatggtgagagtagaaagkttatgagaagagagagaataaaaatagtaaacacttatgcactaggcgttgttctaagtgctttatatcaattgatgctgttaatcctcattatcatctctggaaacaagtgctcttattaacatcgttccattttataaacaggaaacagagataaagcagcttgcccaaggtcacaggctaggaaggatcagagtaaggattcaaacctgagcagtctccagaatctatgcctgtgagcactgtgccatgctgcctctcaatagtgaggggtgagaggtgagttgtgggaaagtccacaagggaaaggggaaaagggaggaacagaggaacagactagaacctatcgagtgtccacatggatcaggcattgtactagtgctctaatattaataagcgtcatcatcattatcaccaagagttttccatatgcaaggccctatgtcaagaactttatgaggtatagtgaatatttgtcattttttaatcactcagcaggaaaatgcctttgctagttgaaaagaatccctcattgtatgagtcttgatgtgagttggggcccacctctcactgcggaagccaaaggagttcagataccccccttcctgtccctgtgtagataggaagtggtcataggtcctaggctggactaataggacactttctctgtggagcaactgaagctaagatcatgagccagagttcaatcacagtagtagtcagcggctgcgattatgataccctggccagattgttcctgctatgtagcttcaaaagtctccttcaccttttcatctgttctggaagtctatatcatagattggcaaaccataaatctgacccatcacctctttttctaaataaagttttgttagaacacagccacatccatttgtttacttattgcctctggctgcttttgtgctacaatgatagagttaagtagctgtaacagagacagtattgtccacaaagcctataatatttactattggactcttagcagataaagtttgaccactcctgctctttccagtaaatccatttttggcttaatatattcagagttgacttctgttgcttgcagccaagaactttaactgatataaatggattatctcatgtaatccttataataaccctcccaagtagatgctattgttaatcgcatattgaagataataaaacagacacagacaggttatctgcccaagatcacacagatagtaagtaaaatcactgaaattccaacccaaatctgactctatcatacatgaaagagataaagaaaatggagatggagcaattagcagtcccaggcctcttttgagatactggagaaaagaatcattttcccccagtagttcagaggaacccaagtaatcagggccatggaaagtgagaggaaaaaggaatagagatatcagtagcttggttctgacacatttatctccctcttggccacttctatacagtctattgaaatgttggtttaagcctctgtcaaaagggtacactaacctatcaattctcagatcatctgccagctttttgcttgctaagaaattcagaattcatttgagttgcatctcagaactatattaggccgtagagcttgaattccttcttccagatcactgggacctacactggatccagactgacagtagccaaagtcattgtttcctctgctaaaatatgcaccctttgaggacagggtgtaaggcttgctcactgctgccacctgcatatcgaaatatggagtctgtaccctctttcgaggtggctcaagtgcagatgaccacaaaagtttatttgataggcaatcctccatcgtctcagtgtggctggggcagattaccactttcactccaggcttagcaatctcgagcttttgctttgctaaatgctaagatacttgccaatacgtcacagctttgggggagtacgtgggaggaggtttaagcatatttagcttttcagccttacctactagacccagagttccttccatgtgattcctgtaaatgctgacaataacatggtgctccctctgctcagtgcaccatttaattgagctaattagtgacaaaaatatctcacagcagtgagccttctgttggaagcatctgaagggaaggaggatcaaactgcagagtggtgaagaagacttcttggataaaggcattgggaatgttatcggactgacctttttgtttgtgtgcacacatgcacgcacccttctgttaaaatagtcttttaaactaggtgggaaagttcatgaaagacgtttgtcttgtcacatgtactgatgaagtgttttcctctgtgattttacccccagcaaacttctctcaccagttaaagcagaaaaccctacttctgccaagttgttgtttgcaagagaatttgtgaaggcctgccttttgtagcacatgacttgtccctcaggaatatctttttagtctctgctaatgtaagggaacatctgaatggtgtctgaaaagagaaatctcttttccttgggtcaagcctagccctgtggccacctgatctggctcttttttggatgagtccctggggctaacaagcgaaagagtgaaccttaggaaattgttagatattttcatgatcatttcttgattatctgcatctgggaaagaagtggtggttaggacagttgaaccaacctraagcttactcattccaaccatttcagcaccctcaaacattctcatgacctaatcatcatgctatggtcttgttcacgaagtactgaatccttttctaaagcccttttccattgaagattcagacttaatctttacagcaacccagtgaaagttccatgatgaggggcaacgctgtagttcagttggttagcaggtcaaatgcttaggtgtgtgtttctaggtgccctgatcctaagacgtgaggaattgcagcattattggtcagccaagaagaagcagagcctaagtaaactgagctcacagtagaatgtttttgtgattagtggccaatagcacacagtagatgaccaaaaaaagactatgggttttcgccctaatcctttgattttgctataaaagtctttcaaggtagatatattcttttctgatggaattcaatgttgatttcaagaactccagctctgagaatgctgcttagaagtgaacactaaataacatgttatggcagcccagccttgcttggtgtgatcagagaagagtgatagctctcttatcattctcctgtgaattaagcaaaaaaaaaaaaaaaattggtgaacatacctgaagggttattcttcacaggattttccatatgcccactcagaaaaaaggatcatatgtcttggttaagaaaatacaaataataacattgtccacagtgtttctcctgaagagaactaaaagagaaaatgtgaccgctgtccttttataaacatcacataagctctcccaggttttggggaagccactgatgtccttgatgaatatgactaagttgtttgtgtaggagggtgttcatgtctatcctgtaattaactggtgaattgggttgatgtttctccaagcatattctgtagcttttgtgtatgagtgatgcatgggtatgtgagtgatgcatgggtatgtgagtgatgcatctttgacattgcattcagttcaactactatttagagcagaggttcccaaaccttagctgcacattagaatcaccttaagagcttttaaaawccccaatgtccaggccatgccttatcttagtcagattgaactgccataacaaaattccatagactaggtggcttaaacaacagaaatttattttctcacaattctagaagctggaagtccaagatcagggtgccagtgtggtcaggttctggtgaggtctctcttcctggttttatggggtggcctggttttatgctgtgtcctcacatggcaagagagaactctggtatctcttcctctccttataagggcaccagttctattggatcaaggtgccactcttatgacctcacttaaccttaatcacctccttaaaggcctcatctccaatacagtcacatgggggaggggggcttcaacatatgaatttgaagggaacacaattcagttcataacataccctaaaataattaattaaatcagactgtctggaaatgggacccaaatctcytaggtgattccaatatgcagccaagttaagaactactattttatatccttgctgttcaatgtgaagtcgcttcagcagcatcaacatcacctgggagcttgttagaaaagcagaaccttgagcctcccgctgaatcagaacctttttttttaacaggattcctaagcgatttgtagacacaggacagctgagaagaactgattgagagtatctagcatgtttctaatctagagagtcttcttctttctttattttgccaaatacttgcaacagtagctatgtgagctttttatatgctatgggattgttctcagaacaaggtgcttgactgtgcagtcttccaacagttgcttaatggtacagaatacatgaggtggtgcactggtgagtttgagagggccaccgaagacatccagactgggtaagtctcatcactcactcaggtgccatgcacattgctaggtaactgccagggagtgagtcaagcgaccacttttaggttctcttctgaaaacaggagtatagtcctcttgttcttcctggtgatttgtttacttttggattgttttcacagaattgtgtcttctaaaaaccatttatttgcagcttcttgttcaggctatagatttcactcaaataggttgcttagcttattattgccaaatatttatttattaagagggtttaccactaactcaatctagatgttttctacatattctgtctggtcttgttacagcttagtagttaattgtgcggtggtgtttctctgggctccagctactctggactacaggttttctttgttgttgtgaaaatttattttactagtttcagttggagtaaatgaaaaagatctggcaatggatggtggagacggttgtacaacagtgtaaatgtacttaatgccacagaactgtatacttaaaaatggctaaaaggaccaattttatgttaggtatttttaccatgatcaaaaacaaatttcagtgcattttattaaatgtgattaggtatcctggtttggattctggaacagaaaaagggcattagtataaaaactggtaaaatctgccaagcacagtggcttgcacctgtaatcctggcaattcaggaggttgagacaggaatatcacttgaggccaggtgtttgagaccagcctgggcaatgtactggcatgtctcttaaaaaaaaaaaaaaaaaaaactggtgaaatctgaacaaaatatggagttttgttaatagtatctaccaatgttaatttgctagttttgatgaatgtacaatagttacataagatgttaacattagtaaaaccaggtgatggggttaggggtgtactggaactctctgctatctttgaacttttctataaatctaatattattccaaaatagaaagtttttttaagaaaatggattctattttgacccatcattttggaaaggaggtagaaaggaccattagaataatctggcagaagaccaagaggtagaacccttttcttctccagagcttccaggttcagctccttagaaatgatggtagctaaggtgcagtagagcacccctcaccaagctatgctactctgaaaacagctcagtcagaacactttttgttcagggctatatatatatatatatatatatttactattatatattatattattatgtatatttattatatatgaataatatataagattatatataatatatgaatcataatagcactatttcctggatggcagttcagcatagtgattaaaagtacacaatctgcaatcagactgcctgggtttaaatggtatttctaccactttccaactgtatgattgtgaatagttatttaacttctctttgcttcatttccctcatacataaaatggcaatgataatagtacctacttcataagcttttctgagcattctatggtaccatctttatgagatgcttagcacaggcctgagttagagtaagtgtaggtattattattatgtgtcaggcattatattaagtgttttatatacatttatattacttgtgaactgctataatgtctcattttacattttttataacttctaaattatatgatatttataggggcccaaatcataagcgtaaagttaacatacccaagtacccaccatccagatccaagatacagaacattatcatcaccccaaaatttcctatatgcccccacccagttattacccaccaaaattaactccatttgtttctgtttctattcagtttcagagatacttccccctccatttttcataagttaatttggggattgtagaaaacattagcatgattcaaaatgcaaaaccatagttagtaatgtttttcctctcccctctgtttcctccaatatttaatttgaagcactatggctaatttatttttaaatgagagtcatgtgacatttttgtcagaaaattgcatgaacagtaattttcaaagcattctgaagtgcttcacagcccccttcattcagttcaaccaatattgagtgagcacttaatttggcaaagcacagtagtggaaagaaaggtgaaccaaacaaaggcttgtctttagatgctccaagcccaatttgggaaaaaggcccttagacatagaattctagtccaaagcacactctgaatatgataatagaaatgcgaagttctacatgtaaaattaccatttacaataacaacagaaaaggaaacctgtaacatatcttttttattagtaatttacctgacaaaaagtatattggacattttatagataaaaattttaaattctacaaacagatgtaatagatctgaatcaatggtgggatatacaacgttaatggatgagatgacttactgtaaagatgtcaatttttcccaaatctacaaattcaatgccattcttttttgttgttgttgttgttgttttgtttttgttttgagacagagcctcactctattgcccatgctggagttcattggcgcaatcttggctcactgcagcctctgcctcccgggttcaaatgattctcttgcctcagtctcccgagtagctgggattataggtgcccaccaccacgcccaactaattcttgtatttttagtagagacgaggtttcaccatgttggccaggctggtctcaaactcctgacctcaagtgatctgcccacctcagcctcctaaagtactgggattacaggtgtgagccaccacacccagccaaattcaatgccattctaatgaaaataccagcaggatattttaaggaactttaaaaacttattctaaaatgtagatagaagaataaatgtctatgaatatttaaattgatttttgaataaagaacaggtgactttcccctctacaatttgagaaatgctgcaaagacatattattattagtaataagtaggagtgcacagtaaaaggccagtaaaccaattaatagaatatagagctcagaaacagatgatgagataaaagtaattttacatcaagggaaggatggatttttggtattggaatgggtagatcatcatgtgacagagcttccaaaccagtgtgtcacattacaagctataaatggactataggtttacagagctattgatcttcttgacccttaggatatccaggaagaacctaacgtggccagagctcccaggctggtggcttccacgggtgactatgagcagtcctaccaatttaccacattatgctaagcatatgctatcatatcctcttggttcgattacctgaaaaagaaaagaaaagcactgttatctggagaaaaatagagttggattgctaccctatatcacatacaaaggtgacctctrgatagattacaaacctaaatgtgaaaggtaaaactgtaaatgtaggagaatttctctataacctgaaatagtgtagaacttcttaaataagaccccaaaccacaagacataaggtggaaagtcataaattttactacatcaattttgagacttccggttcaatgaatgacactatagacaaaggtaacagacagatgatagactgggagaaggtatttgcaatgtctaaaactgataaggcattgatagctacaatgtccaaggaactctggtaaatcgacaagaaaaaggcagaagacacaattgttaaaatgggaaaagcatattcacagaatggacagaccacagaaggggagaaactgcattggctaacaagcctatgaagagatgattagccttgctagtattcagagacgtgcaaattaaaataacagtgagatatcaagttatacttatcagattgacaaaaattttaaagtcagataacaccaagtgtttgttagcatgaggagaaaaaatgatttttcatgtattgctgatggaagtgtaaactgttacagcttacaatctgacagcactcattgrtattaaccatgtattcctatacccagaaacctcagtgctgcatatatatcctgcagaacctctccatggtttgaaaataggacacttacggggatgtttttcacagaatcatttgtttatcacagaattttttgtgtaagggattagaggcaaactagatgtctatccatagagagatgtacatgtaaaatgtggtaaatgcatacttttgaatattacataagggttagaagcaacaaagtagttgtgcaaatagtaatatagatcttgaagacattcttgagcaagaatgagaaatagaatgtgatctataacccaaagacagcaatatcaatttaaaatacacacacacgcccgggtgtggtgactcacgcctgtaatcccagcactttgggaggccaaggtgggtggatcacgaggtcaggagttcaagaccaacctggcgaagatggtgaaacccccccatctctactaaaaatacaaaaattagctgggtatggtggtaggcgcctataatcccagctactctggaggctgaggcagagaattgattgaacctgggagctggaggttgcagtgagccgagatcatgccactgcactccagcctgggtgacagagcaagactccatctcaaaaaaaaaaaacacacacacacacacacccaaaaccagatagatagatagatagatagatagatagatagatagatagatagatagatatagagaggtgataggtagatgacagatagatagagacacatagagatagaagatagacagatgatagataacagagacacatcgagattgatgatagagatagattttagatagataaatgatacatagatagatagatagatagatagatagatagatagatagatagatgatagagacagagggagagagggaaagagaaagggagagatagttgttagatatcctggactcatatcaaatatattaaagaagatacctgagagggatagaaatgagaatggggatgtggatgaaggaaaagatcttttcaaaatgaggagctggacatggactaatgatgacattttattataaactaatagatgtaattaacttggctctttatagctgagtcattcccccaaaatttttaagtgattttggaagggagacatcaactccaaccagggaaatctgagaagtctgtttggaagagggcagatttgagctgagctttgaaagatggatagagccttggtagaaagttctggaagagaagggtatttttggtgaggaagcaacttggttggaagccacgtggtgagagagtacaagatgggtttaagtatcagcaaggagattgtaatttttgaagtctagggcaggtaggggtgttttgcggaaaataagcctgcaaagacaggtgggagttgaacggtgaagggctttcaatgtgtgattaaggagtgtggattttattttgaaagtaatatggagtggtttacaatttttgagcaggagagcaataggaccagacctaggacaattactgtcacagagtgttagatagattgctgcaatgtttgactggacacagagataactccagaggctgttgtcattatccaggtgagagctaatgagggactgagctaggttttggttattggttcctaaagggtctaataagagtggcatggcaggacctgagaaataaattagaatgctgtctcatctttatagcaaaggtggtggaaattgtaggagatgratgaagtcaccatgagagagacaagagcctttgggcaaaatggaaggggccagtgaagacgatgatgaagggacaaaggactgaagagcccatagtatagtgcagtgaaagccaaggagggggtttcagaagggaaaagagtgttcggtgatgacaaatgctgcagaggtctatgggattagaatttaacagaggtcactggttactttccagagagtactctcaagagagaggagttggtaggcccagattgccagggattggagagagtgaaaggagaggaaatggatgcagtgagtgttggctggtttaccatgaagtttgttctggaaaggcaatggagagatgggatcgtagcttacagggaacgggagtaagggagtcagaggaagcatttttgtttgttttattggttagtatcaggcactccagagcatgtttcgaagatgaaaggaaagcaaccagtccagaatagttactggagtagggtcccaagggctaggatccctggagcagctacctggcagtgctcactgcaagctagccttgctgtatcttggtgtgcaccttccccctaattgtgctctttagctttgcctttgggagatctttcctcttgcagatacacttactagagcttctcccacccccgtaacaacccctcactttttcttctcttgggttccggagactggttgaaactggactaacaaagatacctgcctttgtcaagtctgcaagtcaagggatgtgattagctgcttggttctcaggccaaaggacctgaagcactcaaagccctgaaggggaaagtacttgaagatttgttttccactcagctttaagggacaagtgttgctactgttggccgtggcaggcttcataggggactttatctctacagaattctgtattaactttttctgaaagattgccagcacccgattcaaaagcttttaaaatcctcataaaactagagaatgaaaaaaagcaataatggaggtggaaggtaagcagaacatgggacttcctgcccagttcaccatccggccaggcccctggtctggccaactccttttcacctctttttctcccccagatcgtaggatttagcctgttttgcttgcttttctgactgccacttcccccctcctcgatttcccatctagatacctttagggatggtttcctgatttatccctagctctgctttctctaagaaccagataatggactgttaatttgtttaaagtgttttcattgctacaaactctaaggaaacagttgggcagagtgagatataaccaaaagtagatgacggtgtgaaagttgggaaggtacagaggatgaagaaccctgacaaaacatgagtctttagtgagctgtgaacacatgagctgcctactctcctccctatacaggccatagactctggcctgggagttagcaccattatctccccagcagctgaaaccatctctctttgagttaaatgctagacaaggtcttcagcctgaggtagatgtggggtgaggttgctaacagtctagtggatttttcccacatgtgaatcctcaggttgctctctctgactccagatttgtcttgacagaacaggctcaagtactaaatgttgtacataatttatacctctaggtggttcaagcatctcactttgagcaagggcaaattttcttataaatcattgtttaccaggaattgctggctcccctctggctctctctccagtctggagcccaagatcagctatttccacattgttcttaccttcctcctattggacttatccctctccctcacctgcatcctcagccccagtacttctgatatatttgccagtgcccagacctggaaaaccccaccacctgctttgcttcctcctgctcctaagctgccaactattgtttgaggaagtttcctccacacataaaaacatgttctctagtgtcgggggagctctcagtgctgattggtaggccttcacacttttctaacaattgacatcctgccacatcctccatagcatctccttctggccctccccagtcatcctcgacctcaaatacctcccctctctactcatgacctcacttcctacatttgttgagaaaattgagatcaatttgaaatagacattctccacttccctcttacttaccaaaatgtgtcctgggtctttttctttatacatcttctactctctagtttggaagaataaaaagccctcctctatctccaagataaacccatcaacagtccttgggttgagaatcatatccctcctgcctttctatgccttatggtatatactcatgtgcatgcataacttctcttttctaacttggattgagagttcctcaaggacaaggcccatgttgcattcatttctgtgtttccagcatgttgcaccatggcatagtcagcaatcaacaaattgcctgatttatctctaaaaaattgcctcatygatttactgaaccgatgagttgtcagtggaacaagtagactgatttgagttctttgtcctttgtgcatctacgtaattgattgctaagggtgccactgggcagcaagaagaattcagggaagagtcaagaggattcaatacactccagacccagggtttttggtggagttacatgacattttatctggaatttttgaccaagaattgacctatcactttattaagggaatagttggaaaagctgctagactcagactaaagatcttgctctgctgcccataaactgcatggccatggacaagttaacccctgggtctcaattactttctctagtacattgaggacagtgttgttatgagcattagatggagtcatacatgtgaaaacactttgaaatctgaagcacttcaccaacgtaaacttgtaactcttagacctgatgccaccaacagctctagagcttctactctaacrataccacagctgccaccacctccactgcccatctttcctgttgcacacagaacttgatctcatctcagcttccaactgtccatgatggaaagggaaaatatatcacaaatgtggagatctcattcccttcccatctttttgcctgcgtgtgtctgtgcagagggctttactagtccatagggactactatatattgatgtgagggtcaagggaagggagctgtgtcatctcatcttcttgagttcaaatccatgattgtctatgataatccatgattatatggcaggctatgccagagtaccagcaggccctaccattttagcaggctcttgtgcctgtgggcatgtgtgtttggaktggaatgtgtatccctttatcagcataggtgtgcatattaatgctcctctggttctaaatgaatacagggatgtgagtttgcatgggaacaacactgaaactatgtaagtaaattgcttccctctcttccttgcccttccatctcagagctccctgagttctctgacaaggaggtcctgacataatttctttgatcctaccctttttttactccttctatttagggaatagtagttggttgctcccagttacctctcactcccaaaacttggtggcttttcaccagagaatcagggaagtcagcattgatccagaagcaatcagctcccaccagctcagtattggaccaaaggttgtatagcatatcaatgatgggcaatatattatgtcagagaataatgccaaaagtatcccttgtctaatggaatagatacactacagcaaaaatcgctctgaagtgaatttctggcaagtcctgtttcactttgatttttattataaaaccatagctgtgttttgctagaaaaactaaaagaaaaagattggctccagattgtaattaaaccatgtatttttaaataaaccgtacatttgtaataatgtagatctaatcattttaaaactgaaatgagactcctgtgaaagacagtcaatttgctcccaactttcacagctttaaattctgctcctttttttattcaatcttttttctactgaaagctcttccttgagggtttacggcctcatgagtctagcaaatgaggtttgtttgtttgtttgtttgtttggtggacaattggagtttggttattcgagttttttctccaaaagcaaagttttgtcagtggaatgaaactatagctccttttcacaggcattgtctcaactgatgctcaaagcaacctaggaaatgggtagagcaagtaatatccccattttgctgatgagaaaacaaaggcctagagattaattaactttttcaatatcatacagctagaaggttggagcagggaattgaatctaactcttctgcttcaaacaggagacttttttaagaggcaaaggtgacatcaattcaagtttgctagaaaattttcaaatcaaaatcattctcaaattaagtatttaatgtttttccaacaggtatattagttttaggttaaattcatcccaagtaaacttgtatttattttctcatgcagtctggaaactcggtacacactggggatctttgtatagactgaatgcccattccaagtgatatgggggctcattcaaccatttataatagttacaaaggtgtttagttgttctgtttttatttttatgtccaactattgatcatatttacagttttatgtgatttttttattcttgcaattcccattaaatatcacaaaagggaagtttgatatggttcctgataatagttttatgaatgtgttatggaggaaaaggagacctgaagattcttccatgaatttatttgcctctatctaggcatctccacttcatcctattttaacaattattgacatttcccaggggtaagggaaaatatgacatgtctaaagactagttctccaatttctgctcaacctaatgaccatcaagttagcatactgtgcctatattccttctgccactaaactaatatgctagcattggagactcatagcacatcagaatttgtctaccagagcctagataaactaaccattacccactgaccaggtaagaagaccactttaattgtggaaccagaagaaatcccccatcttttaagttctagggagtgccattccttgaagtgcatcttatttcttaatttattaattatattagtacatttctattaaagagtacctattccaatgaaaagtgtgggtaaattgagataaattgctttggtatcaatgaaaataacaatattttctccgcagtgtagctcttactgctcctgttcatgggtttgtgtctctgcgttcagagcatcattcaatgcagagacagtgtagcttggtggaagaaacagaggctttgatatcagcaaattggcttcaccagttgcttgctgtgtgatctcaggcaagttccttaatctctctgtatttgagtttcctcatctgtaaaatgagattaatacccacctgttggggctgttaaaagaatagaggaggtgaatttaaggaatagcactttataaactcttggtaaaagaaagttattattatgttttagaagagaaatatcagtaaacaggtagaagaaatggatgcaaagtcttgcctagcaagagttaactttatcagtcgggatatgtcttccaaaaaatttcaacatgctgacaataaccagtggaatgggtgtatgtatctttgaaaacaaaacgtgtagatgcatgtcttcatgcctgggctggctgcttcaaacgctgattatagatgaagaactagaaaagaaatgtgattccatttgagtgttgagggggagactctgatactatttattagctgtggcagacctgaaaattgcctttgcaagacatcagtcactatgtatgtatgtatgtatgtatgtatgtatgtatgtatgtatgtagatggaaagggtcactgctcttgttggtaaattgtaggtgatgttaacattatcaagctgatccaaaacttcttgggccacaaaataggtctctatatctgcatgatatgagtctttacctgccatatgctagacacattcttcaccaccagcattctttcttttttatttacttctgcaggcaatgctagttcattagtgctgttactaggagagtgaagtgtatggctctatggatactcatctccatttgtttcaacagagagagcacagagttgactgggaggctctgatgtaactcttccactgtgcagctgtgtgacattagccagcctattggctaactgctttgcagcttggtgcccttcgcctgccttgcagatgtattgtgatgatccaaaggaatggtgaaaagaaaactgctgtgaagtttaagtattctactcatgggggtgttattattagtatctttcttaccacatttcattgctaggagaaagatccctggctactgaggtaaagtttgttaagttcttgcatttccccccaaccatcagctgaaatgagaatttcagttgtaaagcaaagacaaattgtaaaaatcaagccaccttgtttctaggctggaggtcaaggatctctgctcccccttctcaaaaggccacaaggagttttttaggatagtgacattcttttaattccattttgctcctagcaaatgagacttggaagtggccttctcaaagattccccagtgcatatttaattctctattttcattcatttcataattatgcattttccccacaattatgttttgtgtgtctactgcacaccaaatactgcatctccggggatatrgtggtgaacaaacctcactctgtttcctcaaatcttcctgttttgtgggaaaaatgtgctaaacatctccctagatgtttgcccaggcatcttaaattccacctgtccaaaggtgaattcctcatcttccacccaagactcttcttcctctaagttctctcatgtcatcaaagagatccactcggttgcccaatcaagaaacattggagtcatcatttgcactttcctctgttttgctcatcagttccaatatggcactaaatccttatagtttttagcctctgaaatatctctcaactatgtcttttccctgtctccactgccatgaacctagtccatgtcaccattatttctcttcaggaggtcatagacccctcatggggttccctgtctccagtcttgctactccatccactcctttcctcttgtggtgtgtcataatgaggaagaaggagaggtgccctaagtcatagtgataaaggaatgctgagggcctttcagagattgtgaactccaaacctgcacaagccataatcatttgctgaataataatacatcaataacaacaaataacttttattgcacatttaatatatgcaaggtgcaatgctaaatgatttacaacagggattctccaagtgtggtctttgatcctgtagagtcagtaccacctgagaacttgttagaaatgcaratttttagacccagccggcactactgaatctgaaactccggagctgaagcccagcaatctgtgttttaatcacctctgcgtaagtctgatgcatgctaaggagcgaaaataatgatctactcgaattttcttacttagtcttcataattaccctatgaagtagacactgatattatcctcacttgacagctgaagaaatttgaagatgccatttgtcccaaagtcctacggtggtgaagagggaatttgaatcctagacttytgaactctgaaccctgtacacttagctagcatatcatctcacttcactaaattctgaaccaaactggaagccaaactaaagtttaaaacaaaacatgctaatgtaccagattaaacacctcagcatctgtaaatttttgtaggttattctctattgccctttcttactgattctctgtgatctcacctctgctccagccagacccaggcttctgactggccctcgcttacagaattcgctgattcccatcaacatgttgttcttcatgtttagaatgcattcactaacagtttgttgggtctttctttgcccctctgctcccttgtcaattcacacgtctctgaattcctcttggacttgtggtatatacagtataattttaaaaatgcattgcatatgactggtatggtttggctatattcccacccaaatctcatcttgaactgtagttcccgtaatccccacatgtcgtgggagggacccaatgggaggtaattgaatcacggggctggttacctccatgctgttttcttgatagtgagtgagttctcatgagatatgatggttttataaggggcttcccccacccttcactctgtacctctctttgctgccaccatgtgaaggacatgtttgcttccccttctgccatgattataagtttcctgaggcctctccagccatgctgaactgtgagtcaattaaatctctttcctttaatgcaatgaccttatctccaatactttttgtgatatggccttatctcccccaacaagcttaaatgttccttgagggcatgggccatgcagtgtgtttcttttgtgtattgccttctcagcccctacatgtatattcatacttgccaagcacaaaactcagcatgagatgaaaagtgtttaattaggttggtgatgggccatgcatcatctgttttcaagggataacataactataagtttcatgaatgcagaaactatgttttacctgccatcttaacctctgtgcctggcacagagtaagtgctgaataaatcattgttgaatggatgaattccattcaggatgagaatcaaagccatttcactcagagatctcagagaacaaagaatgcccagaaactacattagatgtagaccatttctgttttcaaaggctctaaaaggtattgttttaaaagtctacagtggatgttgtatgaacttgggtaagtcccattctctttctgcccttcaacttctccatcctgaactggatcaattcctgagtcttatgcagctttcttttcagtgattctgtgatcagatgtttcctgattgcactctattgcaactatcataaattaaagttaaaattctaaggtccccccaaccatctgaatggatccgtcctcttggctaggggctttccaaagctaacctggaaaactagttcagtccatgttaggaacaaggaaccagacatgcctcattatactctcctcccttttggagttactgatagaacagactctttacgtctgagaagaaacatttaccatctattctctccgaagcctgctacctggtggcttcatctattatgatatatccttggtttccacaaccccttattataacccagacattctcttctattgataataactctttcgacaaattggtaatcagaaaatctttgattccacctatgacttgaaagcccccccaccctgccccaggcttccagttgtcccagctttccagactgaaccaatgtacatcttacatgtgttgattgatatctcatgtctccctaaaatgtacaaaaccaagttgtggcctgaccaccttggccacatgttctcaggatctcccaagggctgtttcatgggccattagtcactcatatttggctcagaataaatctcttcaaatattttacagagtttgactttttcctcaacactatttagacttccaaacaagatactgctgtacctgggccactggcttctcagtcatttctcaatcatttctccactcagcaaacatttactgatgcccactgtgtaccaggcatagtgctgagcacaggtgattcagtaaagagtaagacataagccctgtcctcaaggagttcagtctgttgggaggtatagacacataaacaggcaacctagcccacacattgggtgggggtaatcatagaaagctccctggagaagctgatatcttggttagagcccaaaagatacagaagtggtagccaggagagcagagccatatacaaaagcacataaaaaggccctggagtaggaggttaggagagagtaacgcaagattggaggtcacagaccatttggcagactgtggcaacactccaggcgagagatgagaaagacttgaactaagaccatggggctagagatcaatgaacaggtttcagttagattttggaggtagaattcacagtccttgctaatggatcggatgtgggagatgagggaatggaagggtcatggaggacccctgagtttctggcttcatcaactttatgaatggtgccatttactgagttaactcagaaaaagggagctggtttggagaatggggttgaggagaagccaatgtggttcagtttggggcatgttgggtttgagttggaatatttatttgaatagatctcttatacgtcattgactataaggatctggcacaatcagaagagaaatctgggctggaggttcaggtttgggagtcattagtatgtagattaaagcccttcaggaggaaaaataaacactgagaagccaagtaccaaggagaaccaggacaccattgctatgtraaaggagaaatgctctcacagatgtggggtactggcatacatgctcatctattcccaagcacacatctctgcccccaaagagggtcgctcaatgatgtctgtgcatctccaactgaaacttaagagaaggagcattggtgcccaatcctaaactctccattttgccataaatgatgcctaaaggaaaaagggaactaatgctttcattctatctgccaggtgttttatatgtattaactcatttaaatgctgacaataatccaacgtaagagctattattacacttcagcccttgatactcaagatggttatatcccttgcccaaggtcacataacttaattggcagtaaggagacttcatttaaagtgtacctaacagcactgcatcaccttctacaatacaastggatccttaggaaggcctgtgcacacccttctcccttccctgcttcataaataccatttgcatcccctagcttaatgctttgctttacaaatccctctgggaaaagcaaagctctaagttgtcagtcattaacgcctcagtgggaatgagtttcagattcttcctcaggaacaaatgttaattttatgggagaagaacactggaaccttaacggaggtataaaaaggcagaaagggactaagttatgaaaagtcagccccctccaccagtttcaccgtcctgtctagtgtgaggcatatgcttttaagattcttcgatgatatatctacatatgtctactactttataggcagccccatttctgggtcttttaccctagttatctgggtctgatcagaggccaccttaaacttcacactgatcccaactcactgtggttggcaggaggcagccagcctgggctgtggttgcagacctgcggttcctggccttaagcacaagtcccaactcattcccttgagaattagaccctgatgtgcatatttaaaatcctgagcagatggaagcaggagagctcattggaaagacttggaggagttccttctgccctgtctgggtctatttgccaaaataaatgacatgtatcagaacagggcattagtccaagcccattgaaattctgctagctgtccaaacagtgatggtgtttcagattggttctgtgaaatgatcagggttaggaaaaaagaaataatgtgtgagcatctggctgctgcagcctactgatggggacagtcccaggggcgggcccagggtagtggaggggcagcctcaaggaccccctaagacatctgccactggcaaacagggaaacagccacatactggcagcaggtggtctgtttagttccatgccgttcctactagctacgtgacctaaacaagtccttcctcttctctcggccttcccccttccccccgccccccgccccatgtataaaataaagcccggattgaatggtctctaagggcctttcctgctcgaacattctgtgacttctctgacactggtttgatttctttttctctgtagagggagaggcccacctacccacctgcttatctgtagtctctatgttctcacactgacctctgctggccattatgaaaaatgtcgctgatagtgtcggggtgggaaaggaaaggaattcaccactgatttagttaatattaagctttagctgtatgggtaatgaggcagaaatcctgtgcattagagatgaggaaaaaagatcatacagctataagcacaaagtaagcgtatctggatgacaaaacaacccgcagaagaaatgggtctgcctcttttttttctcagtcaccttcatttgttcccggtgttctgtgccagtgtatgaaaggacatccatggatgggaaggctttttgtctcatatcctatgactgcaggctccataagagcctcacaccatgctgaggggacagttctggatgagcagaagcctagaaacttcccacaggccctgcttctggcccttgattcaatgtgagaggtttcaaactgagctgctggcacgcccgccaacccaagctggaacctggggccagtccagaagtgcatgttcctctagggggtgccttttcaaacttctatttggaaaaagaattagaatttaaaaaatatatgtgagttctttaggagagttcctttcagctctcttgttggaacacaggggtcaagaaattctgcatgcccaccaagccaggagaaaggaagcaggctgtgggaccctgtcttttctacatggaatcagagttccagttaggcccagccctcgagttgcctacctcctaagtctccttgcttacccttgctgataagcatgtgcttgcaaaggtaagagaccagaggtagagggtgccagtccctgtgcctatgctgggtgctgctgggactcttctctctaatggtgtgagcaggatgggactgggccacatcacaacctgctctctcagtagctgttcagtgatttactgtcctcttccccttccttcccttgatgtgggaaaacttttgtcagggcttggatttgggtcaagcattcagtgccctgactggatcctctctgctagtaataacatggcctctgcaagcccatcctgccctccattctcccatcaagcagctccctcctcctcaacagctgcttcttatctgcctcccttgtcccagcctcaggcaggcagccctggcctcattctgacatacacatgttatcctgaatgcttcttgatgactttcagccctgaaagaccgctcttctcccaactctcccctgttcccaaacctctgagggttccctgtgtcctgccacatcacgacttcgacttttctgcggtgctttccaggcccgcttcagctggaacctttccaatcaacctttccagtgcggcccatgacttcccccagccatgggcaaaatgtaagccttccacaaaccctccattgccaactcttttttcatgttcccacagcacttaggctctgttccaaatttgtactgtttgctgtgattttgtatgcattagtcttgaaacctaggcccacattttctttctttttttaaaaaaattatacttcaagttctaggatacatgtgcagaacgtgcaggtttgttacacaggtatacatatgccatggtggtttgctgcacccattaacccgtcatttacattaggtatttctcccagtgctatccctccccttgcccaccacccctcaacaggcccgcatgtgtgatgttcccctccctgtgcccatatgttgtcattgttcaactcccacgtatgagtgagaacatgcagcgtttggttttctgttcctgtgttagttttctgagaatgatggtttccagcttcatccatgtccctgcaaaggatgtgaactcatttttcttatagctgcatagtattccatggtgtatatgtgccacattttctttatccagtctatcattgatgtaggcccatgctttcgacctcctactcattgtcaacagcaccccagcactattttttaagtactgctctttttatattattaatatgcattatacacacatatacatatatacacacatatttattgattttgtgaaaatcccaataataataaataacagaaccactgtaaacaaagttccaacaatgggaggtaggagcctaaaaattgaaagtttactccacccccatcattcccagaatgaagcctgttaaacagtttgcaacctatcattttttgtaggccacatgttgggtattggaaaaggttaagtggtaggtggtgcccaagagaactgcatttccttggacagagcatcttttacttccttgcaagggtcgtaggtcttcgtgggcctgattgacactcaaaattatactccaaaggatcatcacagctggtggccacttgcatctccagtacttaactgtagccacagcataaggcatctgtcccattttcagccttttaaaaagtaagccttgaaggtgaacagtaaagggcatgcttaatgggcttcttttcaaagtttttcacagatttgtaggaaatgatggacagtcagtaaaggggccaagaggtggagatgggaagcatttatgaaaatggactttctacctgatacggtgttgtgctctctgagaggtaatgcatattactaatggttttcatttttctgccaagaaaattcagtccctactgggatttgttctaaatgatagaccagcctgcctgtgttgcacccactagggttaatactcagtctgagtccactttaaaatgtcagcctgaactctcagacttaattgttacagacattttataagcagggcatttaaaatcctcaggctgttccctcttgctatcataattgatacttaatagatattcttaggcttcttgtattttacacattcaacactttacagattggagaggagaggagagagggataggaagaaagaacaaataagcaattcatgtgtgtatatgtgcatgtgtatgtgtgttttccctgtgaatgtctgctactaggtgcagtgatggagtcctgggatctgccaacgaagatgagctcttgcaggtttgtcagcctgtaggtttctgggcccactctggccccctggggcaatgttctttagccacagccatttctggatttcactgcaagcacatggttggccatttggacgtgagttataaaatgtcatgatgctctccagcgctctgttctttcactattttgacaatctgatggatggcctggcattaactaggaagaggacaatattatccatcctgaataactgatttcctaagaagtacaaagttgaaggatcttggtgcacatgaatcttattaaatgtgcttataaaatgtgttctatccaaataagcttagcaatccctaaaatagccttttctgatccgtgtctggaactttggcgtgcctcacagatctcttagccaaaattattcagtgaagttatgacagtgctctttgtgcgtgggaaaatgagaagtattaatgctaagtcctctattgactaattgcactccttctgtccaccttagggacgacctggaccaattggaattcaaggcccaacaggtcctcaaggattcactggctctactggtttatcgggattgaaaggagaaaggggtttcccaggccttctgggaccttatggaccaaaaggagataaggtaagaccagcaaagcttgatttctctttgatgcatgggccacaaatgtaaagatcagaagttctccatcccagttctgctcatttatgatgtcattcctgagtagtttggtgccaggctgcatttctgcatttttttttttgagacagagtctcgccctgttgcccaggctggagtacaatggcgtgatctcggctcactgcaacctctgcttcttgggttcaaatgattctcctgcctccaccttccaagtagctgggattacaggtgcctgccaccagctaatttttgtatttttagtagagatggagtttcaccatgttggccaggctggcctcaaactcctgatccaccagtctcagcctcccaaagtgctgggattacaggcatgggccaccatgccccacccaggctgcatattttaataagagatgggatgggtgatggcctgccaatggatcagcccacttctggaaggactcccatagcaagcacaccataaagtaaatgtattagctgcttgctaaacaagtgggctcactgtggtaagaagtcaggtgggtttgaactgtacatggaccggaagtccaatcacctgggcagcacagatcaggaatccaagcaaggatacagggaagaaaggggtcagagtgcttagaagcaatctaggccacaaatatagggaaagagctgcaagaaacgagagtgataatgtcatggtggcaggctgactgttcagcagctcagtttatgttccctgcctactttaatcaccttctattcgccctgttggtgagggaacgattccctcactaggatcatggggatgactaaagatatgacacctgacactgggcagatgaagttgacagcaatttattagtcacatatactcacagctcaggggaggaagataccacacaccacatagggccacatagggatagcacttgggaacagagtttagaagaaaaggctgtgcaaagcagactttgtagtatcagtagggcagggtgcccctggttcctgaaggtggatgcaattggcttgtttgaatagtccagtaggccagcaagaaattgaaactgctattccaggataagcaggaattgcacctggtccatttgataaggagagttgttcggctaggggaccttatctgtagaagcataatggagagggaaacttgtgattaggtcattcaaggttctccagttttccccagatggcagcaggtaatagtaagccttaattttaaaacctcgactatactcccttaaaaaaaagagctggtttcggaacaaagacctgtctaaggccttaggtagaggtaaatggtcacttcgaactgcagtaggaatcaagggggaggggggtacgaaacacttcttaaaaatgtaggccattgwctctcataaacctactgagtctaacaaacatcagttggattgtgtcttacattcctctccctactcctttttttagggtcccatgggagttcctggctttcttggcatcaatgggattccggtgagtgtgtccacagatgaatttttcatatcctcctttaggttctgcctcatattttggacactttgacctcagcaacatcctgtctcatgcaagcatgctcaggarcaagtgttgagatatgtatggtgaggtttaaagggcagtggtcacacacaattgcccttggattcaggcacaagcagccctatgtcggatgattggagagcggagggacctgtgtagccataacatcaatatcttagccaacatgagttaagtcttgtgggttgagtggagctttgattggagatgaggaactggttctaaggtgtaaagacagagccacattagaggatatatatcctcatatagggaaattaagatggtacatgaaattagagggtaaaatccttcatgatatcttgatacattccattttgtaatttgttctcttcagacatacctcatttcagagtgaattttcctttaaagtttttacaaagtgactactccaaagatcacttggaggcagcctcttgcaaaatttgtcctgtggacctctgctctgcccaagagaagtggaaggtttggaacttgcagacatttcttttttccatccacccagcctaatcccttagtttctctattttcatcctgtatctgtgcctatcccaccactggtgattccatggtagcattgcaccagcctttaaaatacaatatttggaacttactggctatctttttttagtttttccctttgacacttctctatatatttaagccatagtctgggctatgtttgtctacagcagcagttttcaatcttgtttaatagaagaacagaatctcagcatatagaacagaaaaaaacagtgcagctcctccatttgtgggaggtcctagagcctgcttttatccttccaacagcctctcagagattgttctgaaccttatcaaagcatggtttttggaggccctataattaacagcttttgtgttatactcaataataatctaatgtcaggaaaaggggttcaaatctctttttgccaatctatagatatttaacgtgcccctgctgtatgttagcactcaaccttgggtatacagaggaatcatgtggctctgccctgaaagatagtatcatctgattcattgtctcctctgatgtagtagaaatttatgaatttgaagaactgaaggctcacttacctcgtatctgttgcatgtatcaacaaatcggccatcagacttcagcattttattcaactgcagagtctgcaaaaatgcccagaaatagaccagtgggaaaataagcggacagggttggccatccttttgtgatgtctcctgacattttcttatggctgtgttcctatgcccctttagccagagtctccacccagactgtgtatcttctgggagccactgggtaagggaaactagcaaactggaggcagcctcttccattcatcctgtggacctggctttgccagagatgagtggaggacttggagctttccgtcttagtatgcccttcctcctgcagtcttgttttaatgggagctggaaggaagtgaatcctgtgaggctaaggctgtttccaattctgagctggaaacggccccagagtccagctggayactcttgcctccaacctgtggccaagagagccctagagcttgcaggagttgatcacttctcttcgaggcttcattgcttggcagaatgagttgcagctgttcagacccctcttaatgagcttactgctcccagtagaagtccccactccctgtggggtatccacatcttttacttaggccttatccttttctagttttcttgcctgaactcctgatatttcctttccttgaccaaaaattgtatgtgttttcttttgacttctgattgccctagctgcaggctccaaacctcattactccataaaatcccactttcttgttgtttctctctcttgaagcctctcaagaagtatttgttgaacatcttctgttcagtgcttacctcttccttccatttctaatctcccaggagtcattggtacccgtctcaaatactccagtgcctcactacctacagcctacagccctatgggacttagtgatagatagttttttgtgatagtctcatccagctcctagaaagcagagattatatcttccgttcctctcagaagcctgagaggcccatgaccaaactctgcatagagtaaacactctaaagatattgcggtggaggctgactccaacctctagtgcctagcaatagttcttagactgtcagggctcccccagacagaaaarcacagacaccataggcctagtcagactgattattttgttcaactttcagtaacacatattaagcaatttggctgaaaccaacagctttcccaacacatcttactaaactggatcactgcacasatctgcttcccctcttaatattagctgattgttaacatatgtgtcactagctttgttctcaaaactccatttttgctgtcatgtagacaatctcaacatgagtgggttagtcgtcacttcatgataacctaagtctttgcactaaagggcacagcaactaatcaagagagtgagcaaacaagcattcctaagatagtcaacattagaacaacatagactagggacagtagggctgtggcttttaatgatatcccagctgtgagttgggcctgttggcatccacaagaaatgtgtgtttatcaaatgttttcagttcaaggcagttgggagcagagattttcactttgcaatttatgtttagctttccccatggagtcaatcctgaatctctagttccctgcctggagacttgtaaatgagcacatgagatttatatcctcaaagtgaacacacaccactcaccaaatggaaacttttcctttgaaactgggttctgaggaacattgctttagcttttctggaatacaacagatcctcctattccatgtgctcagtcccttgaggcaatatagaactgtggtttcccccctcaaagagctatacgctcttggagggttggcacacacatatgtaaaatcattagctataagaatgaagggcaatgtgccagaaattctgtggttctgagaactgagaggaggtagagctcagtcctgtggtttacccttgctgacttgactgagagaagaccatttattgagctcctacttagtaaacctagtctcacttattttaaccataacccagtggaataggcattattcacttttaatgctgacaatgactctataaggtaggtattagtcatcaccatttgacagatgagggaactgaggctcaagctggggaagggaaacagtgggattggagcacaagtctaactggctcaaaacatgccttgtctacccattccttggtatcagctggatgaaaaggggctgatagatctgagtcagaggtcaaagatttatttccagagaattcagctaaggtaggaaagtgtaaacaggtatccctgaaatcctacaggtaggaaatatcaggagttcaggcaagaaaactagaaaaggataaggcctaagtaaaagatgtggataccaaaggttaagaatccagacaaaggttttggtgtcaaacagaaacaagggctcaggagtgaggaagactcctggcactgagccagcctgttgttttgcatcaatttatccctgtaacctagctgagagataacccctagcaagtttggctgggacattttataatagtggtgatcaggatcccagcaggaaacagacatttcacctgaagagtttaactgaatagagttgagtgaaggctatatttaacagatgtgggaaagattaagggaaacaacaatggatggtggaacgactaactcaaagctacccctagacccgaaaggggaaaaaatggaatggtaattactggagtcctctgagatctggaaccatgaaaaagctgttgcygaataggaactaagactatggaaaaatttgtccatttccttggaatatagccaaggagggagggcatgggagaaataaataacctgtgtctttctcgtcctgctttgatctctccagtctgtgtctcccagtggccaaatacaactggaagacagaacgaaagggagcctaggttgcctccatagaggccaggctcctaggacatagatctgagggagatagagtgtagatcttcagggcaaacaagagtaaccatcccagttactaataaaaagttgcaaactttagtgagctgcatcagcttccccagtgcaactaaaaatcatcacctgagtctgcagaggcacagattgcagcaactttgttgtaaagacaagtttattgaccattcctctggacttcgcattccatgagtccagtagtctagactcacacttttgtattaacagtgtgtctagctcttacaactataataacaacgaaaatgaaacagaattctatagaatattttctctataagaatttgataaaaggttgtttcctctaataatttgaaaagttcatttttgaacatatagcatgtttctctcaaatcattaaatatatatacttggcttttaaagtgtgtttgcatcggcaggggggacatctaccttttattgacctgtctatatttctggtctttctggtcatctctttgctccatgcccaacacacaattggcttttgatgaattaaaaaaggtatattatctacaaaagggtagactctatgtaccaaggaagcccaactctggaaaattattgaattcagatgaattgtatgagaatgattactaattccccagcaaaacaactgcctcagtcgttagtacggagaggaaaacatacagttttctaactgaagcaatagcctgatgtgtgagcatgataaaatgagattgaaaatgtgattcttgcaggacttgcttattttggaccaagcaactttcaggagagggggtgctgtgggaactgcttctgctctgttaaccaaaatccagcatcatttcccatgcagagcttccaatactgaatgtcatgccaggctgctcaggttctgtctggcctgaggaatcccaaggcctggcatgattccctgttggtatcacttcagctgccagacagctaagcccaattttagtacatctttgtatacaaggaaggtaaagttgcaagaccttgtgtatcccatctgttcatgcttgatccctttggtttcagcttggtccctattaaagcattcatccttttgggaggggcaacattgagctatgattagacacatatgcttgagtataaaggaaagacatgcaaacatacatgatggggctaagggagtgaacaaggagccacagtttaatagcatgcttggcttttctcgctgtggagccatttagaatagctgacagtcctttggctaacttgatcccttcttttctctttgaacagggccaccctggacaaccaggccccagaggcccacctggtctggatggctgtaatggaactcaaggagctgttggatttccaggccctgatggctatcctgggcttctyggaccacccgtatgctgccagatatttgcattttatttcaaatggctttgcttgtctctacgtgtgccctttttctgcctytctggaaacctcaagattttgtggggcagccactacacacccttgtccaatgtaggagtcaatactggcagcaccacaacagtaaaagtctaaagaagaataccagttgcagtggggtgtgcacatgctacactgcttagggttgccttttttttaatgcagcttgtgaaattggcaagattgttaaaaggctgtagtaaatttcatggcaaaatacacacttgggctatttgacatggtcccacatcagacaatattgaggaatgtttggaagacttatatgggatcatggaagcactaaccaaaacccaaaggggcttgcaagcttggtctataccagtggtttttaaccagaggtgatttttgccactcaggggacatttggcaattactattgatattttgaggtctcacaattggtggtgtgctactggcacaagacagccccctccccaacatctagaaatcatttggctcaaagtgtcaataatgctgaggttgagaaaccctactctatagtaacagagtttgtggctacactcccacatcataacccttggttatggtattgataaggtatttattggattccagtgtcaccacttttatttaattcyattcatccagatagggctcagatattttgatctaagggatctctagtaaatacaatgcccttccaggctgattttacaagtggctggaaagagtaaaataacacatttcagactcattgtcaacctcccttgaaataatctaaactcatgagggcactgatctgagatatttaactagaaatcactccattcatkagacatgttttatagctacatgaattaattgacacttcattggaagagcagcaccaccaccttcagtgaccaggttggggtgtgggtatatgtgtgagaaaatgagatagatggacaaagcacaagccccagattggcatataggactttgacacctaaggaccaaatcaatatgccggggggtggggaggtaaggaaagatgtattgctaacataggatgagataagtgggttacaaagttctccaaagattgccatggcaaccaggtatagaacaaaacatttccatgaaaatccagcaaagcaaggacatgctaccccctaaaaggagaaaataaatgttgaggtaataaatacccattgacaaaggacaaaggaaaaaacctagttctgtctcttaacttaacctcaagcctaaataggaacttgggcatgtattttactaagtggagatgtatcctttgctgaataccaaacagatcattcagttggcttttttgaagcttctttcaagacagtagtggccacaagaataaagtgaaacaggcagtgttaggaaaaaaagtgagaaaaaaaaaacggtttctgctcctgggatcacgttgttgttttatgataccaataatccctgtgctgaaggaatcaatcattcaataaatgcttcagtccacaaagcttagccctaccccamatactaatcctgacttccccttaggtgtagggacrttgattatccccaggtgtacaaactctaacagatattagccagcatctgccagtaagacagcaaaaaatctagttgaaagattggaattgtgtactttgaaccatttttcatgttagcagtgagatacaccagcctcttagacagactttgaatctgaagttgtgtggtagaagtacaggatgaaggtagttttgtagatatcttttagaccagaggtctacaaactggaccacatggcctttggcttgtggcctgttttttttttttttaaataataaaataaaaagaaagaaagaagaagagtataaaacagagtttagatatgacccaaaaggcctaaattatttactatctggttcttttcataaaattttactaacctctgtcctagacaaaggttctgtcagtgacctatacctgtgaggggtgaagcagcgaactctccattacatgagttatttgtggttgttcagaccagtactctgaatagatgtaaagtatctgactttaacacatttcagacccattcaaaccctttccctttacagacttctggcttggggattgggagggcatatagctctgaatcagagcacccggtcaaggaatgtgttttgccccttagtacagccaattttgccatagaaaaagccacatggtttcaggctcttgctgtcccatcctctatctgatcagataatgcaattaaaaagactrtaagtgtgtgtatttcttcaattttttaaactattttactcaggggcttcctggtcagaaaggatcaaaaggtgaccctgtccttgctccaggtagtttcaaaggaatgaaggtaagaacctgtaagtcagatagytgagtaggctataagctgggttccccagcattgggccccacctccagtgaaaacatttccagaactagcatctgtgtctctatttaaggagcagaccaagctggattcaaaagaatctggagctttttgtggtggaaacattgacataaatgtttgcaactatactgtcaaagagatttgctctgcaggatctagaccaaaaataggagacagatcagcaaacaaacagtttgcatgggtatcattttctttcacaaaccaagacatttcccggaggcagataccttttatctactccagaatccttgttgtctgtattccttggtttgaagccatgtatgtctctgcccatctcaacatggcctttagccaaagatcctggttctgcccttctctgtcactacacaccaacccatcaccctagctgggcccctggatgtctgcaaaaattgcccatcagccctgaggctggctggaatctttcatctctttccagaattgacaagaaccttctgtgttcttgtgactgtgttgcctgatatcctgcggggcctaagtaaaccctggctccaaatgattggccctattcccttgcagagtggggcaggagtccatcatttccctggtagcaaatgagaatgtatgtgcccaacatctgaggagaagatgcaccaagttcactcagctaattgatggcacttttctgtcttccattagtgcatagagcctggaacattggaaatcactttggaaggcagtgatgggggtgggtggctggagagccggacaagatttagggtatgggcttctaactatagatgccatagtagaagatagaatgtttgagttggaaaggacctcatgattcttggactcgtattgctcattttacagatagaaaaactgaggtgtactgaggctatgtgacttgctcaaagccagttcactaaagagctaaaactcaggcagtgctctttccatgctacagagagctgattttttactgtaagccaagtggagtaagactagcaggtgtcaaaatttggtcattgtcttagaaaacattgattaaatggctttgccaaatatcaaagagaccctggatccagtggaacacaacaattttcacaagatggttatattactgattcatgcagtaactaaacatgcagcaaagtaattaaaacataatcagagagtgtatgctctgttgattttcccttgaaatgaccgatttgcatcgtatacatrtgggcacagaatctttggggatgaaggcacacaggaaggtagctttgctttcctccaaaaggagtaggaaaatcactagcccacagaagtagtttctaattgataagtacctagcaaaggtgaaaattaattaatccaagtaaaatgtgaaatcctgttcagccaaggctataatatgtgtcttctacagtccagatttttcttacagaaaaaataaacaatctaaacagtcgaatatgtccaattcatacattatttaaaacacaagactttgacagaggaggcccaaggttcagagatgtgtttttgtccctataaatgttaggttagttatctgaaatattgcaggcttaatttattaaactcttcagtgtcctgcctttgtttctcagggggatcctgggctgcctggactggatggaatcactgtaagttgttatttatgtgttgagctctcagtgttgactaaaaatcactaatggtgcattttcgttcttctctatgatgttctaaggtctttgtagacctcaaggaaaatctagacagttgaagtagaatgggtcacagtattgacattttccaaatgagaaagcactgagaggatgaactgtccactgtcaagttgcatgacaagcaggctttcagactttaggccagagacatgtattcactgggatgtactttcccctaggaatgtattttgcctttccttcagcaagcacttactaaatgttttctgtttgtcgagtgctgtgagtaaatcaaaagaagtagagcacattgctttaaaaggtattccacacagaaattccttttagggactcttgataatggtgagtccatgtaaggctgtgagttatgttaataagagcattatttttctttgagattccacattgtcgtcactttttttttgaaacagcttaagaaaaaaacctttctttcctcttctttctttccctttcctgtattcactctttctttcttcgctctatcttttttcagtaatctctgagacaatgtagacacagtccctgcccccaagggtgggaaaaactagtaggaatgtggcataagaattccacagcaacttagaggaagagatgccattcacttaaggatatgtcatgtgagtctttatgtctaagagacagaaggtagcttgtgagaagtgtgaatggtgtttagctggcagtgggaggagactttctaaatagagagttacggagtttcatgagaaaaagtaggcaaaaaaatgggatgtgtgcaagcacacacaaaaacagagatgaataaggaccaaggccatacatattccctagggcaaaacaattggcttagatagtgtattcattaaatttacagaacaacatccactgtacttgctgcatagcttctcttaggtacttgttttcctgcccacaaaggctcaatgtttgtccacatacacaggcatgatatacaaactgcttcaatttggggagagggcatttggtggctaagatatttgtgatcagcaaggtgatcacaggtggctagttattttcaaaacaatgttcagactatcatttatttctggaggccctttgaacccctcctttctcttcctcctgtctgagttccaacctttcttaccctctccgccccttatccaggcccatgtcaagttattcctgctccacaattggaaatggacccttgcatttcaccagaccatttttctcttgtgatttcactgtcttatgtttaacattgttgttatttgattcaaaaattttctaagttcccttatgattttttctttgacccatggaatatttagaagtgtgttgcttcgtgtccaaatatttagtaactttccagctatctttctattatggatttctagtttgattttattgtaattacagtgaacactgtgttatttcagttcttttaaatttgtcaaggtttattttatggtccagcatacagtctatcttggtgaatattccatatgcacttgaacagaatatgtattcagctgttgctgggtataatgatattaaaaatatccattaggtcaaggtaatggatattattgtttggatcttctatgtccttcctgactgatatttttgtctagtgtttctgttcattatggaaggagggatgttaagatgtccaactgtaattgcagatttgactgtttctacttgaagttctgttagtttttgcttcatgtaatttgaagctctgctattatgtgcataggcatctaagattgttatgtcttcttgataaattgacctattttatcattttgaaatgtccttctttatctctgataatattatttgtctcgaagyctaccttatctgatattaatataacttttgcttttttaaaaaattttttgtttttttataacattctaataggaaaaatttcaaatatagagcaaagtagagtgaattttgcaatgaacacacataccattaatattttactatacatcatcccttggtatccatgggagattggattcaggacctctcatggatacccaaatccatgaatgcacaaatccctcgtataaaatggtgtcatatttgcctgtaacctatacacatcctcccctatacttttaataatctctaagtcacttataatacctaatacaatgtaaatactatgtaaaaagttgttacactgtattgtttagggaatagtaacaaaaaagaatttgcgtatgttccatacagatgcaaccatccttttataaaaaaaaaatttcaatcagttggttgaatccacagatgtggaacccacagatacagagggccaactgtacttgctttatcctccttctatctatctatccatccctctctctgtccatcaatccatcctatttttaaatttttattttaagttctggggtacatgcacaggacgtgtaggtttgttacataggtaaacaacgtgtgccatggtggtttgctgcacctatcaacctgtcacctaggttttaatcccagcatgcattagctatttttcctgatgctctcccttcccctaccccacccmccgacaggccccaatgtgtgttgttcccctccctgtgtccatgcattctcattgttcagctcccacttataagtgtgaacatgcggtgtttaatccatcctatttttaatgaatgtcaaagtaaatagtagacaagagttcagttactcctaaatcctatagcatgcctatctttaattagacttcaatatttgtttgcagttctttctttttatataaaatttacatacaatgaaacacctaactcttaagtgtatgtttgctgagttttgacaaatgcatacttgtatgtaatccaaacctctattcaggtatagaacattactatcacctcagaaagttccctcctgctcattccctgtcaatctctgccccaattcaccccaaaggcaaccacaatcctgatttttctcctttatgccagtcctagaacttcatgtaaagggaatgatataamctctagccttttgggtctggcttttcacttaacacagtgattttgagattaatccacattgtttcatatatcagtagtttgctacttcttattgtaggcatttattccactgtttgaatctatcagagtttatccttgtatcattggacaactggaacatttscaatttttgactattatgaataaagttgctatgaacattcttgtacagttctcgtggacatacatattttcatttttcttggaaaactgccttgctttttgaacttggtaaaaacttgcctctctagggcccacaaggagcacccggatttcctggagctgtaggacctgcaggaccaccaggattacaagtaagatcaatttaagcctagtttgtgatcacagtgttcacatggttgttttccctacatactatggattcaatgtaaacctgtgtaatttaggtcctcctgggtgagcaagggcaacctccattcttggagggttaaagtaaagcatgctcttgcgaggagctattggagttatttatcagagtctatctgaccatccaatctgtgcctctaaagcctcccaccctagctcaacctaaagtatagcccagggatggcagatccctgacacatttcttgccaccttccatttcctcacccatgacaggtattgctaattaatcataccaccatcactatcacccaccctgaatactgaagaagcttcaaattccttcctaacactgcatcttgggcagctctacctacctacccatttttctgacacaaaacctgtttatcatcactggtagaggaaaagcatagccagtcatctatgtggttctgggaaagctgtgtccccagattgttctctccagtgcaagaaatcccattactcagtactttggcttagcttcaccaaaggtcatcattttaaaatttctggcctgttgggaggaatgacacatgaagtcttcactaccttagcattaatgtgattaccaggtcaatttgggggatttcaaaggagataaaagggaaccataggaaagacagctagaatctactatgccaaagcaggaaagatggctgagttactggggagtgactctcaacatgccgtgttctttttgactgaaactaacaagtgctaactctttcttatttttaaaaaaaatctagggtcctccagggcstcctggtcctcttggtcctgatgtaagtatactttgtcttagggcattttgcttcctactcctaagtactctggatttcccagagagatactggtttggttaaccctactttctggtaaaaaagattgcattccaatttaagttcccagagcttatttagtaatcgattttgtttttcctccctatatccctattccctaggggaatatggggctaggttttcaaggagagaaaggagtcaaggtaaacagcttttaaaaaatacagtctgcmttccatatgctgcaagaaatgtgtctgattacacacatgtgcctgcttgtgtaagaggatttgttttttcgccttgggaaatgaatatttcccaacccacatagatcctctggtgggatctcttgagggctacatgtgtacatgccacacatgggctattgtggttcttttcccttcaaaatattgttatttccctgcttcctacctgtgaaaggtgtatgtcttacaaacatattcccttgaaatagattmtttctcttccttccatctgggtctttccttggtgttttgtgtattctgttgccttctctttccttgtctctgcttcccctcttctctctaccctttctcctcctccccctcctccacttcctcctccttttcctttttgtcctcctctctctctgtatctctctctctctcctctatctctcttctttaacctctctttcaccattctcttttmtttccctccttctctcatttctctctttacaaattgcattgtgatttcagagcctcaagcgaggctgagaacttgccattcccacccttctgttacaattgcactgccttctgaaggaacaactcttgcctccaatgttctaacatgaacatcattgcctctgattgtgctctttgcaaggattagaccacttagagttggatcattgttgccaagaggtagccattcacctcgttctgattccttttttaatctcttctaaacatcctttcatagcaaccatgaacttaaagtttccttctatccatcttgctcttccctctgcagtgctggtacaaaattcactggtcgggcttataattcttctcaccctttggcagtgagagttttgtttcctcattggcatgagggtgaagaggccaaagtaagagacagtttatttgtgagttacatccagaggacaaacccccactctggaaaaacggtcrgtgtgattgtcactttgcttaatgttccatttgatcttacagggggatgttggcctccctggcccagcaggacctccaccatctactggagagctggaattcatgggattccccaaagggaagaaaggatccaaggtagtgaacatttaagaataggaaaaaattaataaaacttttcctataattataatacaagaacttaactctaataaccagacaatactggaagaatagagggttctgggtaatggatttttgtttagaagtgagagtaaaaagccttctttgttttgccccttatgaaaagctttcttaaaaggctgagtatgtttcttggtgtgtaggtttgagtgtgcctgggcatctgaatattcatttaagcgctattttctctgttttagtgttgcagattcaatttttgatatgatgaataacataaacattaaatagttgtgtttttcctcctaactcccaaccctctcaatacttatggtgtccccaaagtactgtgacagaacacatagggtatgaatggttgctcttgaattatctttttaaagaagttatttgctcttaaaacttgaccctgaaaataggatatactgtcaccaagtggtgacaagagatgccctaatttaccagatctgaactaccaaggcttacactatagacctgtttgactgaaatattttacgatctgtatttttatgtgagtcactgtatactacctacatggttgtaattgaatggccgtgtactgttaaggtgtgcagatatctttcagtaacttgcatttcctgccagggttcctttaagctttgtgattcagttcccatggccaaggggcctaggcagggaaatgtgtttagtctcctttctttaaatttgtcttcgtggaagctgtaacaactccaagcccctccaggtttacaggaagtagtcgttgatttgggaatggtctggcaacatgaaagagattgtctgcttccttgatcattcccaaaacttagggagcttttccatggcacgtatagataaattcacatatcagggaatgacagatcagatggttatgtgtccctatccaaattgtaattgttacccttttcccaaaactatggatttctctgctgcctctaatttgctataggaaattgtactgaacagcttcttccactagaaagaaaacagacaatcatcctttctgtctcccaattagcctcagtatttgacattctgttttagacagttatggtccataatccttctcccacagcaaagagctccatgaactaagacatcctggtacagctgctagttagggagcctggggaatctgcaccactctctgctaccctaatcttgatacttcattggttccccactcctcagtccaagtacatgtggagagccatcctactgtgcgttcactgcttcctgatgctacttactaaccttgggctgattttccagggtgaaccagggcctaagggttttccaggcataagtggccctccaggcttcccggtaagtctctctatttgatcaatatgtatacaagggtctgattggacaaaagctgtagcaatagaaggctaacagaaagacctcttcccatggatattgtagagaatgccaccatctttattattagaaggtatttaaggagatgttcttgtttctcaaacacatggagacgtaagcatggttctccatgaggctgtataccttagaggttattagctcaagctctatagttaaaacagacctaggcttgactgctgattttgccagtttctaactatgtgaacctggataagtttcttaacttttctgagcctcagtttcctaacctacaaaaaaggggagaatgatggggtggttatgaggattaaatgagataatatgcatgaaaagggcttactacatgtctagcacttattattcagttaatggtagctaatcttagtaatcctacctccactttcatatctgcctttctagcttagatccttacactcatcagttaccttttgagggtccctatgtgccaggcattctgctggacttggaggttacaacagtaactaagtaaaagtccctgtccttgagattacattgtaatgggggagtgagggaaaaaacaaacaagaaaccagtaaacagatgaatctatagcaagttcatataatggttatataagttcatatatataaaagatgaaagaagggtaaagtgatgaaatgtggatggggaacagggtggtctacttgggacagagtggtcaagaagggcctttctgaggaagtgatgtatgagctgagacctgcatattatgagagagcacgtcttgtgaagatcagaaagagggtttaaggctgagggaaccgtaagtgcgaagaccttgaggttaagaaaacctcagtacttttgaggaacagtaagaaggtgagtaagtggaacagagtaagcaaggctaataattccagacagagragtaggaaccagatcttggctaccttcataggtcaatgtggtgttttatttttaatgtaatgggaagccgttcaaaggctctgacttgtattgttaagatcactctggctgtgggaggaaggggagagggaatgggaarggtggaagagcaaacacagagggtattgcagtagtccaggcaagagatggtggtggtgacttagactatagtgacagcaatggaaatggaaagaagtggatagattcaaaatgtaaaaatgttcaaccttgttattagggaacatttcaaacatttacaaaagcagagagaatgtcataatgattcctcgtgtacccatcacacarttttaataattagcaatttatggccaatctgaagcaaatcatatcatttcatcacaaatacctctgaatatttaaaaggtaagggctttttaagacatagtgacaatatcatcatcagtaatttgtgatcagtaattaatatcagttaacaaggcagaattcaaatttttgattgtcttataggtatatatatatttttacagttgcyttgtttcaatgagaggccaaacaagaccaatacattacatttgtttaatgtgtcttttaaattacaagatatgttttgaaacagctgacaagattttcatggattgggaatagggatcaggtgggaaatggatgaatcaaagatgactaggcctgcctgtgcttgctgggccagtggggatagatgactccattccttccctacagtactttgagatagtttgggtctctctgggtggccagaaagcagagccagtggagccagtggcacaggttccttctatgatgattcttattactccatagaaataaagggggcatggaaaatcatctgttcaatgcacttgattttaatcacctctgtatctaatgaaccagaaaggaagagaaccctagtgttggagacagaacacccaaactttagacccagcccctgctctgggactttggcaagtcactgaacctctctttatatctgtaatttgacaatggtcatatttatactttttattaatagaaaatatttctacatatttatagggtacatgtgatattttgttacatgcacagactgtgtaatggtgaagttagggtatttaggatatccatgaccacaaacatttatcatttctatgtgttgggaacatttcaaatctctcttctggctactttgaaatatacagtacattgttgttaactgtagtcaccctactccactatcgaatactagaacttattcattctgtctaactgtatgtttgtacccattaaccaacctctctccatctctccccccaccccacactcacaccatttccagccactggtattattcattttaatttctacctccatgagataaatttttttagtttctgcatatgagtaagaacatgcatatagctactcttttaagacccaactaataatgtatgcgaagtttctttacaaaatataaggctgtcctgttcaataagataacagccagccatgtgtggctactgagcccttgaaatgtggctgatctgaaatgagatgtactgtaagtataaaatacacaccagatctcaaaaacgtagtatgaaaagaaatctagaatatctcagtaacattttttacttgtgttaaaatgacaatatttattatatatttggttaagtaaaatatatcatttaaattaatctctgtttactttgcttttttaatgtggctactaggaaaatgaaaataacatagtagctcacattatatttctattggacagtacagatataaagtactttgcaagtgagtttgggaataaggttttcacctttctttgtagagcatttcacatagattctagccacctggcattgtccctgtgaggtaagcaaggtgagccaggcttatcttccttgtactgatgaggaaaccacagcctcaacgggtgaagaggtttgtccagaatcacgcagctaattattagcagagctgagattgaaattcagctttcttgaattctagccaatttggtggctttttccccataccatactgccccctacagtccagtttgctctaatccctgccgtggtggggtttttatctgtaaatctctgaaaaggattttatgatctcctctggtgttattggcttcactggctcacactgcctccctccccttcccttccacatccgaacccagagtatttcccctgctgcaatttcaacccattcccttttgtcctgtaaaagaaagagactgacgacaatgcacggtgataaattgcagtaccatttcaaactcagtatttccagtgtttcagagtgtgggctgaaaaatagaaaccccagttgattgtaaagacatcaaagctagaaaataacccctttacatggaacagcatgttttcatacggtgggaattaagaaaccagagttctcagcccactttggcacagattcaatgtgtgaccttggccaaatcaggtaactccttcagtcctmatatctctatctgtttaatgggaacattcgtaggtactttatatgaatggcttatgacagaaaagttatgaggagaaaggtggtaatgtatttgtgatactctgggcttttcagaggaaatgtgcttctcaaatccaaagccttcacatcagctttcaattatccacactcaccgagaaacaaggcagcactgaagacagaaatctctagggaatccaaaatgttccttttaactatttgttttcttcctatatgagtccaaatctttgtaagagacaaagtgcccaacctgacagatttgccccttaccttctttctcttggcccctctgcagtgaccaaacatccctgattttctggctcagtcctcacctcacacattttatcccattgtctccagcaacacactcacacttgtaggccacaggtccttccatggaggtcatcagagagaattgtatatccatgtgccctctgttcaagggactagcaaacacaggggaaggcaaaaatggaatagatgaggggagggataagagaagaaactggcaaatcctgaggtaactattgagtaggtcaatagttacccacacacctacccagtaggggtaactactaggtaggtggggttcttcagttgagcctcctgagaaccaaagagcatcaggagtccagagcccaggagagcaggcctggaaacagttaacctagccccattgaggctttccaggccatgggtaagtaggagtgtgggagcagcatttgcaagattactcatgaggaggactgactgtcacggggccagtcccagggcatcttgctagaacagcttgttcagcagggtccctgtacagtgcctccctattctgggagacaagttgaacctacagcacagccagtgtcttgccaagctatttatcttttcttggctctaacccccacacaaatttgtctttttttttcctttttacatttttttttacatatttatttttgttcacactatagcataagctctcaggccctctgagaaagcaagactcttctgctttctggagaaggagtacaaggcccccttatatttacaactgagggcaagatagatgggggcacaagatggttcctgaacatcatttccttcaccctttgcaacagttttgttctcttggccattattccattcagttcaacaagtatttactggaccaccttgtatgtgttcagactgtagtaatgggccttggagaaagayaaaagagagtgtaatataggtctcatgcttacaaaactttcatatgcaaccattctttgcactttaagagtttcgggcagcatgggctgccacagatttcatggacaggtcagagaaggcttcctgaagcgtttgacctcagaagccaatagacattccaccaagtcgcagcatgccttggtttgatgcagaaaaactcatattttaaataagtttgcattcagtttaacccacgagcctttcacattagaaatttaatgtagcatgaaggctgagctatttgatgcacagttatactaaatgcagaaaagagaacaggtaagtacgggaccaaagcctgctttgaattggatcctacacacacacacacacacacacacacacacacacacacamtcctcccaataaaaagacaatgaaaacaacccacattaaagaaacaaaaacatgactagccaaaaggaaacagaaatgaaaaaccctgggcccagaaagccaaggggtccttaaccagctttcagtactcatgggagtgcactgagtatgtatgtaaaaggaagaaaaaggtacaaatgggatttgagcaggtgagccaggtcacattaaagggacaacagatgttccacaacatttagtgccttttcttcattgcctcctttactttcataataagccaagatgttgtttgctaaatctatgctccaaaaagtacaattttaaacaacaacaaagtggcctcatttaagttttctgtgaaaaacattattcactttagtactgaactattctgtatcttgggggcccagacattttccctggacccagagggaagttctctcttactcactctgcttcttggagttcctgcttttccctagagaatccccaagtcatattcatggctacaaaccctcacctctgatgagcagggcaagagggcttggagaccatctcacagtcccctttggactatctctagggccaggcaagagccctacagtcccagtacaggagctgcagggtttcagtccgtgcctagatagaaatacttcttmccactgaaaaggatgttgtgctcattatgtctccaaaggggaaaagctcttgctcttccccctagtatcaacccccaagaatttgcataatcctccatttgtgggtcaaatcatcaagttcctagatgatagaaggcagcttgttttaatggaaaagtccccggaatgaaaaacacaagatatggctttctyattcatttttaacccatctagatgttggtttcctcatctgtaaaatcaacaaggttagatatttaatcatttctatactgttagcccatgatactataaatacatggaacagtgttgtgggtagggggagacattacttctagaaccaaaagggaaccttgaatgaatggtccaatttatattcagaccctatgtgcttctcaggcagtgacaagagacagcatggtgagcctccctaaggggagagtggagcttaattaaaatagcctccttgctttggatgaagccaggagaccgacaagaaaacaaacgttataacttgtggtttcttttttcatttagggccttggaactactggagaaaagggagaaaagggagaaaagggaatccctggtttgccaggacctagggtatgaacctcgaatgttacttgcctgggtctgtcaagtcatctagtccattttctttcctgtttgcttctttatgttttgcaacttgattgccacctaagcttctcgtttctcctcaacccaatggcaggttcctaagacctccttctctcttagccccattcccttgattgaatggctcccttgaaaaggaatgaggcaccccctactctaggtggctcctcagcctattcatctccttgctctcatgtatcattgtcttctgggctaaagaatgataccaagaaagaatgattgctaaagaaagcaaggcaagtgttgccttgctttcattccattctattctgagggaattgagcagggaagtggcacaggaatggaagaaagagggccaagtgcaacctttataggacagaaacaagcctggaaagttctagaacatagtgagtgatgtttggagtcaacagtttccaataataatctcatttgaaatggaaaaataactattagcctctctgattcctagcttcgggcacttaggtcttgagctagaagcagtgggccaagcttagcctcaaagaagtaacattttagagaattgtgttgttaagttgactatgaagtttagtaagagtcttttgagtattcagccatacttatccattaccctgccatttctttctctactttcccccgctccttgtcttgaaaatacatataatcaccaacaaagaatgcatttgaggtggaagacgaggccctcccataatctatttaaagatctcctgacttggaactaatgcagactaagtataataccacccagcctttctatcaaattccacctactacttaaactgtttccatttatttagatattaaaaaatgctccatgtggctatttagcctgatggattagagcttagaaagaagtcattaggccaggcrcggtggctcatgtctgtaatcccagcactttgggaggccaaggcgggtggatgacttgaggtcaggagttcgagaccagcctggccaatgtggtgaaaccctgtctctactgaaaatacaaaaattagccaagcgtggtggcgcacgcctatagccccagctacttggggggctgaggcaggagaatcgcttgaaccctggaggcggaggttgcagtgagccgagattgtaccactgcactccagcctgggtgacagagtgagactccatctcaaaaaaaaaaaaaaagtcgttaagctaggtctaggaacattcgcttacctgattttaggagctgctaaatcctgaactcagttggataactttgttatataagtctagtggctttttctaggtagcctattgctgtttctaaggtgtaactattttctttacagggtcccatgggttcagaaggagtccaaggccctccagggcaacaggtattttggttaatatcattaaagccttggggtataaaatcccaatcaaaagtcccccttgctttacctaacatggccaaagggagacattacttataatgcaaattgttcatctcccttttttttggtataatcttagccactgtcctcttttcttttcactcaagaacatgggtatccagtgtcaaattcmgtgccttgccatgccatgctgtggtcatacatctttggcatgctgtcagggactagcaaggccagcctgcttgtatccgtgtctagccttatggcccttgtacctcctaatatgtaaattggctacctactgccgtattgtcttctggaagattttacagcttccagagtcagatagaagccacatataccctgcaatgtcatccaagatccctgtgccatttgccctggcttaatccaaagaccagactctcttatgctctcatactttscacttagtggtaactatgtttctgtcacagggcaagaaagggaccctgggatttcctgggcttaatggattccaaggaattgaggtaatgttgggaagtgaaaaatccagggttggtaggtagaagagtgaattaccacaaatgtctgtatataagatgaagtatttttaatattttgaccttttaagtttcaattttttcttaagaaatgcatgtaatctgctttgaacacacaaagctgctaatgagcatttcttagatactacttgatcagtggtaaactaaggggcaggagctggtgggagcaagttcatcccgaagatgaggaaaattttattcatattgcttagaattgccaactgttggtttcactattgttttaaattctctacagacaatgcatcccctttttgcctacacctggagcatataactgccaccatcacaccctgaatatgccactgtatgtgtttttggtacctaaatccctctttggggagtattagaattcctttaatttcctctgcctgacatcatccactaacaagggttgtgatggtagtagaggcccaggcctgttgagagtggaaaaaagttaaaactctgttctctccttagcactacttaggtacagccaaggcccagagcagactgtccttgagtagagttgcaaaataaaattgggatcccttgtccttgacaggtttccaattgaatgttaggcctctggcctgctttgtgtcaccttcatcttaaatttatgggactttgaaattaacctatggactagttgatcttgaaaatctggggttatagaaggaagaacctttcattttcctagggatgggctttaatggcacatagatcttgggtaataaggaaatggaaatatttgtgtttaatgtacttaatctttgcagggtcaaaagggtgacattggcctgccaggcccagatgttttcatcgatatagatggtgctgtgatctcaggtgcaacttctcattaatttgagtggaaaataaagacaggaagttaaatcctatatcccctgtaattattaaaaggatactttgttagttactcgattgttgctaaacttgacacacccaagagcccctcatggctcctgagcttggggaataaagctatctccaatctcttggtcagggaagccaagcccagcaccccatttttgtgttcagtccactaagcctaggatttgggtctgcctgggcctgaatttgatgaaaatggttctcctggcaatgctttgggaaggattgataaccacccccaagctgggctgacttcagtttgatactatggaatactcagggcctcatgtaggtgattccatgtatgcttgagcttgacaatttcataggaagtggaaaagtacctttagttaggggagcaagyggctgagagccctcaagagtgtgatgcttagaaagtctgtcttcacctctccttgtcctagttattttgtgtgcccaactcttccctttaccttctccaaagactgagatgcccagtatctccagctacctcttgtttgaccaaaggcttctactgtagtgactcttccatggatcttccaacttatccctctcctctcatcctctaaggcccatgccctgtttggtattaatatttgacagtggcttcctgtgtaccactcccaggaaacatatatgtataacgtaaatagtggacttcaacatcttaatccaaatggtagacattttaggcattacagcagattagtggtagaagaagaagaagtacttaccagagcttatcatgaaaggcaggccttggccagaacaattcttagtacactaattttggctccagaaggccccttggctccagaagacccattatcatgtgaggccattagcattagagacttgggaaaggcatgaaaggcacttctaatgccaggacagctcctgcacctcttcttgggcattttgtagcatctgtgggcctcctctgtctttatttactattttctttcattacaatgccaggtaatcctggagatcctggtgtacctggcctcccaggccttaaaggagatgaaggcatccaaggcctacgtggcccttctggtgtccctggattgccagcattatcaggtgaaaaaaactaacccatttcctacacagatcagtcctctatacactgtggttcccagcattcccttctatacctctgggtcggggcacacacctagccaaagtcaaacaagaggtagactgtagtcagtaggttcccgactgccagcccaaggctaacgtatgtgggggtagtgagggcctgggtgagcagcttttgtttttggcttaaataatgtatcatagctggacaggcaatcctagactgtcactgaggtttgcagcaacaagaggagtcctgggttgagttgctggagctgtgtcaccctcctgtggatgtgccatcccagctgatgcttgccaagaggggctagcaaaagcccagaggaagatttgtacccagaaccttgctgtaggattcagccaggcactgaatggtcccaggatcttgtgggtaacactcttgaactaatcacatccatatgtcattctatagtgacatgtgggaaaagggcatgccagagtctgggaggcagtgatgccccagatataaagttcaacttttacttttaaagccaccagtttctaaattccttggagatgggctgctgtgaggatacctatgtttttaaagcagccacctggaaatggtacagctggccccaggaccaagttggaaaaaaatcaagaaatgaaaggctagagacccagattttcctctcaggtttgccactgagaaatgctgggcccctgatcatgtttcctctcttctttgggtctctgtttcccaagaggttaggctaattgatccctaaggatccttctaactctgatacaagagaagggcaaatgcttccctaaattcttccttggatttgtttccaacatatgccacagataggaatactccagagagtaaggtgatataatgagcatttgtgtgtgggcttattcttccaggtgtcccaggagccctagggcctcagggatttccagggctgaagggggaccaaggaaacccaggccgtaccacaattggagcagctggcctccctggcagagatggtttgccaggcccaccaggtccaccaggcccacctagtaagttactcatttctctttttggtctcaagattcagatgtgatccagactgcagaacagtcatgatttttgagggggcatctcacaggtgaaacagctaagccaggatacatgataattgcagaggggcagccatgaaggccccgtcgtctctgagtcagatccctgcctctaccagttattgataacagcagagtgttctccatcaaggaacaagcaaactagggcctaatgccttccaagttttgtacccattcccactccatctttcactgttctcagcccttaagcctttgttttttcagctcctaaagaagcaggattggttcttttgagcttgccctggtccrcaaggctccaatggggtgggctgagagactgagaaaaaaagaagccaagcctggaccctcgaggtggctgctaaaagcctacacagggcttatccttcttagatctcctacttgagtgtgagattctagattctgagagaaaagctggaaatgttgcccagaatgtttctctgtaccttaaagcccatgtccactgcggcttgcacctctttcctcttttgtcctaggggaggtttctggggtagacattgggactgctgagttttggaagctaccttgttcattcctctaaccccactgtctaatacggtgcctggaacataatggacattctgtaaatattagtagagtgaattgagccaacagaggtcctgttgactccttgctgcagatttggggtcccggtcttgaattttatttttttgtctctgctctgttgttcagcctcaaggacttgggccttggtgattgagctgctgtgttgagtcagggaagtcatcaggcttatacaagttgctaatcctttatcttttttttacccaaaggtccagaatttgagactgaaactctacacaacaaagagycagggttccctggtctccraggagaacaaggtccaaaaggaaacctaggcctcaaaggaataaaaggtgattttgtccccttgagtttcttggtcctccaaactccttagagaaggcttcctggggaatgagaaaaccaacagcctcgggaacctaaacagaagcaactgtgratcttgtttggggctttgattataggattgttagaagtgctatatttgggtctctaagactgaggctggcaatggaggtcacacaggaccaagttgctcacaggcttctttttctttctcctccacctgcagcccaggctgttaaccagtgcatgctgctacccctcccagtttgcaaaaccaaggatgtaagccacttattaccttcagccttaagcaaagtgctctaaacaggtcaagacctgggactctgaaaaacccaactggctccaggagaacaaccctagcccccactggtgttggagaactgatcaatgaccacagctgcctttgggtcatttcccccttctatcacttactctgaggggaagatgctcaataagtcaattaattatggttgtggcttaggccaggggaaggaagaagtgaaactactgactgaagaggggttttgggatggcctagggttcagttatkcaagatctctaggaatgaactgctttcctcagcstcaaacagagatgttctaacttactcctctcctttctcattgctccrtcataaaatgtcattacctaagtatatagagtctggttaagaaatgcctgaaagcttgttctctgctattcaggtcccaggaaaactatttgatggaaaagggcattaagttaacttagatgttaattttggcccttacctaactcactacaaagctgatgtatttcttgataccattcacagtcctaaaagagggacatttctgatgctccccattctgtatttccatggggctgaaagattttctctaagtatggaatagtgatagggattatcaagcttcattatacatgagaatcacccaggggaggttattaaaaattagattatttggtctggcctcctgagactgatcgattaggactgagataggacccagcaagctgccttataaataagcatcacagatgattcatgcaggatcacactcaagaaacactaatctgaagaacagactattctcttagagttttaggaatcatcaattttcttaaagtaagaaggggcccttcagaatcttagggaaactcagggtcacctatgttggcaccaattcttattttccagacaataagcatggaagatatagggagttagaacatagtgctagtgactccttgatacctcttcaaaggtgctttgctgaaatccctatcattatttatttggcatttgtctcaacatttacaaaaatatgtacacatttgtgtcatatgtacaaaagtcaggggaaaagacattttggtaaagaaaatctttgagcggcttgaattccagactctcagctggttagtagaggtcagtggttctcaactatggctatactttagactcactgatggctgagcctcatccctgactaacaaaatctgaaccactaacacagacatactctgctggagagtgaaccaagttcatttgagtgtgttctctgcaagccttcagattccctctatggagttgttcaagtcacaaataaccatgatcaattctttattcttcttggaaaaaaatgacccacttcgttctatgttgtctttttctcccaggagactcaggtttctgtgcttgtgacggtggtgttcccaacactggaccacccggggaaccaggcccacctggtccatggggtctcataggccttccaggccttaaaggagccagaggagatcgaggctctgggggtgcacagggcccagcaggggctccagtaagtcttgccaaactttgaccctgaggaagcaatggaatctttcaagtgcccttcaatccccccagttacttttctaaagcacatacaagagagatgggattaaaacaaagttttggggtttwgatctacaacatgaaatctgactatagagtctcytaaagtcctttctgctttaacctacctattttcccttttctctttccacaatttcttccttccacaacattgtttacctttgcctagcaatgtgctggcccatgaagataaaataggaattaaggtgaggtttacatcttcaaagatttcaaaatttacaaaaggtgcagaaataaatgggcaactattattcaagattacaacataatcagtgtctagaacagtgccaatatgtacccaaggttctgctctaagtcataatgctaggtgccggaaytctatgaagtctacatcttctgactactccctcttctctcttttctttgtcagggcttagttgggcctctgggtccttcaggacccaaaggaaagaagggggaaccaattctcagtacaatccaaggaatgccaggagatcggggtgattctggctcccagggcttccgtggtgtaataggagaaccaggcaaggacggagtaccaggtttaccaggtctgccaggccttccggtaagttgatcgttcctaggtgattagctctacagatcttcacacctgactttgttggggggtctgatggccactggaccatgaaacagggaagaacagagtctagaggaccttgccctgcctctgccactgaaactttttgctttttgcttttcctttatgtaaagtgggaatcattttctcagaatggatcattgtctcatttgataaatgctagtaacacctgaccatatgacttaaaaatacttcagcttctcagtgacttttctcctcaagtaatctagccacttyctgtgatctctggggttgttattatcctgctcatttcttgccctgtctcctcacccctatccagaaacttttgtgttgttagatcacccagagtagacaagattcatatccactaactaaagtcagaggagactgatagataaactatggtgatgatagataattttaacaaaacacaaagcattggtcacactggctacctctttcytgtagtcagaggactrtccagataaatctctgagttgaattttcattctttgttttatatgttgtctagggtgatggtggacagggcttcccaggtgaaaaggggttacctggacttcctggtgaaaaaggccatcctggtccacctggcctcccaggaaatgggttaccaggacttcctggaccccgtgggcttcctggagataaaggcaaggatggattaccgggacaacaaggccttcccggatctaagggtgagtcatagaatcagatggctttggacttggaaatttgaccccttgtagagtggttatgactcaggtgcatgaaatgtatcataagaagagacttgtctgaccataatcactactttcaaccccctgaaggatttgcatgtgaaaaaaagtattataattgtattgtggtaagcttagggggcagaataacatagatttccaccctacttcgtgaagaacttcctaccagagcagtctgaaaatgtaacagagctactgagggaggttatgagctcataatccctgggagagttcaagaagaagatggatgaccacttgttgcaaatgtcatcaaagcaatgagtgggagattggacaaggtgccctctaaattgtgtggtaatatcatcagctgggaaaaacctttcctcaactcatggaatctcagattgggcagaaatctagttgcttatagtctaatcccccattttatcccttaactccttcctctttatataacttctttttctacttgaattttagaaattatgtgtaacagtcctgcttatagtttatgaaggtgctatgctaataactaatcttcttcaatacagccagaacagctgttcatcccaacttttgggtttccacaacttctatgcttccattagtgacaccacacttataataatctgaagtttaaaattttgagattatctcttatttcctttgcaatycctcttatattctttccttctcttattgctactaaactctcattatctcatgcctagtttttcaaatacctatatgcttgttggaataagtggatggttggatggatggatagatgagtgagtgaatgacaacaacttcctaagtagtttttacattcaattctattaagaacgctgcagccaatttaatatctgtaaagtgccaatatcatgtaactcccctagttcaaagccacatatggtaccaattgaacagagatcatataatgtccaaactcctcaacttggaattcaaaagtctccaaacatggatacaaccaactttttcaaccttatatcatgctcttaattgaaacaaaaaaactaagacaccagtcttcttcactatacccaaacacaatatgttcacttccagctccaaaattttaccatgttgccttttcctggagtgctcttcctctttgtgtagtcatatcatattcctctttcagggttcaagataaaccccacttcttccattaagctttcccttgacctccacagtatgtcattgctacttaaattatatatctccttctattactgcttttactttccccaactgcattgtaagtctcttgatactagggatggtaatacttcttagagtttctttacatgcctagcatagtgcagtgttccataggagactaatatttgtttgcagaagaaagagccttcccaataaccaaggggctatttcttaaacatatttctcctgtttccaccttatcatcttgaagaattacaataaaagaagacaggataccaggtcttgcaaaattttatttatttccaaatctatttttgtgaatcggtgtaataaggttgatggtagatggtacaggttaaaacttgataattcaagattctttaaaccgagtcaatatatcatttcacaaattattgtgaaggttgtaaggacattttccttttttttttttttctgaaatgaagtcttactctcacccaggctgtagtgcagtggcatgatcttggctcactgcaacctctgcctcctgggttcaagcgattctcctgcctcagcctcctgagtagctgggattacaggcaccctccaccacacctggataattttygaatttttagtagagacaggctttcaccatgttggccaggctggtctcaaactcctgacctcaagtgatccacccgcgttggcctctcaaaatgctgggattacagatgtgaaccactgctcctggccataaggatttagcaaataaaatcattctgcctgttggaagtcctagtgtcagctatagctttgcttctagctctgttcccagagacattactcatggtcattctactgctcctcccgtaattgggtcttcattgtaggttaaaccattttgcaagcaacaaggttttaaactgagttataataacatgacacctataaacttacacacttccaagtcttctggctattagcaacattttaactatttgagaaccagctgagtgaacagaaggaagcttgcaggaccatttttatcccaaacatcactagtccctggatacagaaagttattaggaatatgatatggtaagctatagcctgggggatgccttatgcagaaaatgtttgtcttattccattttctgttgctacaacaggagatctgagactgggtaatttacaaagaaaagaggtttatttagctcatgattctgaaggctaggaagtccaagattgggcagcccatcagttgagggccttgtgcttcaactcattgtggaaagcagaagggcatatgcaaaagagtccaaacactaaagcaaccttgctttataacagcctgctcttgtgggaactaatccattcccttgagaaataacccagtctcccgagaaagagattaatccatcctaacaacctaattacctctcagaagcaccacctcccaacacagccactctggaaaccaagtctcaacatgagttttggtggagacaaatcatattcaaaccatagccatgtccttcttgcagtatgaagagtttcaagaaattactttaataaagagcattagctttctttttctctctatgacaaacaaatataatttttcaaacctacctttcttctgcacaattttaaaaacaaataacctgtggtccccacacatttgcattgtagccatttctgttgctagaaaaaaactaagatgctattcctgaatgtgcccactccaatcaatggtagcccagactaggacagctgcattgccaggaaagaggatgcaatcatcagaagcctttcagcctactagtgtgaattattaaaaactttgggcaagcagacaactggctatttccaaagaggctctgttccagatgctcatagtaatcaatcaccctggttattactgaactgtggtgactgtgtgcttgatctcatgtgggtgcaagtgctctccactaagttcagacaagggatttggttggtgggcatatctgggctgctgagaagacttcccttgggccccaaggaacttctgtcctagtttaattttcttcttcacttgattgctctaggtgactgctgctgtagagaggttggtaaaggagacttagacacagagagaggtgagagctagctaggtctacaagctctcagacactagtcttagctaaacaccccttttttgtttacctttgtctcagacagtcacgatggcctgagcaccacactggatgccctgtttggggagtggggagtctaaggctgggatgcaaaggctgacaccaacactgcttcagaggctccttagcacatacctcttacagcaggcagtacgggattgagtgggcatgcagtctctgagaggggctgatttccttcaccatgcatgtcgatagcttggctgatctctaccttaagcaaattcattttctgaacttcactggggccataatctgccttgagaggtacctgaaaggatccacacatgtctgaactttattcattgggcccagaacaaattgggatgttaaaatcttgggaaccagagactctttttattctgaagatggatttgggcattaatgggaaaaattctgaataattaggtcatttgttgcaattactaaacagaacatgggtagagcagatttttgctttgttgagaaggctctgaattcaggaatgtaaagtagaagacagtataaaggaaaagagccagataccaatatgacttgaagtccttccctctcaccattttgaacctctgcttacaatacacaagtgtggtgtggcatacaggcataagacaaaattattgagagaaatatgtcgttgatttcctctggtttctaaccatctttcctttgaccattgtttttctcatcccggaacctttctggatgcctgtcctcagcttcatattctaaaggctttgtttttatctggctgtcacagatgaaaagaagcaattaaatcagtctgataaattaaggatgaatggcttaatagttggacccagcccagggatatttttattttactaagtttgtttcctaagacgtaaaacaatggaactgtaatgttagagtttgacacattggagccaatgagctattgagattgttgagggcaggagagtcttttgcaggatccctctcatgatacaccctctggaggaaattcttcagcctaactcaaagagcccaggcctgagccaagcacaaggttgaaaaccccctcccagtgaagcatctcaccataaagtgttgacctgtagagcatatttccatagtagggaaataactatcagaaatagctctgtcatcttgatgtctggcagggtggaggtgggtttgaccacctacggaggaggatccaggcctatggccatctgttcacctctggaaatataactgtagaaacctgaagtctggaaggcagaaagtgctgcccagactacaagcagtgtcactarcctgaggatggccttgcaggagctctactgagtactcattcttacataagataatagttcaagataataagaactattattaattgagcatgtaccagagtgctagacactgtgctaagtgcacagtttcatgtaatcctcacacacaccatatgagaaaagtagaagtagttcccattttgccatgaggctcagagaggtttaagtatcttgtccacgcagctggttagcagcagaactaggataccagctaaggtctgtctggcttcagagcccaacttgttaaccaatacattatactgttcaattcccaaycttgatttaagaaaatagaagtgggatcaggggaggatgccagcgagttcagtaagcagtttgaatcataggatgtgtacatatttttcagaaatgtaatttgtgatttaagtacaggcaaaagctatagatgtttattaaaactgttggctctgtggtttaaagcagaccttgggggattgttttaatgaataggcaaggcttatttaattagcatagcaattgtttgtaaatggcacttgagggagcccgcaaacaatttgttcaccagtattttattaaacctcccctctgtgatcttatagattctttttatttgcattatgaatgggcaagggagaatttgctaggggaagggctatgcatgccaattttgacatcttgaatattaaaattgctactttttctccttgagcagcagagttgacagtttcaaataaggagctgagggaagggtcaccacttgcctgtcacggacaagagagtggtcttaagtgtttgcatagtacagtcatactggtacatttgaccaaggacaatcaataggtttcagcagatcccaaatgaagtgcatcaaaagaacccagtggtttggggaaaacctcattccaaggaaagggtaaacatgagaacttgagggatcttggcttcaaaccttccaatctagtcaaataagcataatggacccttaggactaacccccaacacccatcctagggagaggctctatctgagggcagggtgagtaggcaattgctgtttgctgctgttcctgcacaggcaatctctaagaaaccttgttaggtaacatctgctgcataggtgactgtttgcccactgggcatcagtggtttgataagtgatatcctagcacttggacactaggagcattctcatctgtaagcaactgtactggttgtaactccccagagctaatgatgccaaggttttccagtgtgggctcccagctgctgagtgggaagagcttggctgtcctattaaatggaatagaagtaaaggagcgtactagggagaaatcttccctaactctgggttcactgaatgcacacatgttaccatttacaggaatcaccctgccctgtattattcctgggtcatacggtccatcaggatttccaggcactcccggattcccaggtatggaatgaggccagagaaagccactaaacactcttgtaagggccataaggcaaaggaagcagaggatagcccagtagtatttggggatccacattcctcctgagggcagccttggggattgaggaaacaggatggctgctggagagggcagtgtggggaggtgagacaaggagaggctctccaagagactgggattcttgactgaacatcacaaatcatacctagcacaccgactttccyttcccctcattgcttacatttgggttttcaggccctaaagggtctcgaggcctccctgggaccccaggccagcctgggtcaagtggaagtaaaggagagccagggagtccaggattggttcatcttcctgaattaccaggtaagaaaaggagtgtctcctcacctgcttctctttgtgtgtatgtgtgtgtgtgtgtgtgtgtgtgtatttgggttgtggtagtcctctgccaattacaggaagccaagtttgctctctggtgtgggtaggattgtttaattttataccctggcaagacacagcatacagccatagaatgacagcatattagagcaataaggaccattcaaaatcagctggggcaaccccttaactttcagatgaggaaactgaggcccagatgggaaatgacttgtccgagatcactaaaccactagtgacagagctaggactctgccaggttgtctgtctgccagttctatgagtttcctggatcaactccttaagggccagtgaaagagattgagatcagtcagagggaagttgtccatttctatcccttttctcacactctcttgttccaacttgagcttcatgattcttcactgtactagtggtcctcaaactgtactccatgggccagcatcagcatcacctaggaacttgatggaaatgcaaattttctgcctctccacaggatctgctgatcataacctctggggatgggcccggtaatctgcttgttaccccaggtgattgtgatgcttgctcagatttgagaactgcactgctctagggctcggggctcatcttggaccatgtgctccagggtcccctccagtaccctctccccacccaagaagaaggaggcatgacagcagaagctagagaactccagaagaggttgaacttttctcaggatgctatggggtggcgtgtgttcttcaacaactgtaggaccctcaggaacagtttgtggacctccgcccacagccctgcctcccagaactagaacctcctccaggtcgcagggcacagtccctgcctctgcacaaggccttgcaggaacagagactcctgaccttcaagagaagtgacatatattattaatatgttagctttcatattagaaaaatctgtctcagagatctgtactcagacaaattgcttctaaacagccatggtcttttatgttcgcctttttacgtttaggatttcctggacctcgtggggagaagggcttgcctgggtttcctgggctccctggaaaagatggcttgcctgggatgattggcagtccaggcttacctggttccaagggagccactggtgacatctttggtgctgaaaatggtgctccgggggaacaaggcctacaaggattaacagggcacaaaggatttcttggagactctggccttccaggactcaagggtgaatctttttgccccaattatttaacaatctacagaaagccttatattaattcrtatacttccatgaatacttgcatgaatctggggtgatggtttaattaaggggttaaaatgaaatattttattctgtccctcccttttgtgaaattttccttaaatagcctgagtcgactttactgtcttagtaattccaaaagtgaccataactaatagtcaaatttcttgcaaagactgggttacggctgggaatagcaacaaggctggagctgagaagacagtggcacctgggataagtcctggaagttggtttgctgacccactcactgctatctctccaggctgtgatcatttgcccttttcttttatcaggtgtgcacgggaagcctggcttactaggccccaaaggtgagcggggcagccctgggacaccaggacaggtgggacagccaggcaccccaggatctagtggtccatatggcatcaagggcaaatctgggctcccaggagcaccaggcttcccaggcatctcaggtaggtccttcagaggaagagtcccaccttgacagacttcagctaggccctgggcccagatgccctgggggggcaatagcagtagtgggacatggtcagaatttagaatgagacttgactttcctaagctctcaagtttcaaatctcaagtcacccttgcagtaccaagcagaacagattgctgcaggttagcttccaaactgttgccacaaatctttcccctccccccgcctcctccatggcctcatgcccagttttcaggtttcaactctcccgacctccccagttagagaagccaccctcatcgttgagggagtctagtccatctccatgccttcactggtgctgtgggcagcctgcttttggttggggagaagcttgagcagagtgtgaccacaccggcagcctgcctctcaggcgagcatgcctccaaggacccatggccaagtgtcttttactcagcagtggggcctgacacttgctgcttccagactcgtgtttgcagctttgcctttttctcgcaccaccctcctcaacctgcttcggtgactgcaccattcccaaccgccccttactcctggcctagtgactgaagctgagttatttgcagagccattaatgtcctttttattccctttgtctctctgtgtttctgagatcttcacataggctgcctcagtgagaaaacacagcacacaagctcacagactaacacccccaatggctctgccactcaggaatgtatctgattatacactataacatggccttgcttacaaggccagggatccctgagctcctgctgtggggttggctcccattgaatttttcccttgttgtggagttcccttcacagcctcccatttgaatcctggggcttgcagctacttgatgcttttcaatccatagaaagccaagtcagccattcatttgggtccttggggacccaaatacctctgtcgtcatgatttaatcctttcgttttttaatttccttgctttgtacctgaacattccactttggcagcagctcaggaggttaatcccattgaccaactttaaagcgtggtgaaagacgtctcagaatacctaggagaccaaatgggccttgtgggtttctacagtacttggcactagggggtctttcaaccttaatgccaaggaactggctgacttaactgattgcttgagggattaaaagggcagccctgtatccaaggctccctgggaggctgaaacaacagctcagctttaacctctacttcaccgattggctcaggaaacagccattgtggcgtgattcagactggaagtaccaggaaactggagcctacttgccaccctggcttcctagagctccattcaggggctaaagtgtaaaccacattcacaaagagacaaaaagttataatcagaaggggtttgctctccctgccagctaatgtgccatgctggaagtaataaccattggcgtggcactctgggtagtagatgctaacgcttcagccaactaagaactctgcctgttagcagtttgcatgtgctattgttaaagggccatttacaaaacctaacaagccaaaccaatcagaagctatgatataggcagtggcccagatctggccagrgcctcacttgacagctgtcctgtgttctctcctgtgcttattcaggacatcctggaaagaaaggaacaagaggcaagaaaggtcctcctggatcaattgtaaagaaagggctgccagggctaaaaggccttcctggaaatccaggcctagtaggactgaaaggaagcccaggctctccaggggtcgctgggttgccagccctctctggacccaagggtaagtgaagtgatcagtgaagtgaccagtggttgccaaaaaggagcatttcagctgcgcagcttgctccttcctctctgcctaggaatgggaaatggggagggacttggacagggctttttgtgtcaagatagttggacaaggctagtgctaaagggggacctctggtcaaggtgagtcaccctcactgcctgctgggtggaacactaggctgagtatcatggtcagcaaaaccctgggcagtaccagccacactgggtttactcatttgcatagtcctaccatggaggctgatagcactcacttcctatgattgccttgatagccattggtagttgggcaggtggtatctccatttaaaaaaagggaaagtgagtggtttaaggtcacacaactggttagcagcagaacgaggctaaagctcatctccttgcctcctggccctaggctttttttttttttcctgtatcacacatgagctataactcggtgaatcataagagaggggcccaattttttttttttttttgacagagttttgctctttcgagtgaagtggcacgatctcagctcactgcaacctctgccccccaggttcaagcaattctcctgcctcagcctcccgagtagctgggattataggcacccgctaccacgcccagctaatttttgtatttttagtagagatggggttttgccatgttggccaggctggtctcgaactcctgaccacaggtgatccacccgcctcaccttcccaaagtgctaggattacagtgtgacccactgtgcccggccgagaggagcccacttctttcctttgtattgtgtagtgccatgtccctattcaggaaggtagtataatatgtaataaataagagtttggtaatgactaagactttggaattagagaaacctgggtttgaattccttctckgcaacttccttgctgtatgactttgggcaagttactcaacctccctgagcctccatttcctggtatgtaaaatgggagtgataataaaagttcttgtttttcaacaggagagaaggggtctgttggattcgtaggttttccaggaataccaggtctgcctggtattcctggaacaagaggattaaaaggaattccwggatcaactggaaaaatgggaccatctggacgygctggtactcctggtgaaaagggtgagctggggaattgaattctggaactgctgcccatgcttttcaatatatatattttgtttgttgacttggttattcctgtggtttgtaccaaatctatgttagataataaaaatttgggcttctgaattaagtccttttaaaccaaaagacttaatcccctcttagttaacactgcatgttaaaggccatgtgtgcccattcccggaagaccagtggaggaaggatttgaggagagtctaaagttgctgatagacttgggatttgtagaagaggacatacacagaaatgtgaagttgggggaataggggtggggaataagatggaaaggccccaaaagagggctgtggtggtatgggaagaaatgatgtgaaaggtcagcctttgcctgaccctgcgtctaagctctctttctcatgctgatctccatccctgcaggagacagaggcaatccggggccagtcggaatacctagtccaagacgtccaatgtcaaacctttggctcaaaggagacaaaggctctcaaggctcagccggatccaatggatttcctgggccaagaggtgctggggcaggggatggataggagaaatgctcaagaraggcttcataaccaaacttggcttccttcttgagcaaaggccctcaagtacagccccccatcgccaacctcagagcagcagtgtggctggcagcaaggaatccaagaaggctgcctcccctgggcctgaaggctgcctggactttgagactgccatttgttattgccactgtagaactgaggttttcaaccacaggcagtggtacccctggaggaccctgagcactgtgctgctttcccagtggtatagcagaagcaactctgtcgatgccccataagactgaaagcatctctccccacttcacctttacctttaagctaactgctccctgagcctgcacttggcctgcgacctggggcacctgcatcttggcaagctgggtttttcttgcccagtgtctttttccaagtctttttatttcttttacaggtgacaaaggagaggctggtcgacctggaccaccaggcctacctggagctcctggcctcccaggcattatcaaaggagttagtggaaagccagggccccctggcttcatgggaatccggggyttacctggcctgaaggggtcctctgggatcacaggtttcccaggaatgccaggagaaagtgtaagtgtgaccagatctttgtctttataccagaaaaggccccccatctcacggggatatacccccactgcccacctctctgatcccagcttacttctcagccccttctcccaggacatcctcagaaagagttctctccttgagtctgacaggtcttcccaccctttcctgaacatctcctcctctgttcttttgttcacatctccctgaaatggcagagccttctcttgcctttacaattatccaatatctgcctgcccttcagtccccagcccaggcaccatctcctccaggagtccctgagctcccacccagctgccactctatacttatcactgctgacatcaattctagttgcttctgtgtgggkctgacttcctcaatgagattgttacagcttgagaacaagaactaccttacatgcttttttctctgcaccccactgccagcatttcatgttgagcctsgcacattgtaagaattcgtaaaaacttcttgaygttttgctagaaaggtctttgaagctccacaaggtgcaacgactagcaaagaatcaagtccagcttatctgggctcatacaaggcaaggtggaagaggtggcttagcaatgagaccaacctggatttgaacctcagctccattgctcattagctctgtgatcttgtgcacactgtttaccttacctaaacctcactttcctcatctgtaaaaattgggaataatatttaaatagccttcagacagtagggagggttaagtgacatgactcatgtaaagctcttaacattgtgtctggcacatagccggctctgcataaatagcagatgtatcaaatggtctcaatgaattgaatcacagaacacctgggctccttgcaggcaaagtccctgaacttcaaaagtgtcagtccatctgatggagagaacttggtgtgtgcgtgcacacacacacacacacacacacacacacacacacacytgaagcaattgaaaataaatagttctagactggatagtcctgactacttacattctagggggatgaaaacaaagtgggaatgcattctaggagaagtcccagcatgaacagaggctcagaattagaagatatggcaatgtgcctgatgaagccgggcaaggaagcagccacgatggaggggtgtcctgggtagtggtccagtgcacacagtgacccagcccagtactcagcctcctacccaaagcactaagtggcataaatctttactggatactgggtaaatctcaaaatgaaccaaaaccataacagatatcaagaaaagaactttgctgatggcagctgacatggccacttcccagactcagatagtgtgttggacattagccagtgaaggcagattttcctctgaaaatggtaacatttgcccaaattcagactccagcacctgcacacataccacctgctacctggtggcagaaagaacttgtgttccttgcggaacctgtggcagagggctaaccctgcagggtgaagtgaaacttcttcctatgcataatggctccagagctttggcaaggacagtggtagccaactgtgtgttgagtccattgagtgcctggcctgtcatcttctgcattttctgagagactcgctagaatggccacactgtgactttctaagattcccattttgataagcagtggaatcgaatccttcccctacaaaccctaagtatgtgctctgccctttgttcatcaccttcccrtttgcaggacataacatccccacttccagcccacagtccacccttgccacagaatacatgatggacatctctcaggcagtggctcagtgaggggtgaggragtaagagggtgggcagtcctgagctctgggcagaaatgatgattcccatattgcttcgaagggttcacaaggtatcagagggtcgcctggactcccaggagcatctggtctcccaggcctgaaaggtaaggagcattttttttttcttttaatgttttcttctagagcaaggtagatttctagcaggcccaagggtctctctctttttttttttttttttttttttttcttttttaggcagagtctcgctctgtcacctagtgtcacctaggctggagtgcagtggcgcaatctcagctcactgcaacctctgcctcccgggttcaagcgattctcctgcctcagcttcctaagtagctgggattacaggcattaaccaccacacccggctaatttttgtatttttggtagagacggatttcaccatgttggtctggctggtctcaaacttctgacctcgtggtctgcccacctcagcctcccaaagtgctgggattacaggcgtgagccactgcacctggccatcccaagggtctcttgcgagggtagcggagagtctgtgtttaggggaaagtcaattaatttacattttccctttggccaaaccccttttgcagtccttgttcctcacagacaatgcaacaaacaatggtacttaccaagatctctctctgtggctttcatggatccaaggaaaaggctgtcctttggctttgtggttttgcccatctgctttccagacttagcagcgaggagaacctcggctccagtctcttcccctgataaacccagcccactaggcaggaaaatttcccattcttgctggcatcactgttccattctggtgatgtttgagggccctgcctaccatcttctctgcccatactgagcctagtgatgtgtttcccaatggagatatgctgtatgtagcagcatttcatgccagtagtctggtagcagcatcccagctcctggatggtggttcatcactttttacccaatagataattttgtcaaggagctcctctggctacactgaatctgaaaaaaaaaatgtgttcaaaagatctcagtggtgcaaaatgagctatagcttctcctggccatttaaacaatgtattggaatcctcaggagacaacggccagacagttgaaatttccggtagcccaggacccaagggacagcctggcgaatctggttttaaaggtaaggttgctatatttttgtcttgtttgcctcacagactccacaaaactgaggattagaaggaattttggaggtcaaccccaagttctgcaacttctatccagtgcagaaaatttcctatctatcaattccccaagcaaatcagcctactcttccttcaagactcatagactggcaaagacctttgggataatggcctacatccccttagtttagaagttgttatctaaactgtccttcttgaacatttccacttattgctcccacttctgaagggatactcataacaaatttacttgcttctcaattgtagggcacctttctaatgtgaaaacagccaccactatcttttttagagtttcttcattgggtctagctccttcagcaattcagaatctactctttcccatagaggaatacactgctagaaatatggcctaatcactcagcatttttcttggttttataggcacaaaaggaagagatggactaataggcaatataggcttccctggaaasaaaggtgaagatggaaaagttggtgtttctggagatgttggccttyctggagctccaggtaccatgccacatgataaccttattctgaaagagtttggattagcttcaagccatgccccattctgaacctctgccttggtttcacatttaggatttccaggagttgcyggcatgagaggagaaccaggacttccaggttcttctggtcaccaaggggcaattgggcctctaggatcccccggattartaggacccaaaggtatgtgtatttgggagcaggcagtggggaaaagtctttccctcgatgaaggacaccaactactttatcttagaagatactagctagggttaagccatgcctacaggagtcattggacatgaggaatcatgggaaaggaagatgaagagtaatgaaggcaggcaagcatgagtgtgaagagaagaatatgggatccatgaagagaagagctagcaaggaaggcaattgccctggcatgtgtagcctttccctgacttagagattgggcagtgagtttctggaaccagtctctgggagctgacaactcaaggtcttgacattgctactctgagttcttcttcaagatacctaatgagctgccatcttactcctaaagctgtattggtctctgataagagtcatgagaacctgtggtgtaggatataggttgggagtgttttcttctcccttagggcattaagtaaatgcctcaaaaaagaccaggactttaaaataaggacctcgcaatgcctttgggggcaggtagctacctcttgctgatgcttcatgattcagagttgctggagccatttttgacattctctcccctcaggcttccctggatttcctggtttacatggactgaatgggcttccgggcaccaagggtacccatggcactccaggttaggaagaccctcagggtgaagaggagggcatcagctcttccagaagcctggcaagggctggccatgaattctcgactgtggtgtatcccatatccttggactcatagctctccttattaacctccaatttgaggtcccttgatatggagaagaaagaggatgggtttttttcttctactcagattaactttctttcttgttacttcagtactctgcctctggtgtctgtcagtcaggcttctcaggccacaggcgagtgagttaggcaggaaggcctcacctccactgaggtctrccccctacccctgcatctcctcctaggacctagtatcaccggtgtgcctgggcctgctggtctccctggacccaaaggagaaaaaggatatccaggaattggcatcggagctccagggaagccgggcctgagagggcaaaaaggtgatcgaggtgagtccaagtcaggccttgtagaggctgagtgaggccttgctgggagagtcaggtttagggtayagcagggccatgtggctcacagggttgggctgtgagtgtcttcacatctctgggagtctcacaacccagtgggaatgactgctgagaaagagaggttaggctgtgcttagcattttccagtgaagactgtcagggcacagttcaccaagtccattttagcctccagattctcttctgttcctccttactaacctcaagcctctctggcatgcttggtcagagcttgcaattattggtcctgagggacagggcttgtccatttagtgagaggttggctggcatttcctcagcgtccagtgtggatggcactcccagggccctgggaagacagtgtggctgcgggaaggatcccaagactaagatgatacaagtctccaccggacagaaccacagcataccctcaactagaatttgttgggtttactagaaagcaggttctaccctaatctcggcccctgactcatcacatggcctgaagtccctttctgagtctccctttccccacctctcagaaagtaagaatgacttgtgttcttcaacttttcctcaggaaagttccaaaaacccgtgtrcattccactccatgttaaccaggaaatgaattcaccatagcatcatggttaagagtatgggctctgaaatcagactagctgggttcaaattcaagctatacctctcactagctatatgactttaaacaaggaagttacttgttcctcaatcccaaatgagcccttagttttccttttccataaaatgaacattataacagaacctacctcataggttttttgaggaatcaatgaggaacgaggtaagatatacaaaagctcagtgcctggcacatagtatatacttaagaatattattgcatgttacctggggaaatcatatttgcaaaatttcctgtttctctctgctctggggcttgaggtctcaccgcattttgtttatgtgcatgtttgtgtacagtgtgtatgtttccgagggactatattcatatattaattcatttcctgctgcattttaaattgatgcatctgcagtttctgtgtttgttcttccctttgatctggaccaaactgttcttttctgaaagccagcagcttctccagaggaagggctcaaagcagggtccgagcctgcccagagactgtcttctttcatgggatatagggaaaaggggactggataaaaacacagggacattttcttttgttttcaaatcttgatggtcattagattattcattttctttagctatctgagataataaaatcacaattatgcatgtagtaaacagcacaggtcaagaaggatacatttcagcaacatagcactaaacaaaaaacaaacatgtcacagaggaatacatttggtatgattccatcaataaatgttcaaaaataagcgaaaccaaccaatacattgtttagagatatacatggtcaaactgaagaaaaaggaagaggatgatgaacaaaattcaggagtgattgcctctgagaggaagggaaggaagagggtggagggcacacaaggaaattcaaaacaagtgacatcttcttaagttgagtggttgaaacacaagtgttcattgtatctgaattattctttgcatattataaatattatgtcatatcttctcaatatctaattaaaacaatttctttaaaaagaatacaagaaatatcataccacgccccaccccacccccacaggaacctatctttgatttgacaacgggagtcagtgcaatatgatgatttactcctaagaaaacatcacagagtggttgggtgcagtgactcatgcctgtaatcttagcactttgggaggccatggcaggyagattgcttgagcccaggagttggagaccagcctaggtaacatggtaaaaccctgtttctacaaaaaatacaaaaattagcagggcatagtggtgtgcgcctgtaatcccagctactcgggggctgaggtgggaggattgcttgagcctgggaggttgaggctgcagtgagtcctgaccacatcactgcacaccagcctgggcaacagagcaagaccctatctcaaacaaactaaccaataaaaaaacttcatagagcaatccctctcattacagtactgttatctaaataactttcaatgatactatttgttttcatatttgcactaaatacgtagaggctgcatttatgtattttgttttttcaaggctttgacactggactgagttggaaaaatgggctgttttgcattttcatctgctcatttaaagtgttttattgttaaagaaatgcatgagctttttgcaatacttgaagtcagtagtgcctttatttcaggtttaataacacgtaagtgtaattataaaattaagaaacaggtaaagggagaaaaagtctccaaaaactgccatgggaacttttataatttgtgtactgcccaccactgcctactctattacacatgtggtgtcttgtttattagttttgcataatttcagtttatatatataagctatacatatatatgctttatatgtatatatacataatatatgtgtagagctgtattttcagaaaaaaagtatacaatatgtctttcttttcagatttttaccctggggataaagaaaaatatttcaaaggttcaccaaaccagaagtaacaatgctatgagtaccaccacgtggcttagctactagttttctttttgtgttttttcttttttccggacctaagaaacctagagagacttttctcaaaatttattttttctttgtctaaatttcaagattcaattaattaatgagctatttaaaaacacccaaatmtaccatcacttttataaattttcatggatttaccttaataagagaaattcagcatatttttgcatttttcttgtcacaaaagataaaattcgatattaacatttttggattttcttgtcgcaaacaaaaattaagaatctcaaccaccagaacagtttatcaaccagtttgaatccatttatcttcatttgaatatcttctagaatatcccaaagtaataaatatatatcttccatgctacatgtataatatcaacacctacatttgtgttttcccatcaagattaccatctatgtatttgatatgtgaacattaaataaatcttctgtgatcagatgaaagttttggttttgaacatattacaatagaaatagttccacaaacagaaaacatgtaaagcagtattaaaattagagcaaatgagtattctgtatctattgtaataagtggttattctctttggccaaaaaggggggagggatttagtacagagatatttgttccataggcaattaagcaatcacttggctcatatcatgaatgacctataaaagattgttttccagtttgcctagaaattgcagaagatagccctagaagacacagaggcaccgcattcttgctgcctccattctgatcggcctggtgtctgttctgactggctggggcctgtggcctacgttctgtaacctttgtgcagcatcagacataactggctaacttaagaggtgttttttgacacagacaggtttaaaatcactttggaaacttaaaagtccaggtgctcagtcatgccttcttttctttctggtgtgggggaagttggcctaaaatatttccattaccagtgaggtaagggagctagaactttccaataaaatgcagctccagctggaaaaggggagtctctgagcccttgtcagttagtctgctttctgggaaggaaggattagggaagaagagccctctgctggcgttctctggtctggctcctacctaactgcttccattttctctgtgtgagcttccattttctctgaaagagcctggccatcttctgggcacacagagcctatccagccccttttatttattctttacaggtttcccaggtctccagggccctgctggtctccccggtgccccaggcatctccttgccctcactcatagcaggacagcctggtgaccccgggcgaccaggcctagatggagaacgaggtaaagacaggaagcccaaaagagggctagccaccaccttttgtctgacatttggggaagtcatgtatacagcgcagccaagtccctgttgctggacatatgtgggcgtgtttggcttcacatccctccccgagtggggacacaggggacttgagccaagtgcattttgctaaaatggtttgggaaagtctgggcactaggaccccaccgatggtgagggaacattctctgtcctgggaatgggctttggagtcctgtcagtccctaggccttctgcagtggctactacctgttcacctgcccctcgcccctcttccgatcttatccctaggccgcccaggccccgctggacccccaggtccccctgggccatcctcraatcaaggcgacaccggagaccctggcttccctggaattcctggacctaaagggcctaagggagaccaaggaattccaggtttttctggcctccctggagagctaggactgaaaggtacggctgctcggctggctgctgggcccttccccactccacggccaggactccttcctgcagtcctgtgaagagaggccggtggctgatgttcttccctacctcacccctgcctatcctccacccctaccacccctaccatgcygggacctgacttgcttcctttgggctttgtcaggcatgagaggtgagcctggcttcatggggactccaggcaaggttgggccacctggagacccaggatttcccggaatgaaggggaaggcagggccaagaggtaagttgagagcatgtgctgggctgatccagagctcgagggaggggcctggtggtaaggttccttcaggcatcattgctcaccacgccaagaaagtctggatgtctaaaacagctggatcaaggtaccccagagaggcagtttctctaccttggggatccttcagcctctatcacctcccaggactgaagaccactgctgccttgccaccatggatcctgctactgactgcctctctgtgttaatctctgcattagtgggcattgggtttgcactcagatcaccacccacccgtttgctcaattcagaaataaagaaccgtcttttgcatcctttcccaccctcactcacacacatgcaatctagtagcaagccctgaggcttgtacctcctaaatgtgccttgcatctgttcacctcgcagtaccttggttgctacccccagatccaagccaccaatagttctcatgcagcacccttcctcccccgaccctagtggtcacttttccacatagtggccaaaaagagcttataaaaacataaatcatccagtggcttcccatggcgtaggaatgaactcaccgtggcccgcaaagccctgtgtgatgcctccctcttcatcctcatggccagcccttcccctttgctgctcactgtgctcctgccatactggcctctttcagttatccaaaaacaccaagtcctggcctaccacagggcctttgcacatgctacttctacttcccagagtgcacttgcccctctactctttaaatagcaaagtccttctaatgttttagtggtctcagtttaaatgtcattgcttgcaaaaggccactgatcattctctaaaacagatgcctccaccccataccaccctctgctccctcccagtgtccctgtgttagtcctttcctccacaacacttctcccaacttacactcagattaacagtatttgtcgagttaggcattattcatcttcatcaccagaccataatctccataaatgtctgtcatattcattgctctatccccagagctaccaggaccctggcatataataagcactggggaaatatttgttcaatgacttactaagcaaattatgctattagaaaggcagctggctggcgccgggttcctaggctgggatgccaactgaacctctggggttagaagcgtcccctcagcctccttggcactgtgctctaaccagtgagtaaaccagccaccccagccctgagagaaggctcagctcaccatattagcagcaaatgcttctggactgcctgtcacccactgggcacaatgctgggccctgaggagacaggatgaatatgacccagttcctgccctcttggagctacccaaccactggggagagagatggataaagattgtataatatcacacagtgccatcctggagatacccgggtatcctgtggggacaaacaggatagaaagctgttgattgcaagttagtaaagaaggcttctggggcccccgtcacctccctctgcctcagcctgatgttcttatttyccccacctgcccacaggctcttctggccyccaaggtgatcctggacaaacaccaactgcagaagctgtccaggttcctcctggacccttgggtctmccagggatcgatggcatccctggcctcactggggaccctggggctcaaggccctgtaggcctacaaggtgaggagggtgccagaaaaaggagatttgttggggagttgagacagtttggctgagaggctggcttggatgtccacctccaagggtgtgtcttcrtcaagcgttgcctctcttccttcacaaagctcccaagcttcctgttggggagaagaagggccagcaggaccagcagggtggttgtacttggtacttggctttagaggatgtgagggcagagcaaggttgctactccagaccactcgcccctctctaatgtgctgcagagagatggagggagtgtggtggtgaataaagggccacacaagacaatgaaaaaagtccaaggctgggggacagaaaacctggcctctaattggagtaagttagaagtctctctgggtctcagtgtcctcattttcttcctcttcttcttcctcttcttcttcttcttcttcttttcttcttcgtcttcctcttcctcctcctcttcttcttcctcttcttcttcttcttttcttcttcctcctcctccttcttcttctttttatttttttttatttttgagatggagtcttgctctgtcaccgaggctgagagtgcattggtgccatctcacctcactgcaacctccacctctcgaattcaagtgattctcccgcctcagcctccggagtagcggggactacaggtgcataccaccacacccagctaatttttgtattttaaatagagacaaggtttccccatgttggccaggctggtctcgaactcctgacttaaggtgatctgcctgctttggcctcccaaagtgctgggattacaggcatgagccactgcgcccagcctcggtgtcctcatttctgatatgggatgctcgccgttgccctgcataatttccattgttgctaggaggatgagaagaagggaggaggaagtgggcatgaaggggctcagaaaggctaagttgagggcactgccccagggcagagatgcccccatgaactaagaactagcccaggcggctgcagccttgatgtgcagtgtgcacaccaagtcgacagccaagtgcatcgtctcctagtgagtcttgggcatgacacrtaagtcccctttcctggggaaggtgcctggggaccctctacattgagtaccctcctttgggctttctctcctgcaggctccaaaggtttacctggcatccccggtaaagatggccccagtgggctcccaggcccacctggggctcttggtgatcctggwctgcctggactgcaaggccctccaggatttgaaggtctgatgatgccacattaggaggcgggcggggcggggatggtggtctgggagggtttgaggctgggggtgagtaaaacttcaagtctgaaacttaataaacccagtggtagagcttgacactcctaagatgctcaaaaactgggctctaagtccattcactccccactaccctctgagcctgtgaagggataccctacgttctggaaggcaaaggactgttccaaatccaaatccttttctgggctctcttccagtgcttaaaaggtctgactttatactacagatggccccctgccctttacctccccttttctacccagggattctgacacacatgagagggggatgttcaagggataacaacacttgagttaaggcgtggctgtccatatacctcttctatttgtgtcccactttatattggggatgacaaattagttgtcctgagtagagaacagttcagaggctcggtgggaaactgtggcagttgatttgtcatgtctgtcatgggcaggagaggagggcaagattttaccctgctaatcctaaccctgctttcgatgactctgattcagcagctacatagttatctcctatgagggcctgcaaggctggacctgagaagtatccctctccacaccctaatccccactcagagagaccccaaggccaggtggctatgggaaggaagcctaacaatgtactttgaaaaatggggcgtctgtagctggatayatctgagatagagttgtagctctaccacttactagctgtaggacatctgagcctcaatttcttcatctaaaaattggggtggtaataccattttccagggtcatcgtgaggattgagtgagataatacatgtgtataacatgccttggacaatgtgtggtacaatgtgagtagctgatgttgtcattagctgcaccacwctcaccttttatgatctgtctctctcaggagctccagggcagcaaggccccttcgggatgcctggaatgcctggccagagcatgagagtgggctacacgttggtaaagcacagccagtcggaacaggtgcccccgtgtcccatcgggatgagccagctgtgggtggggtacagcttactgtttgtggaggggcaagagaaagcccacaaccaggacctgggtaggtaccagctctgacagccagccctggtcacctgtccccacaaacaccaacagccaacccctctcttctcccagccctttctaggtccactgttgtgtagtgagttacaagcatcagctctggagtcaggtggatctggattcaaatcctggctctatcacttactagctgtgtacactgcattagttattcaacctctctaggctttggcttcctccttaatggaacaaagctaattctagtatctatcacacacgctggtggaaagattgcatgaatcaatcacccaatgtaaattgcttagagcaacatttggcatttaagcatccattaaatgttagcaattagtagtagtaataataataatatgacctgcagggcaatgatgattacctgagaattaattgttgtctgcaggtgtgctaaatcttaaaagcagactcagtctattaaacgctgtttctttcaaagcagattaattagggcagaattatacagcttataaaaagattcttgttattatcaaatttccctggtgcatttaaaatagaatttgctcaacacacttcagcacatgtacaatgttacaggattggaaggagagggctgcctcagtctggtgcaagtggttggatgtaaacccaaaccaccatctcgtcaaagcccctcagccagacctcccctgcccttgcccactttctctccttccaggctttgctggctcctgtctgccccgcttcagcaccatgcccttcatctactgcaacatcaacgaggtgtgccactatgccaggcgcaatgataaatcttactggctctccactaccgcccctatccccatgatgcccgtcagccagacccagattccccagtacatcagccgctgctctgtgtgtgaggcaccctcgcaagccattgctgtgcacagccaggacatcaccatcccgcagtgccccctgggctggcgcagcctctggattgggtactctttcctcatggtaaggtyctgcactgtctcctcccccagttggaggcaaagggccccttggactggttcccaggctcaagggacaccaggtagaaagcatagagtttgaaaagaagagaaatgcttggactgggcttggctaaagaatggagaacccagttctgcatgaatggcaggtagttatgggtgtagcggaaagacagcagtttgcacccagtggttcaggggctagaatatctgtgagtcataggtcaatgccccgccgtctccatgcccgcttcagttatgccacayccaagggaagagcaaaacacactaagatctgggaggacagtgagggagaggctgtcaccacttggggccaggacacagtttcactaatcagtccagccatggcactgtcccctcttctctccaccctcccagatccctctggcctctgctgtctcctcccaaaaggctttgatgagtgcatgctgtgtttatatgtccttgctggtatttttgctgcctctccatttcggtgtgaaggcagcggccagccatgctgtgtgtcttgctaagaaaaagaatatctgcaggcccaaagaggcatcaagtccctcacataatatcctgtgaatacctggggatgtttcttcaaataaaaggtcaggtttagggtcaggacatcccccagagaaaaccactgtggcacccattgaagtactctgccttgccagagcttctctgttgaattgccaagggtgagatggtgagagagtgtctttaaaaatgaccaaagctgcaggctccccaacattagcgtacctacctggggaaaggtacttttccttgttatgctgtgtctttggacattggatagtttatcccagtgtaatacagaatcacctcacctgtccttctgtcctgtccaccaccctgaccaggaaataagaagaggcccctgagcttccacaggaaatggtacaaatgctgtgtactaaatctcatgtgccctgcttatgggagggctcttagcccttattcagaatctctttactcttcctttacacattaattctaacatactagaatattattcctgaagatatgtaagggtgagaagttggactgcctagcaaggcatcttgaagcaatgagacatacctattaaaaaggagaaaataattcaaaggaggcccaaggattctacgggccgtaccccttggtgtggggctcttgcataatcatcccccacaaaaactgacattcacaatgacaagcctgattcatctgcaaagtttaaaataacctagtgtctgctacttagcaaagcaggaaaatgtgttgtgcatcttagaaagtttttgattctcagggtcaaagtgaggaaaattttgatgcttcggttgtcaggaaaggtcacctgaaaggtcccatgcagactctcactcttgcaaagttctgcaaagtaaggagtccctgtgtgccaacttgggcatttgtctcattggccatttgctgacacggttgtgtattaggcctcttccctatctccttgtggtccagatgatagcccggctaaagtgaagagaaacaggcaggagtgtggagagacaggagctgctgtctatgtgaatagtaactgaaaaccaccagctcatgtgtagccctgaaactgaatactgagagagccctctgaggtgagggccagggtatttgggccaaatacaacaaattaaggagaacttcagtaggttttggactgtccttctttcccttcttagagtacaatgcatggttgagagagggctctgagaaccgcagtccagaagcctattgaattttccttcactcagcttttctcagatccatttgtcygaggaaattttgcaagggggtacctaacacacctctgaacccagtgggacagtagcagtttgggaattgctgcttgacatgtagtcattgcccacataatgggttaggagggcactagggagcttggaagggggcactcttggccctgaaagctgctatgagggaggacaagcagcccctgcccctaaaacacagctcttggtatgctggcttgaactgggggctgagacaaggaaccagggcttaggaatggagctcatgtgcccctgtagcagtggagcacccatcccctccccacaccaacccttggcaggcacagctcatgcactaatctcctgtctgtttcagcacactgccgctggtgccgagggtggaggccagtccctggtctcacctggctcctgcctagaggactttcgggccactcctttcatcgaatgcagtggtgcccgaggcacctgccactactttgcaaacaagtacagtttctggttgaccacagtggaggagaggcagcagtttggggagttgcctgtgtctgaaacgctgaaagctgggcagctccacactcgagtcagtcgctgccaggtgtgtatgaaaagcctgtagggtggcacctgccactctgccccttgccctcccctgcccctcacaacagtcacctcacaaacctgaatgrtctgaagaaggaaggcctgagccyctttgcctgtcaagttgtacattggagtctcatttgggctagactaccggacactcgtcaccccagccctcgggtccatagagatgagcccaccctgctgagatctgctgtcctgtttctgtcaagctggtgctactgtttgatttggatgattgtgtgactattcatggctacctcagaaagatttgatgggccacaactgtcttagactgctagctttctccttaccgtcttgatcggaaagctcttcctaatcgctaatcagtcatttcttcatgtacagaggtcagcacacattatttggcttaaaccagaacccagtgtttccacacttaaattctctaaccgaatattcatggatggctcaagtctgcacagagcaagtcctcactcttcaaggaggcccactgtgtctaggcaggcaagagaattgaaatgaggtgccacccagtagcccagagtgagctttagctctctctagaatgagcaagactgggccccacatggcttagagaggcttgaaggccagcagctgggttgggggtggtggtcattaatggcatatggtcctagacaaaccatctcctccttgccggctccccctccagccagagacagaggaygtggcctggttcaaagtaaagcagaggatgcaacaaatgtggccaagcctatcaaaggaaatgagaatgacagccttttttcctgggccagaagtagaggggtgggtgcgtaaggatgtgtgagttttgcttttgactccaggaacaaaaaggtaaatcccacatcccagtttctcagaagtccctgtttattccaaatgccatccagatgtgtgcaatgtggcaaactgaagctgcacagtgttggtttccttgtattctgaggatgttaaagactttgttaaatggttatccaattgctctttcacaggtagcctattaaactattttaatatgtttttttaaacctcataaaaatctagcacactcttctcttgagcagttagcagacctaaagcaagcctgaattggctatgcagtacattgtattctgtttgggggaatttgttttagccattttctttaattaccagttttccagaacactcttagctatgttgacatgaggcagttccttccaggtgattctgtttccttaagtattatataaactgtgccaatacagacaaagcataatcaatataatctgaattattgttatctttacctcctgagtaataagcatggtgtcagttttgtacatagcaaataaaataaatgaaatctgaacatgtgactcttttgatgttcctttatgaaaacttttctaatgtccatctcactgcaatttatgagtccctctcagagcctgagaggtttctgctactgccaagtcgaactctgtaacaaaacactgaggcaggaaaaaattagaagatgatcaaagtcaaagagctgaaacagtcctctaacaaacagtcaacaaacccataagctgcttcaagataagcctatgcctgcttttatccctgtcacacgctagagttcaacatatcaaagcatgatgtaggttgataaaaataaataaattttttgaataaaaaaagagttcaagaaaggcattttcatacttctgtggccttaggatcatttgtagataaaacaaaagtagagaatgttaaagtcattaaaatcaaatccaagctgtgtgtgtatgagtgtgtgtgtgtatatgtgtgtgtgtgtgtgcatatatttatatatgtataaaatatatcctctgagaggataaacaagaaattaataccattgggaatttccaagggagggaactgacctatcggagagagagacaagtcactgaatatcattttacatcttttgaattttgaaccattggaatatacggggggaaaaagaaaaacatggaatctaaggaaacaagcagattggtttggtgctagcttccagttgctggccttcctcgggacttgattaaggatgggggtgaaatgcaggcaagttaaggaagcaagaaaaggaaaatgagaaggtactgctggggcttgaggttcatcctcacaggaaagtggttagcaaagctaatttgatgaatacatgctttaaaacctattatgttgctagcctcaaatggtttggaattgtatatgatgcacagataaaatgtgtaattcaccacatgaataattctaaatatggctgtcaaccaagtagggtatacttcaaacacaatttatttttaatttatcaaacaaaaatcaacaatttaagtcactgattggcaagctacagcctgcaggccaaacccagccctccacctgcttttgtaaataaagttttcttggattacagccacactcatttacacgcatattgtctattgctgcttttgcatgtcaacagcagagttgagtagatgtgacagaggccgcatggcctgcaaagcccaaaatatttcccgtctggccctttacagaaaaagtttgctgacccctgatttaagtgatcatgatttaaggacagggtgatatctgacaaaagtatcagtaagaatggggacagtgacccatcaaatagtaagatccccgcaaacagaagggagatcaagaagtgtatatttgacatcgtttctttgacaaacgttttgatataaattataattacttcaactacacaatcaaataatttaacaagaaccttttcctccctgattcagtcactttattatttgagcaagagaacagattgctgcttagtccaaaagaggtcacatctgaaagggtgaagaacagcttaaccatctcttatctgctggttcttgaagcaagctgagagttgctgtttgtcttccagatgcccatttcctcattgcagcagctgaagacttgctgtagccatataacacaagctgggaagcaatgaactcctcctcatctctctgctcctaggctccatgattgttctatttctttccggggaagggttactgtcatttgttttgttttgttttgtttttctgagaaacagtgattggctcagtcatgattgctattgagtttgtatgctattggcatatcaggcacttgctgactagaaaagttttatgcaataagttcatgtttttatggtgccagatggaagacagaccttcaagttgagttcccaggattctacacactcagaatctcaaaatcttcctccagatcaaactcctccagttgctcagtagagtcaatgaattctatcagaatacggaaatgagaaagaagaaaagcttgacacttgggttgaagtggtcagtaaatactttactcagtagttaagactaagcatttttaattgctgtactaaagaaagacttgtgtggaggagacttacaattagaactactgccaagtattagaaattatctataaagactcaaaatagccagacttgttacataaacctaacgacggtgatgtggccaaggctctgaaagcccttcaagatacctttgaattatcgatggcctcaatttgctattctgaaccagaccatgaaaaagcaatcctagtcatcttgattttgcatagaacttttgcaatgagctcattttcttctattatcattctttgaaattggtaaatatcagctcatcagaagattaaaataaccagaagtgccatttttttatcactccagctgagtagaaattttactgtccacagaaagcatgggccacaattcttctttctcataaaacaactgctatatgtgggtctgctagctgagagccattgaacaacagcttacctgccccagtggttgtcacttctggcttggctggaggtacaaagggaggccagtgtgatggatgtttctgaactaattcaaacatccttaaattctcctttagaatttcctggggagatgacaaaacagttttaaatacttcagagtcacaacatttctaattggcaatctttgaccccaaaccctgagacagtggtctgctggtttccaggtgaaaacaggggcctagaaaatacatgcatcctctacttgaaccatctgaagactcagccatcttcaattctagatactgtttagccaggaaggaaggactttgcggggagtatctgatgaaggccagcactcactgcctattctccatcatgaggcatagtgcctgtgccagacgcatgggtccagctcactttaggggtgacatgttcctgaagcactggctccaaagaaatgtcagttagtgaaattaaatctgccccaagagactattgctacatattggcatggtttcagtggcagtccaacatgtatggtatatatcctaatttacatggcatagtcttagctgggcacggtgactcatgcctgtaatcccagcactttgggaggccgaggtgggcagatcacctgtggtcagttcaagaccagcctggccaatgtggtgaaaccctgtctctactaaaaatacaaaaattagctgggcgtggtggtgggcgcctgtaatcccagctactcgggaggctgagggaggagaatcgcttgaacctggagacggaggttgcagtgcacccagatcccgccactgcactccagcctgggtgacggagcgagcctttgtctcaaaaaataataaaataaaataaaaggcatagtcttatcagaaaattctcattccacctttaaatgtgacataaatacagttttgctgcattctaaaatgtaagtattgcctttagaaaataattgtctattaatgagataaaacattaggtttcatcactaaaaatatcactcccttgacatgctaagcatatttcaaaccaaaatttttgttcagtttccccgaagttatgcacaattccccacacctgatagtttctttgttgccttagtttctttctcttgcagtaaagtcgtatcagagtaggatttttttttactatgaaaaacaatcttgaaaaggaataaaattgggtaacttcatttttcagactaagaaaaacatatagctttaccttctgaacaaggctacaccagttatcaaagtctttttcttctttgcagaaaaatcccttgggggaaagcaaaagaacacaacttagaattacctttggtattgcacaatggagctgttggcccagaattaggatgtgggccagtctctgtggatgtgacttctcagcaataaagaaggaagactgcctgggcttctctctctcctaactcattgccttactcagacatacatatcactctctcagtcttgctctcattctcacccttgctctctgtccctttccctctttcctcatgctgcgagatattttaacttgaagatcatcttcaaagtgtagggttaattccattactttcagtgtacaaatacacacatctccaaagaacattcaattaagccaacaaacaaaagccaaatggtacttttagctagaggcaatacttaagaagatggcattgaccttcaggaaattatctatcagaatagagagaaccatcagtctgtgctttctcaacctcaaatccatcccagagtagtgaaagaatggttcacaagaggaggacttgcagctcctggtcactggtatactgacaattggattaaactagaggagaggatgcagacaggcctcagaaccaccagctacttcacaggcagatgccccttcagtgtgtgtagacaccagccatacttctgggggaaaatcctgcagcttcctagattgtgtgcacccagggcatcttgctcccttatctctccctagtgatatcccatcttcctccctgtgcctgggtagcaataatttgaggacaagaaggaaacaggggaaagagtaactaacatttatagaatgcttacaatgtgccaggcccagtgctaagtgccttacatgcattgcacctcatacaaccccataaggaacgaactattgttttcctcattttagagatgagaagactgaggctcagaaagattaagtgactcctcctaagtgcgtagttagtgatacggtttggtggtgtcctcacccaaatctcatcttgaattgtaataatccccacgtgtcaagggtgggaccaggtagagataactgaatcatgggggtggtttcccccataccatccttgtggtagtgaataagtcttatgagatctgatggttttataaatgggagttcccctgcataagctctcttgcctgccaccatgtaagacatccctttgctcttccttcatcttccaccatgattgggagtcctccccagccatgtggaactgtgagttaactaaacatctttcctttataaattacccagcctcaggtatgtctttatcagcagtgggagaacagactaatacagttagtaagtggcagagccaagattccaactggagcagtttggctccagggtccattccttccccactacactctactgcctctaatggggatagtgagcaaacatactcttgccttcctacctagcaatctggataactcccagggaaccaatctgtacacatcgtatctcctggcccacccaacctacgaatacccaccaatgcaactgaaggatccaggtttaggatgttcattcgctgtggggactgcaggcaatggaaagtctggtcattaaccgttccattctcttcagtgtcaacaaaggtctgggttgtatgagggtccaagaagatgagctcgtcacctgttttgaaggagatatgcttaaccttcaaaggattaccggtcctggcccactgctgttgttgggaggaggcactctggttctcttaacccctcccttggtgacaatgagaatggaatgacagaaagcctgaagccagggtgagcatgcttaaaggaagccacttgcgcccaaatcttatcattcaatgagaagatgtgccctagcatttacatctcctcaaagtccaagtcccaaaatggaaagtgacaggtttgagaaaatgtgggaatgagagaccacagatggcatggcaggctctgtgagcagcagtagcaaagaggcggtaggtggagtcaccaggtcgtgggcccaggtaccattagggagctttctgcctcttttgacattggaaagcatctcaggctagactgctggttctcagccccatgctcagaaagcacctctggtaagggaggaggtcctgaccttcaaaagaaatgctgactttttatggaatgggaatgctgactctttatggatgagaaaccagtgagc

SEQ ID NO: 97033 - DNA, 19241 bp, Homo sapiens
aggagttcattgcaacccagggtcccctgccacagacagtgggtgacttctggcgcctggtgtgggaacagcagagccacaccctggtcatgctgaccaactgcatggaggccggccgggtgagagatctgagtcctgggtgctgactgggtgcaggaccccgccccgaacactcatccaatgtagaccccacacccagaccttacggattcctccagggtaaccccaggcgtcttcagtgtagacctgttccccactctccccccagcccatctgctggttcacatttggggcctaaagcagaccccacagacctgggtaagaggagttgtgttctctgacccctcctcctcccccaggtgaagtgtgagcattactggcctctggactcgcagccctgcacccatgggcacctgcgggtaaccctggtaggtgaggaagtgatggagaactggacggtgcgggaactgctgctcctccaggtgcgtgtgtccagccccgtcctggccctcagccttcccctgtgacatatgccatgcatccaggaccctccaccaactccaaccttccacccactcctctgaggagctgcagtgtgccccagggaacccgctcctggtgctagaagccaggtcctccctacattcatctccagagcctgtgagtgctccctccttccaggtggaggagcagaagacactgtctgtgcgccaattccactaccaggcctggccggatcacggcgttccctcctccccagacaccttgctggctttctggaggatgcttcggcagtggctggatcagaccatggagggaggcccacccattgtgcactgcaggtggggaccagcccaggaccctctcccttgagagaaccgctcccttggggctcagacagttgtgttagacgggaccctgggaacgtacaggggaggtgaagagggagagaaggaggaggtggatgtggaagataaaggggggcgtgaagcagattaagaaaagaaaggggataaggatgaaaagatgggaacgaaagatgaaaaggcaggccaggagcggtggctcatgcctgtaaatcctagcactttgggaggccaaggcgggtggatcacttgagttcaggagtctgagaacagcttggccaacatacaaaccttgtctctactaaacatacaaaaattagccgggtgtcgtggcgggcacctgtaatcccagctactcaggaggctgaggcaggagaatcacttgaacccgggaggcagaggttgcagtgagctgaggtcgcaccactgcactccagcctgggtgactctgtctcgattaaaaaaaaaaggaaaaaaagaaagatgaaaaggtaaaggcagagaaggttgaatgcagaagagaagggagaaaggatgaagccacaggatggggatgtggccacagattctgagaaacactggagacacttccctgtgctggagtgcagggcctcccccatcaactgcttccctgatatttattttattttatttattttattttattttattattttattttattttatttgagatggagtctctccctgtcgcccagggtggagtgcaatggcgcaatctcagctcactgcaacctctgcctcccgagttcaagcaattctcctgtctcagcctcccgagtagctgggattacagctgctcaccaccacacccagctaatttttgtatttttagtagagatggggtttcaccatgttggccaggctggtctcgaactcctgacctcgtgatccgtctgcctctgcctcccaaagtgctgagatgacaggcgtgagccaccgcacctgaccctttcctgatatttatgctgaagtcccgtaggtcagatttcacctaacggtaactattagggagatgaggaagagtaacagcccctgagactggggctctggtttcagtcacagtgaacatttacacagttctactgctcctcatgacagtctcatggcaaaagggtgtcctccccattttattttattttattttatttatttatttgtttgtttattttggaggcagagtttcgctcttgttgcccaggctggagtgcagtggcatgatctcggctcactgcaacctctgcctcctgggttcaagcaattctcctgcctcagcctcctgagtagctgggattacaggcatgtgccaccacgcccggctaattttgtatttttagtagacacggggtttctccatgttggtcaggctggtctcaaactcccaacctcaagtgatccgaccacctcggcctcccaaagtgctgggattacaggcgtgaaccactgtgcccggcaatgtcctccccattttagagctgagtggatgtcatcacatcattccattagtgtgcatatccagaagcatatctagatcagccaaagcaacagagacactgaagagattagtagcttccaggccctggagggtgacaggcaatagggagagacggcctaatgggcgtggtgtctgctttaggggtgatgaaagtgttttgcaagtagatagaggtgggggctgcacagcgttgtgagtgtgacaaattgctcacgttcaaatagctatttttttttgtggagacagagtctcgctatgtcacccaggctggagtgcaacggtgcgatctccgctcactgcaacctccacctcccaagttcaagcaattctcctgcctcagcctcttgagtagctgggaatacaggtgcctgccaccccgcctggctaattttggtatttttagtggagatgaggtttcttcatgttggccaggctggtctccaacgcctgacctccggtgatccgcctgcttcagcctcccaaagtgctgggattacaggcgtgagccagtgcgcccagcttaaaatagctaatttatttatttatttatttttgtgggggacggaatcttgctctgtcgcccaggctgggagtgcagtgatgtgatctcggctcactgcaatctccgcctcccgggttcaagtgattcccttgcctcagcctctcgagtagctgggactacaggcgcccgccaccacacccgggtaatttttttttttttttggtactttagtagagacggggtttcaccatattggccaggatggtctcaatctcctgacctcgtgatccacccacctcagcctcccaaagtgctgggattacaggcgtgagccactgtgcccagcctaaaatagctaattttttcactgggcacagtagctcatgcctgtaatcccagcactttggggggctgaggtgggaggatcacttgagtccaggagtttgagaccagcctgggcaacatggcaagaccccgtctctattaaaaagttaataagttagtcagatgcagtggtgcatgcctgtgatccaagctactcaggaggctgagacaggaggatcacttgagcccaggaggtcaagggtgcagtgagccgagatcatgccactgcacttcagccttcgtgacagagagagatcctgtctcaaacaaaacaaaagactaatttttgtgtttaaaggaattactaaatgattggctggagagttcctcttcctgtatttgaaccccggctctgccacttattagctgagtggcctggggaatgggacttcacctcactcagcctccatttccccatttgtacaatggagctagtacatccgacttcttaggtttgggaggagtgaagaaggcccatcaggcacttagaacagagcctaacagatggaaggaactccaggcagttttgttgttgttgttgttgttgtttttgagatgggagttttgctcttgtcgcccaggctggagtgcagtggtgtgatcttggctcactgcaacctccacctcctgggttcaagcgattcttcgcctcagcctcccaagtagctgggattacaggcatgcgccaccacacccggctaatttttgcatttttagaagagacggttttgccaggttggccaggctggtctggaactcctgaccttgggtgatccaccggcctcagcctcccaaagtgctgggattacaggtgtgagcaggcatagttattgtcatcattcaaacacagatccctccaatcagccatgaccccggaccctcacactcctgccccttggtctgacccttcccttgttctgcctagtgctggcgtgggtcgcacaggaaccctcattgccctggacgtcctgctccggcagctgcagtccgagggtctccttgggcccttcagctttgtaaggaagatgagagagagtcggccgttgatggtgcagactgaggtgaggcagtccctcagcaacacaggacgggaggcagtgggacgagggaccctggggctccacgcagctcagacctggggggacgcctctcactcccgtgcctgcttcccaggctcagtacgtattcctgcatcagtgcatcctgcggttcctccaacagtcagcccaggccccagccgagaaggaagtcccgtatgaggatgtcgaaaacctcatctacgagaacgtggccgccatccaggcccacaagttggaggtctaagtgacgagggggctgggtcggcagcccaggcatcctcaagctctggacacccacttgagcccagattcctggaagagcagagggctgggctcccagactcctgggtgctgtgggaggagggggctggtatcccaaactctggtttccccaggagagagtggtctggtgggcttcagatgagtcctatgggagctggggatctggattcctggttccctgaaggaggagagggatgatagcttggattccctaggtctttccaggatgcagaaagaaacaggctggggcctggattctgaggcaggaaggaatttgggtctggagttctggctacttgaggaccaaaggcaggaaggatcctgccttgattttacttcagaaaccaaatcagtcttctataatctggggtcggagggagtccctgtgcccaaggtctctctgcaccccaccatccacatgtatttttccttctatcccataatttattaaatcactgttctccccagagacagttgtcccatggatttctgggtctggaaataatattggattgggagtagggatgggttcctggtatctagggatcgaggcgaacgtccaggaggggactagagggacccacacatttgcacatgaaaaaatgtaggtttgggtggttgagtctctcagagaaggcagtgtccagacgtctgtgtccagggtctgggcagtatggacagggctcgctggagctaggtgcttggggacttgccttctgagcttttcttttactcttctctgttgttgttgttgttgttttgttctgtttttgtttttgtttttgagacatggtcttgctctgttgcccagactggagtgcagtggctcactgcagccttgacctcctgggcccaggtgatcttcccacctcagcctctagagtagctgccatcacaagtgcgcaccaccacgctggctcatttttgtagagacgggattttgctatgttgcccaggctggtctccagctcctgggctcaagcattcctcctgcttcggcctcccaaagtgctgaggttacaggtatgagccaccgcactggccgcctcctgggactggtgttaggggaacttagagggcgatgtctgggggctgatagctggggactttgatgctgaaccctgcagagtctgggtctccaatgggggtctggggtctcctaggtcctaggactgagtatcctggcatgccgttctttgggctatacagggtgtgtgtcgtgtgtgttggggcgggaggagtggagtggtctggacggccaacgactggaccagaaggcagaaaatgctaaagcaccaggataaacatctgtgggcgtcatcgaggttcccgggtggaggcgggaggaggggcggggcagggctttccgcctacccgagaccaaatacgggcacacacaatacacaccacacacgcgcgcacacgcacacgggcacacacgcgcgcacgggatcctgctccgctccgcggctcccccgccccgsagagctccgcgatcagcacccgggacagcgccaccgcccacgtgcagggggtggggtccgggcggggctggcgcctcggcgtctcccgggagtgtcccgtccagccgccgagcaggtaggagctgctgggacccccgccctcagcccatccgcatccgcatccctagaggaaaggggtgtgsgagtgggggctggggcactggggagacaaccagagggagggcagcagcctgaagcggagagacagggatctggggacgcgagacaggtatggagaagacaaagagccgagggcggggagtggggcgcaggcggaggggagagggagagaccctggagacagaggccaggcgatagggaagagagacaggcgggttggggaggcagacacagggaagacgcctatgtggggtcaagaggcagcgtggagaccgaggcggtcacgagagcagcacggatgcgtggagagaccaacaggccaagaaggatgagggggctcagcacaggcaccgggcagcccccgacccgccctccagcaaaattggggagagggaagagggaacctgcgtctcagctcccaggaccaggtgcggagggagcagtcggctgtgggcgctcggaccacaggctgcccgctccccacctcgcgggacctcaggatcccagtcgggctattggggggttcccaggcaccggtgggccccggagcragcctgccccgccgggactccgcgtctgtgcgtcagycccgcccgttgtcctggcaacaacccgwtgcccgggcaaccagctttgctctcaccccgcttgagaggagcccggctgttgctctgggcaacgcggtctgcyggttcccacgtctgccttcgcccgcttccggttcagaccctgcggaggggcgaggacgaggcagaagtcagcgggatgcctgtggggccgtggaggaagaggstatccctttaggatggaactaggtcctggacacccyctctcaagtgcggggaggctgatactacaactcccagcatgactcgcggtggctgtccggtttctgcgcggctgttcgcgcaaaggcctcatgggagttggagttctttgttgtgcgtggggctcaaaggacgtctggggtgggaatgggggactagggtgcttgagtgtctctgcagaaaagactcyaggaccccgccaccatgttcccggakcccccaaccccggggcctccatcgcccgacacgcctcccgactccagtcgcatcagccacggcccaggtgagcaagacccgggggtggggggccgagcagagagaaagcctggccaggattccgaggggcgggattcggacgggtgtactcgggcaggcgggctggaaaatccggctgggatcccgggtcgtcatcctggactggaatgcgaacgaaatggggtaaaaggaaggaacagatttgcaaaaaaaaaaaaaaaaaaaaaaaaaaaaaatcgaaaccggatcaaggggtgttgcatggaatgggatcttagaattggaaggtccacctagctcttcttttacagataaggaaacaggcccgatgaggagcagggcttcttgtaaaagcatcaggagttgagcagaaatggggggcggggtcgggtaaggaaaggcagaactaacaagcaagcaaatccagatggtgtcagcctgggttggggcatcgaatctctctataggccacattaggtggaagaaaaacacaggaagaaatgcaatgaaaatggctggagggaaaaggaggccagcattccagcttccacgtgtaatcaggactgaatcagcctgcgtgctgcccaggcctcaatgtgtgttgtctccacccctctgcagtgcccccctgggccctggccaccatcgtgctggtctcaggcctcctcatcttcagctgctgtttctgtctctaccggaagagctgtcggaggcggacaggcaagaagagccaggcccaagcccaggtccaccttcaggaagtgaaggggctgggccagagttacatagacaaggtgtggcccagcccagcccctccacctggccccttcccgcaccctgctcctctcaatggcccagctggtcccagtccctgctcccttctgtcctataggaacccaccttactggctcatcctccctgtgtgtctagccctcaactggactctggggacccagagatggaacagaactagttgctattcccaagaacttcccagtctggtgggagagtcaggcactgacacagacactcaccacacagggtaatatgtgccatactacagggtctcataggagcacagaaaaggcatcccactgtatagaaacctacagaaacatataaatatttggctctgggccgggtgcggtggctcacgcctgtaatcctagcacttgggaggctgaggtggacagattgcctgaggtcatgaattcaagactagcctgggcaacatgatgaaaccctgtctctactaaaaatacaaaagccagccatggtggtgtggtataatcccagctactcgagaggctgaggcactgaaaccgggaggtggaggctgcagtgagctgtgatcgcgccactgcactccagcctgggtgacagagcgagactctgtctccaataaatagataaataaataaatggctctgaaagctgaaaaccagctttgtgccagaatactttaaaatatgctgatttttttcagaaaatgggacatatttacagtaggaaaaagtttaaaacagagggtcagacagaggaggcttcgtggtggaggtgacttctgcactgagacctgagggacagagttaactgagaccagagagaaggacattctagtccaagttggagcatgtgttgaggccccatatccagattcaggccccatatccagawtctgaggcttatttggggaacaaagagtcatttctcacaatagctgcactctggagtgaagtgtctggagaactcagcagtatccatgtcatgaaggtgatgaargctacaaatatgttttgagcatgagagggacagggtcagawggtgttaggatgactcctctggaaccctgtgtaggacagatctgcggcgagggatccagggacgaggccagtgcagcagcagcctggagaggataaaagacatttgcattggaygaggccgttggaatggaaagtggtcactgcagggtctgaaaattaagtctctcagtgcagagtgcagtggttgcctgggagccagacagccctaggtttccaaccaagaaggaccatttcctggttgtgtgaccttggagmactcactgtccctctctgagcctcaagtctgtggtcactaacttggtatttcccctccttccttctcaataaggagctgttcaattagcatccgtaaaggatgctatttagggtcctggtgtccagccccatccctgtcccttaaaccagtgatgttcaaagaccgtctgcagcagaatcacactgggtacttgttgaaatgcaaattctggcactagcacctgacctatcaagtcagaatccctgaagaggtgacytcagacattttgccacaggattcaggggaattcaggttcacattgaattttaagaattgctggcctaggttaaggagacaccttctgctttttcattcaactttagaatggcaagtacacagtaaatatgccatttctcctccatgttttgctgtgctaagatcacaagtaaacatggcagtttggactagcaccccagtacatccattagcatgtgaaataaaacctgcattattcctgtgggcaatgggacactatcagcacttgttttaatctaagcatgacaagcacatgtctagttcctgcccatagcagacaccactaatcaaaccttcacaaacatactgcatctgtgttaccacgtctatttcctgcctgtggcagacagcactagtcaaatactgaatctgcttagcctgtgagagctcaggtatagcccaagggacctgtgagcctcccttggcttctgagcctgatggatactgctatcaggggaagacttcacccacccttacccctggctccytaaggtgcagccagaagtagaggagctggagccagcaccatccgggccagggcagcaggtgrcagacaarcatgagctaggacractgcagtactccctggattatgacttccagagtggccaggtgggtgtggaggaaggggawgctttggagggaggatcccgggggttccaaccccttctgaaaggagccatggaagggaggctaagactagtgttccccacctcccccactgtgcctgggccctgcagctgctggtgggcattctgcaagcaatgggattggcagccttggatcttggtggctcctcggacccctatgtgcgggtctacctgctgmcggacaaacggaggcggtacgagaccaaggtgcatcggcagacgctgaaccctcactttggggagaccttcgccttcaaggtgagctcctgccttcaggccccgtgttccatagcctgtgcccagtccctggaacactagggaccgaccccttccgcttttcctggaggcggccacagctcaggtggcagctaccagctctggggctattccactggaccctgggcactactgactcctgggctgtagcctggtccttgggcggtacgatttgggttccactgacccgtgatttttttccgcatggatccctggactttcccatttgagttcccccaactgttcgcttcgaccctcgctgcctcactccaygccttccttctggttgtgctgtgcctcaccctatctctgacttcctgctctctactgcggattctctgtgcactccaggtmccctacgtggagctggggggcagggtgctggtcatggcggtgtacgacttcgaccgcttctctcgcaatgacgccatcggggaggtgcgggtccctatgagctccgtggacctggggcggccagtgcaggcctggcgggagctgcaggcggctccgcgggaggaggtgagcatgcgcggtcrcgccccragccacgyccccaggcccagycccgcccacaacatcctgagccaatcagatcataggctttccagaccctcagggcggcgtggattgtacccctgaggrggmatggatgtggagccggggctctggtgatgggccyctctcctttcagcaggagaagcttggggacatctgcttctccctccgctatgtccccacggccgggaagctcaccgtcatcgtcctggaggctaaaaacctgaagaagatggacgtaggaggactgtcaggtgtgtgggaagcaagggartggggtgtgtggggatggcgtgrggtgggttctcgttctgacagtttctgagcctcgagggtttcttcggggacagggaggacctggctgcygtggaaggcatggattttggcatagagctagggagacccgaagggtgtaggcagkgtttctatgttggtccaacaacccagcagtggggagctataagactcctccttcctctccccagatccatacgtcaaggtccacctgctgcagggcggcaaaaaggtgcggaagaagaaaaccaccatcaagaagaacactctgaacccctattacaacgaagctttcagcttcgaggtgccctgtgaccaagtccaggtgagctcaaacctgcccttctccaagagcccagacctttagtaatcgccattgctaggcggagggagactttttagcatctccctagaaaccaggtgagggggtctgaggttatgctctcagtctgtttcctcctatgaggaccaggaagcctcttccactccaggaagagactccttaaaattgggtgtgggtgtcctatctgctctaagcgggaccgggatgtcccacccctaagcagtaccagatgctccaccctaagcaggatcagtatgccccgccccaccaagcggaaccaggatgctccgcccccaagcaggaccaggatgccccgcccccaagcaggaccaggatgccccgcccccaagcgggaccaggatgccccactcctaagcgggaccagattccccaccctaagcaggaccaggatgccccgccctcctcaggaacgtggttctaagaaaaagagacctcccctcacttctttagggacggcgcctaccctagcccggcccctgttaaagttctgcagctttgcggctcttaggaggctgctcccccaggaggcgccgaacacacccgctccgcaaccgagtcctgagggttcatttccttagaaacctggctgcgcaggaagaaaggcgccagagcctcctcctcgccgcaggctccgtccctctcgtctcccaccccctcccccgtcccgagctccggggccccgagccctcgggtggcagcgagaggtaccctcagccgtgaaaacggacaccgccccttccggggcctcctcccctcacgctcctctctcctcttcctcccgcgcccaccccagaaggtgcaggtggagctgaccgtgctggactacgacaagctgggcaagaacgaggccatcgggagggtggccgtgggggcggccgccggcggggctggcctgcggcactgggcggacatgctggccaacccgcggcggcccattgcccagtggcactcgctgcggcccccggaccgagtgaggctgctgcctgcgccctgactcccaccccaagcccccggccaagcctggactctagcccctgaccccagactcccgagaccggccaaagccaagccagccccacccttaagcttcctctgacggttaccctccccccaccttccaccccaaccatctgaaccattcctgtcttctcacccccaacgatgccaatcacgacaactttccagcacactcccccgaccctcgcggacacacccagatgccccagggaccccgggaagggaaggcagcctggtttctcctgcccccgggtcctgccccctgctttgacaatcagccatcctcgtctgctctcctctctcttccaacacagcccatccctgcactgctcctggggccaaataaatattcagcagctccggtggcctgggcccatgctccttgatgggggtgggcaagggctgggacccaagaggaaacctcgtttccaggaatgggcgctcgcagggcggtgtgagtgctgttcgtcctgaaagcctctgagagactggcctgaccccatggactccctcacactctcacccgttcattcctcactcaccactctgagcctgggtttcctcctctggagaatgttgggataataataattcctgccacacgctggctgtgaggagtccgcgagaactcccttgcttgtccatgaatttatccactcgcttgctcacccatgactcacatcgattttcatacccatttctgcatccctccctccctctcttttttttcttccttccattccatattccctgaggtcttctgttgagtgctggggccccagaatatccaaacacagacctgaccccccaagcgacttactgccatcaaaacaaaggagaggcgcggagccagggaatacaatctccagagcctgcgagagaggttggagttcagcaaggaaagccaatgatttcaacttcacctctttcttttttcttttcttttttcctttttgttttctttctgtctttccttttctttctttttctcttgttttttttttgtttgtttgtttttttgtttttgtttttgtttttttgagatgaagtctcactttgtcgcccaggctggagtgcagtggcacgatttcggctcactgcaagctcctcctcccgggttcacgccattctcctgcctcagcctcccgagcagctgggactacaggcgcccgccaccacacccggctaatttttttgtatttttagtagagacggcatttcaccgtgttagccaggatgatctcgatctcctgacctcgtgatccgcccgcctcggcctcccaatgtgctaggattacaggcgtgagccaccgcgcccggcccttcttcttttcttttcttttctatttcttttcttctcttcttcttttttttaattttgagacggagtttcgctgttgttgcccagaatggagggcaatggtgcaatctcggctcaccgcaacccctgcctcccgggttcaagcgattcttctgcctcagcctcttctttcttctttttttgacagggtttctctgtgtaccctggctggagtgcggtggggcaatcatagctcactgcagcctcaacctcctgggctcaggggatcctcctgcctcagactcctgagtagctgggaccacaggcacatgcaaccatgcctagctaattttttcttttcttttcttttcttttttagagatggggtcttgctatgttgcacaggctggtttcaaactcctgcaatcctcctgtgtgagtagctgggactgtagacatgagccgccgcatctgacctcattgttctttcaacgaatgctgcctcctactctgtttctagcaaagatgatagttccattggcttctaccttatctcatcccatacagaattttgggtggtgaacaaagacctataagatttggccagagaactctctgagcagcagattaagtggagaatgaggcaaaaattacccccacgtaccaaaaaaggaggcagcaaacaaacttacttgctcctaagcttcctggtagccaatcgggaaagtgaaaatagaacagctacacagattataatatccatgagatttttaatttttctccaaaggaattcagtaacttttcatgtgtgtgagtgtgtgtgtgtgtgtgtgtgtgtgtgtgtgtgtgtgtgtggctgtagagcatgtctttatgaagacagccctttatgttactactattactgccaataataatcctcacagcaaactcatgaaataaacatgatcattattcccagttgacaaatgagtccaaactgtgctttagaaaatttggggctgggcgtagtggctcacgcctgtaatcccagcactttgggaggctgaggtgggcggatcacctatggtcaggaattcaagaccagctgggccaacatgctgaaaccctgtctctactaaaaatacaaaaattaactgggtgtcgtggcaagcacctgtaatcccagctactagggaggctgaggcaggagactcgcttgaacccaggaggtggaggttgcagtgagtcgagatcgcgccattgcactccagcctggacaacaagagcaaaactccatctaaaaaaagagagagagagagagagagagaattcctgtgaaatgctcagaatcacacagccagagagcctgtctctaaatcctgggattgatttagatgatggcaatggggtccttgggtctctgtctcaacaagaaagcagagcgatagaagaataaaaccattacaaatggccgtccacactgggaccaaaacgtaaaaaggctgacataacttagggagggtggtcaggggcagccttgctgaggaggtgcggtctgggccatgacttgaatgacaagaaggaacgaagcttgcaaaggttagggagaacaacagtggaatattatttggtcataaaaacagaagaaagcattgattcatgcttcagcatagatgagtcctgaaaatattatgccaagtgaaggaagccggatacagaaggctgcatagtgcagtattccatccaaaagaaatctcctgcactgacaaatacatagagacagaaagtagattcgtggttgccagggacagaggagagagaaatggggagataaatggggtacgtgttttcttttggagtgatgagaaagttctggaattagacagtggtgatggttgcacagcattgcaagtgtactaaatgtcattcccaatcaacttaatagtgtgtgtgttttacaccaatttaaaaagaaaacaaggccaagcacgatggctcatgccttaatcctagcactttgggaggcaggaggattgcttggggcccagggttagacaccagcctggataacctctctatttttaaaatttgtaaagttagctaggtatgctggcacgtggctatagttctagctacttggggagcagaggtgggaggatcgattgagcccaggagtttcaggctggagtactccagcctaggcaacagagcaagtccctgccttaaataaataaataaataaatacagccgggcgcagtggctcacgcctgtaatctcagaattttgggaggccaaggccggcggatcacttgaggtcgggagtttgagaccagcctgaccaacacggagaaaccctgtctctactaaaaatacaaaattagctgggcgtgatggcacatgcctgtagtcccagctactcaggaggctgaggcaggagaatggcttgaacccggcaggtggacgttgcagtgagccgagatagcgccattgcactccaacctgggcaacaagagtgaaactccatctcaaataagtaaataaataacagcctgggcaactagtgagaccctttctctacataaataaataaataaatatccgggcatggcggcacttgcctgtggtcccagctactcaggggactgaggtgggaggactgcttgagcctgagaggttgaggctgcagtgagctatgatcacaccactgaactcaagtctggataacagagcaagactttgtctcaaaaataaatatatagaaaacaaagatgagggggaagataatttaaggcaaaagaatcccaagttgcaaaggccctggggttcaaacggcttggtgtgttctccaaggagccaggaggctgatgtggcttcaggggtggatgactgcagattgcatagggcatagggagccaagctaaggagcggggaatgtgtccaggtgcagcgggaagactttggaggatttgaagaggtgggagacattatttgatttatgtttaagatcactctgggccaggtgcagtggctcacaccggtaattccagcactttgggaggctgaggccggcggaactcttgaagtcaggagttcgagaccagcctggctaacatggtgaaaccccgtctctactaaaaataaaaaagaatcgctggagctgggcacggtggctcacgcctgtaatcctagcgctttgggaggccaaggcaggtggattgcctgagctcaggaattcgagaccagcctgggcaacacggtgaaacctcgtctctactaaaatacaaaaaattagctgggcgtggcagcgtgcgcctgtaatcccagctacttgggaggctgaggcaggagaattgctagaacccgggaagcggaggttgcagtgagccaagatcgtgccactgcactccagcctgggcgacagagcaagactccgtctctaaaaaaaaaataataaataaataaatcgcctggctcggtggttcacacctgtaatcccaacactttgagagaccaaggcgggcagatcacctgaggtcgtgagttggagaccagcctgaccaacacggagaaaccctgtctctacaaaaaatacaaaattagccgggcgtcctggcgcctgcctgtaatcccagctactcgggaggctgaggcagaagaatggcttgaacccgggaggcggaggttgcggtgagccgagatcgcgccattgcactccagcctgggcaacaagagtgaaactctctctctctctctctctctctctctctctctatatatatatatatatatatgtatatatatgtatatttgtattttattttgtatatatatacaaaatatttgtattttattttgtgtatatataaatatatatacatatatttgtattttattttgtgtgtgtatatatatatatatacccaaaataaaatacaaatacaaaaattagctggtgtggtggcaaatgcctgtagtcccagctacctgggaggctgggacaggagaatcgcttgaacccgggaggcggaggtttcagtgagccgagatcgcgccactgcactccagcctgggtgtcacagcaagactccatctcaaaaaaaaaaaatgtcactctggttcctttgctgagaatttgttgggagagtgggagaaatagggaggaaaggcattaattctccagagagaaacccaggatctggggctcttgcaggcttagagctggcctggaaggggctggttagccagcctgattctgcaggaatgtctgaggtctcaaccttcgtttccccagtaggtattgtcttcccagtgcccagatctgccctcaggaggcagatccgctgcacctctgcccgctgcacgctacattcccatttcacagagcagcagactgaggctcagaaagggtgactggtctaagctcatgtgtctgggcaaggagaggaggcagagagccaagtccccttgggcgctgagcccagtgctgggtgctggggtgatctagagatgtgcctcattcagactttggtttttcttttttttttttttgagacagagtcttgctctgtcgcccaggctggagttcagaggcgcgatctcagttcactgcaacctctgcctcccaggttcaacagactctcctgcctcagcctccggagtagctgggattacaggtgcgtgccaccacgcccggttaatttttgtattttttaaggtcgaggcgcggtttcaccatgttggccagactggtctccaacttctgacctcaagttatctgcccaccttgacctcccaaagtgttgggatcacaggcgtggccacagcgcccggccgacttacccttattttaatgcagttgatttaactgtacgattacagaatttacctgtaatttttttgttcatgtcagaagagtaatgtgccgatgtcgtaacaaggtttgagggaggcacatctcacgcatgcgcgtgaacacccaatcatcccgcttagaaactacaaaaggatctagctgtaagtttaaattatggcttcgtgtaacaataaccagctcacaaatccctgaatttttaatga

SEQ ID NO: 97034 - DNA, 12599 bp, Homo sapiens
tatgtgaaaagaattgtcatgtattatttattcatttaaaagtaaaagtttattgacagtctataatcttctgttctccaataacataaataatcttctctcatcccaaacatggaaatggatgtttcaactttctctgtacagaaaaaaaatttcttttttttttttttttaagtatttattgatcattcttgggtgtttcttaataatagttaaggggaggaggagaatttaaaaagctgtaactcggccgggcgcggtggctcacgcctgtaatcccagcatttgggaggccgaggcaggcgaatcacgaggtcaggagatcgagaccatcctggctaacatggtgaaaccccgtctctactaaaaaaaccaaaaaattagatgggcatggtggtgtgcctggtgatgcacacctgtagtcctagctactagcgaggctgaggcaggagaatggtgtgaacccgggaggcggagcttgcagtgagccgagatcacgccactgcactccagcctgggcgacagagcaagactccgtctcaaaaaaaaaaaaaaaaaaaaaaaaaaagctctaactcaactttctagtcagaaataggcatatgaacaatattcagaaattaaagtaggcagtccatttgtgtaggtggtaggtaaggatgtgaagaaatttaaaaaaaaaatgttttcatgtagtggctttatattttaaaaagtttttatgcacaagaaattccaatgcaaatatatgggatcataaataatttccccagcactgcctggactctactcccttcatctcccactccaaatgcaagtgagcatcagtaactttattataaaatagtgttcaccaacattttagggagctttttgtttgtttctttgtttcacactataagacttttcagaacctttgatatgttaatacgcactgtgaatctcaatatgaagaaagaacctataaatattatttctaatcatatatggtctcagaacccattttttccctaaaaagtctccagtacatgtattgtatatatgagataccctttaggaaaagttggcttacagcaaggaaattagaggaaattttaagctatagaagctggccagatgtttgccagagttttttcatctttctgggcacatagattatattcgccagcttcacttgacgttagatgcagccacatgactcagttctggacaatgaaatacgggtaggattcttgtatgccacttccaggtatgatccataaaaactattcatgtaatcttccacatactctcttttttcttatctgccctcagatgtaaaggattccatggaagattatgatgccttaggcctggattggcaaactatggccccctgggccaaatcttgatgctacctatttttgtaaataaaattttattggaacacagttatacctgttcctttaagtattgtctatggctgtttttgtgctcaacaacagagataagtagttgtgacagaggcagacgcacaaagccaaagtatttactacttggccctttacagaaaagtttgctgactcctgccttaggccatggcagaaagttcatggaaagagcttgggtttctgaatgactgcatgggacacagtcacctatttcctccatggacccacattggatctttattatattaaactcccaatattttggattttaaaaaattactgcaattggcctaacatattgttaaaggatgtgttaggtattatgtttgcccgtttgatctcaatgctccaccttttttcaccctgttttatgtccagggagaatgcccacacttttgtgaatagtcacttcgttaaattcctttatttttatttttgagacaggacctcgctctgttgcccacactggagtgcagtggcgcaatcatagctcactgcagccgcaacctcctgggatcaagctatcctcccacctcagtctcttgagtagctgggactacatgggactacagttgtacaccaccactctcaactaattaaaaaactttttttttttttttttttttttgtagagaaggggcttgctatgttgccagggctagtcccaagctcctggacttcaaacagtcttccttcctttgcctgccaaagtgctgggattacaggtgtgaactaccttacctaaactcttctaaattagtctttttagtgtactatccacttcctgctgagactctgactgatttaagggataatcttgactctgctttatttatatcaaaaaatccacaaatgttactattttattattaatatgttaattgcagtatacttcacagctgatggagacatactagtagtattatgacaaatacaggtgaaacatactagatttgtctcaatctcacatttaaaataagttaatatttttaaaaagctctcaaggctggatggtacagagagaagaatatccctccagcagttggagaccccaagtcttctctttgccctgcccctgaccctgtttgtgtcttctctcttcattattgccaatgatcaggctggacctggtggtctgtcctacaaatctctctgccgccaatatttgataataattccaagaatctgctaaataatccaacatgctaaagagtcagcatagaagctcctgggtttatgcatttactgagattcttcagcaggagagtttttgctttatactcattcaaccaggtaatgctgtcaatctactattttaaaaacacaagctaatggagatagtatatttaattaacacaaactaaatttaagaagcctattttttacttttgtgaatcaagaatgttgacagtctttcctaaataaattgtcctctacagcttaaggggattatctcagtaaactagttcataaatagctgaattgccatttaagaaaaaaaagtttaactgaatcactttttggaaactggatttcttcagggctggaggaataggtcatgcactggccagagtgaacagtgaagtctccattggcctacgcgttgtttactgagctttaaaatagacaggaaactggatacacattgaacctaggagcttttccataaggcagtgacatccttttcaatccagaacaacctgtggtattgattaacttttgggatctttttcaccactactgatctgtctcatcttttattcaacagttccctgaaagaaatttagaggcaactatggaacacctgaggcaaatcatacttgtaagttctctgcaacactgttacttactcagtttacaaattcttcttagagaatatggaaactatgaagattttcagcactttctgaaactacactataaagggctctgarccagaatcagaagcccagagtcattgaatcaaaaagtagctgtgtattcttgcacaaattaccaaagtgatatgggcctcattttcctcatctgtaaaaagaggataataatatactccatagggttgttgaaaggattcaaagagatatatgcatgtaaagcatttgttacaatgcctgagacatagtgagcattattattattagagtattattacctataaagtggatcaagcccaccttcatggttctatttgcatctactcttcaatgtaagccatcttctataaaaattcccagttcgtcactgtccctttaaaatattgtgccctcaaccatgactgtattattaaattataggttatcttatttattatcttctatttgtttgtcttagcccccaattcctgagaactgcaggtattcttgtgccttaaggtttgtaactcatcccaaaagggatagtcaggtaacataaataaggtaagcaggatggatgggcactgagttctacttgagagcttatgatctgtctaaaggggcagctcattaagtccagctgaacactgccatatgggaaagcagacccagtatagccagattctagcatactgctttaaaagaagctgagaaatatgtatctttaaaaaatttaagttatgttgatgtctacatgttgaaaacaagttaacatttttttaaaaaaagaagcattgtacaggccaaataattatatcaatactttcagactagatttggctgtactatttattagctatgtgcctttgggcagttacttaacctccttggacctcagcttccacaattgcaaaatggaatattagtacctaactcacaaggctattatgggaattaaatgaggtaatacatataaacaaagcaattagaatagtacctagcacataggtaacacttggtaaatgttaatcattataataataatttaaaaagttattggtaatgaaagtttcattaacaacaacaacaataatgttattaatgccaatagcattagtatacagtctaacaaataaaatcatatgcaactgatgatattggtattagtaataaccgatatttgaatctactctttcttcctaagcttagcacaaaataaggacttttcattctctattttcttcctatctctctctctttatgactaacatctcagctcayattgatttttctcttgaattttaattttcttttttaccctcttttttattttcctattttaggcactcattatttctcacctagactctaacagcagtatcttcactggtatctcagtccaagttttggtgccctctaattatttccaattcagcaggcagagttgtgttaaaatataagtctgctcacatcttgtctttcctcagaaattttcaaatgcaccccaatacaaatataccattttcttttcaccttcattatgtctgctaggattttcatcctggatttgtctcttacttgctatgtgacctttggaaagttaccaagccttagttttctcgtatctacccactgggtagttgtgaagatgaaatgatttaattgaatatgtataaaacacttaccacagtgcctggcacataataagtacttaataaatgaaaatattatcatcactctagtctgattaatggttacattaacccctacattaatctctaagatccaggcacaaagaacatctcactttccaaatatgtcagattattccacacctccatagccatgaatgtgtatactgtgataaattaattgtaatccctagaacaatcactacaaaaaacctccctccaatccccaaacaacaaccaagacacatagctaaaaatccaaaattgaaatgagataaaatgaaaaactaggccaggcacggtggctcacgcttgtaaacccagcactttggcaggcagaggtgggtggatcatttgaggtcaggaattcaagaccagcctggccaacatggtgaaaccccgcctctactaaaaatacaaaaattagctgggcggtagtggtgcgtgcctgaaatcccagctactcgggaggctgaggcaggagaatcgcttgaacccaggaggcagaggttgcggtgagcggagatcatgccactgtactccagtctgggcgacagagtgagaccctgtctccattcccccgccaaaaataataataataataataataataataataataataataataataaacccttttgattaattccaaaaaggcaagaaaaaagaacaaaggaacaaagagaaatataaaagaaatagcaagttagtacacttaaacgataagaaccattacatttaatgtaaattgattaatcactgcaatttaaatgcagagactgtcagaatgaataaaaagcaagacccatctgacccaactacagagttataatttaagtataaagagtcacactttaaataaaaataaaatcagacataattgactttaaaacaaaatatgttgctagagaaaaatagggacattttatcatgatgaaagggtcaacccatcagaaagacataacaattacacacatatatgcatctagcaacagagcaccaagctataagaagtaaaaccctgactcaagcagcatcctcaaccctgatggcttcctgggctatccctgtgcctcctacaatgagttttgggaggtaggttaccccagaagcctgaggaagatgttggtggccctgttttgggtgtttttgcattcctgtggcttagaacagaacaaagagatgtaactctgcaacgaatgcgaggcgaatagctgtttcccttgtccagctgaaggatgccccaaaatggggcactatgctgaccaatttaaggggaaaaccagtgccgttgaacaaatatttttcctcaacacaggagagagtggtaactttactagttggagatataaggtatcagtcacactgtctggaaaaaagaaagtgagtgggtacatcaggattgctttgtatggaagtaatggaaactcaaaacaatatgagattttcaaaggatccctcaaaccagatgcaagtcacatgcatgatattgatgtggatctcaatgttggaaaaatacagaaagttaagttcctctggaacaaccatgtgataaatctattctggcccaaactgggggcttcccaaatcacagtgcaaagtggtgaagatgggactgagtatgtattttttattgcatctaagtttggttacttatatttacatattgatttacctgtctatgcattcattcatccagttacccacctacccacctactcatccattcatctacccatttatccatttctctacccatttatccatttctctatcctttttatcctctatacttttaaccacttagccacttacccattcacttattcctctacccatccacccagacatctatctcctcattcttctggccctccagccattctttgatcttctcatccatccattcatctttccagctattcatcttaactctccatccatccatctgatttactgtgaaaaaccaaacatcattttccttaggcaaaattcaacttggcaggggcaaggcaatgaatgtaggcacagattcaagaaacaggcaaatatgaatgactgttttatctcaaacaatgaggaaaacacctgggaagcacgtaggggaaatctctgagttaattccagtttacgtgcagttactaatgtaaactggtttgtttggagactattgcatgagagggatacacactgtgttggggatctggctcatagtggcaagcttttccattctgagggaatagaatcctacttggtaggcatgagagagaacataattgtttttgaaatatggaaagaaagaaggacacctcaaaagaggataattcaaaaataatggaatattagagaataaaggaaacgtaaatgtcgactctcaactgctctcattttaagatgaggaaataagatttggagagtcaaataacttgtctaaggtcacatggggaatctaaagggaaaaaatattggacttcagaatgttttcaaaacatacaccaagactttgctcccctgcttgacttaactttgctggctgtaaaagtggcaatgatcccaattactcagtgtatttttggaaggatcaaatgtcacagttagcatgccatcactttgtatgcagtagaccgccttatctgtgggggatgggtggtattttccaagaccccagttggatgcctgaaacctcagatagtaccaattcttatatatactattttttttcctagtcatatatactatatgaatgggaaatatagtatgtgtatagaatgggaaaaatgttttgtagttttccaactaagttttgcctttttgatagtacttctgtacactggtaatgaacaatttaaaaatgaaattacgaaaagtaattacatttacagtactatcaaaaagaattaaatatataggaattactttgacaaaaaaggcaaaacttagttggaaaactacaaaacatttttaaaaagatattaaagaaaatctaaataaaaaacacgactatgttcatagatcagaaggcaaaatctttaagatggcaatactccctcaaactgatttatagattcaataaaatccctattagaatcccagatggcttctttgtagaaattgatcagctgattcaaattccatggaattggttggtttccagattaaccaaatcaattttgaaaaataagaataaaactggaggattcacatttcctcctttcaaaacttacttcaaagcaacaataatcaggacagtatggtaccactgtaaggacagagatatagatcaatgaaatagaattgagacttaagacataaacccatacatcttggtcaattgattttatttttgtttctttttttaaattatactttaagttctgggatacatgtgcagaacatgcaggtttgttacataggtacacatgtgccatggtggtttgctgcacccatcaacccctcatctacattaggtatttctcctaatgctatctctcccctagacccctacccccccaaaaggccccagtgtgtgatgttcccctccctgtgtccatgtgttcttattgttcaactcccacttatgagtgagaacatgcagtgtttggttttctgtccttgtgatagtttcctcagaatgatggtttccagcttcatccatgtccctgcaaaggacatgaactcatgctttttttatggctgcatagtattccatggggtatatgtgccacattttctttatccagtctatcattgatgggcatttgggttggttccaagtctttgctattgtgaacagtgccacaataaacatacatgtgcatgtctctttatagtagaatgatttataatcctttgtgtatatacccagcaatgggattcctgggtcaaatggtatttctagttctagatccctgaggaatagccacactgtcttccacaatggttgaactaatttacactcccaccaacagtgtaaaagcattcctagttctccacatcctttccagcatttgttgtttcctgactttttaatgatcaccattctaactggcgtgagatggtacctcattgtggttttgatttgcctttctctaatgaccagtgatgatgagcaatttttccatacatttgttggctgcataaacgtcttcttttgagaagtgaatgttcatatcgttcgcccacgttttgatgggtttttttttcttgtaaaattgtttacgttctttgtagattctggatattagccctttgtcagatggatagatcacaaaaattttctcccattctgtaggttgcctggtaactgtgatgatagtttcttttgctgtgcagaagctctttagtttaattagatcccatttgtctattttggcttttgttgccattgcttttggtgttttagtcatgaagtgtttgcccatgcctatgctctgaatggtattgcttaggctttcttctagggtttttatggttttaggtcttatgcttaagtcattaatccatcttgagttaatttttgtataaggtgtaaggaagggatccagtttctgctctctgcatatggctagacagctctcccaacaccatttattaaataaggaatcctttccccattgcttgcttttgtctggtttgtcaaagatcagatgcttgtagatatgtggtgttatttctgaggcctctgttctgttccattggtctatatatattttggtaccattaccatgctgtttttgttactgtagccttgtagtatagtttgaagtcaggcagcatgaggcctccaagctttgttctttttgcttaggattttcttggctatgtggactcttttctgtttccatatgaaatttgaagtagttttttccaattccgtgaagaaagtcaatggtagcttgatggggatagcactgaatctataaattactttgggcagtatggccattttcacaatattgattcttcctatccatgaacatggaatgtttttccatttctttgtgtcctctcttatttccttgagcagtggtttgtagttctccttgaagaggtccttcatatcccttttaagttggattcctaggtattttattctgtttgtagtaattgtgaatgagagttcactcatgatttggctctctgtttgtctgttattggtgtacaggaatgcttgtgatttttgcacattgattttgtatactgagactttgctgaagttgcttatcagcttaaggggattttggtctgagattatggggttttctaaatatacaatcatgtcatctacaaacagagacaatttgacttcctcttttcctaattgaatatcttttatttctttctcttgcctgattaccctggccagaacttccaatactatgttgattagggctggtgagataggacatccttgccttgtgctggttttaaaaggcaatgcttccagtttttgcccattcagtatgatattggctatgggtttgtcataaatagctcttactattttgagatagtttccatcaatacttagttcattgagagtttttagcgtgaagggctgttgaattttgttgaaggccttttctgcatctattgagataatcatgtggtttttgtcattggttctgtttatgtgatggattacatttattgatttgtgtatgttgaaccagccttgcatccccaggatgaagccaacttgatcgtggtggataagctttttgatgtgctgctgtattcggtttgccagtatcttattgaggatttctgcatcaaagttcatcagggatattgccctaaaattttctttttttgttgtgtctccgccaggttttggtatcaggacaatgttgggctcataaaatgagttagggaggattccctctttttctattctttggaatagtttcaaaaggaatggtaccagctcctctttgtacctctggtagaattcggctgtgaatccgtctggtcctggacttttttggttggtaggctattaattactgccttaatttcagaacttgttattcgtttattcagggatttgacttcttcctggtttagtcttgggagggtgtatgtgtccaggaatttatccatttcttctagattttctagtttatttgtgtagaagtgtttatagtattctctgacggtactttgcatttctgtgggattgttggtgatatcccctttatcattttttattgcgtctatttgattcttctctcttctcttctttattagtctggctatcagtctatttattttgttgatcttttcaaaaaactggctcctggattcattgattttttgaagggtttttcgtgtctctatctccttcagttctgctctaatcttagttatttcttgtcttctgctagcttttgaatttgtttgcttttgcttctctagttcttttaattgtgatgttagtgtgtcgattttagatctttcctgctttctcttgtgggcatttagtgctatacatttccctctacacactgctttaatgtgtcccagtgattctggtatgttgtgtctttgttctcattggttccaaagaacatcttgatttctgccttcatttcgttgtttacccagtagtcattcaggagcaggttgttcagtttccaggtaattgtgtggttttgagtgggtttcttaatcctgagttctaatttgattgcattgtggtctgacagactgttttgttatgatttccgttctcttgcatttgctaaggagtgttttacttccaattatgtagtcaattttagaataagtgagatgtggtgctgagaagaacacatattctgttgatttggggtggagagttctgtagatgtctattaggtccacttgacccagagctgagttcaagtcctggatatccttgttaattttctgtcttgttgatctgtctaatattgacagtggggtgttaaagtctcccactattattgtgtgtgagtctaagtctctttgcaggtgtcaaagaacttgctttatgaatctggatgctcccgtattgggtgcatatatatttaggatagttacctcttcttttgcattgatccctttaccattatataatgaccttctttctctcttttgatctttgttggtttaaagtctgttttatcagagactaggattgcaacccctgctttttgtttttgtttttttttgctttccatttgcttggtaaatattcttccatccctttattttgagcctatgtgtgtctttgcatgtgtgatgggtctcctgaatatagcaccctgataggtcttgactctttatccaatttgtcagtctgtgtcttttaattggggcatttagctagttcacatttaaggttaatatcattatacgtgaatttgatcctgtcgttatgatgctagctggttgttttgcccattagttgatgcagtttcttcacagcgtcgatggtctttacaatttggtatgtttttccagtggctggtaccagttgttcctttccatgtttactgcttccttcaggagctcttgtaaggcaggcccggtggtgacaaaatctctcagcatttgcttgtctgtaaaggattttatttctccttcacttatgaagctta

SEQ ID NO: 97035 - DNA, 12846 bp, Homo sapiens
tatagatttcctgtgagtgcagatggctcagggtgaccggatgctgtagaccaaatcttattgtccccctcaaattcgtgtgttaaaatcaaattccctatgtgatggtctttggaggtggggccttgggaggtgattacttcatgaagcagagaccccatgaatgggattaggctcaggcctgtaatctcagcaactctgggaggctgaggcgagtggatcgcctgagatcaggagtttgagaccagcctggccacatggtgaaaccgcgtctctactaaaaatacaaaatggcaggtgcctgtaatcccagctactcaggaggctaatcacttgaacccgggaggcagatgttgcaatgagcggagatcatgccactgcactccagcctgggtatcagagtgaaactctatctcaaaaaaagaaaaaaaaaaaaatgaaagcaggaggtaaattgtatatacatgcaaacatcagtgtcatgacacctaatttatcaggatttgataaattaattaatttgactgattttgggccacagagtcattggataacttgattccacttaaaacaagggatgattggtttggtttcaacctattctgtttttctaattcgtcctttcccacactctactcagaatgaatttgacattgtaaaactggcttgtatcataatggctactatgctttaaaatagggtaggtgctttgggatcgttggagttttaatgtacaaaccattcataatttatccccaaagcagtgtggattgttttgtgaatgttctacatcccctgatctgaaaactgaccagaaaagctaccactgagataaagcagccatccgacttaggggcctccttcctcccactctccaacaagactggaaataaaggaaaatcttgagttccttcaagggaaattccaggcacccagctggccctgaaaagtaatgagcaacttgataaacaagatcataatagtagcttaaaacaatagccaaggcagttagagttgtgagatgtttggttccctatagaaactaatagtaacattttaacacaagtccctgagttgtttttcagaaacccgaagccccaccaaatggataccctggcatgcagacctcagataagggggaaacagaactgaattttgaatctctgttctttcttctttttttctttttcttttctttttttttttttttgacagagttttgctctgtggcccaggttggagtgcagtggtgtgatcacagctcactgcagccttgacctcctgggctgtggcaatcgtgccatctcagcctcccaagtagctgggactataggcatgtgccaccaagcctggctaatttgtttttttttttttttttttttggtcggagttttgctcttgtcgcccaggctggagtgcaatggcgcaatcttggctcatgtcaacctctgccttccgggttcaagcaattctcctgcctcagcctcccaagtagctaggattacaggcgtgtgccaccacgcccggctaattttgtatttttagtagagggcgggtttctccatgttggtcaggctggtctcaaactcccaacgtcaggtgatccgcccgcctcggccttccaaaatgctgggattacaggcgtgagccactgcgccctgcattgtctttttttgttgttgtttttgtagagatggcgggggggggtctcactttgttgcccaagctggtcttgaactcctggcctcaagtgattttctccatctttgtctatcaccattgcatcaatgtttgtgttatcctataaaatttagaaggcctagaaggatgtttttgctttttgcaatataaaaatggcctaacacagacatagatgatatagatatggataggtagggggtgtattttgaaatttgtttctctaagggacttatttcacttcaaatttgaaattattctggttttaaatgtaacaaatgataaaccttatagaatgacaacacaattgtatatgttataaaggcacagggtatatcaaatgatgaaccaatcatttcgtgttgaggttagtaattttttttttttcctgagacctcaattctcggtaaatgaggacagcttttacacagaggggccttaacaccaccacacactggacttgttctcgggctgtgaggttctgcccacaccaagccaggatgagaattttattcttcacactgttctcagtacttgtttatatccccccaaaagttcattttttatgctgtttgttctctcacatttaatacatgtaaaaaaagttatcatggtttttaaaataaaaaagtatgttatcttttaatctatgtccctatagaattatcttgatccatgtacttttgttgttacaggcagatcaggctaaacttcctctctctggaataaatgccatgaccactgctctttgagcattatttttcttaaattattttttaaacaaaaattaatctaacttacattaaccaaatttcttttcaaagtaatcacatttcttttaagtgaaaaatgtttaccttctgttataaagaattctctgaatacaaaatatttattttttttaaactttagaagaaattgaaaatatctacatattactaatctaaaaatacaggctctgggtttatatggtgttaacatgtcttccaaattttaaggaataagtatttaaatgccatgcgctttgttttccaatttagaaaatgttccaaccttttggctgggcatggtggctcatgcctataatcccagcactttgggaggccgaggtgggaggatcacttaagtccaggcattcgagaccagcctgggcaacatggtgaaccccatctctccaaaaaattacaaaaattggccaggcatggtggcactacctgtagtcccagttacttaagaggctgagatgggaggattgctggagacagaaaaattgaggctgcagaaggtaaagtgttgaggctaacagatggtaaagatttaatttttcacttaaaagaaatattggttacactgaaatttggttgatgtaagatagataaatttctgttaaaaaaaatttaagtgagtcttgttaacaccactgcactccagcctgggcaacagagcaaaacctgaagaaagaaagaaagagagagagagaaagaaagagagaaagagagagagagaaataaagaaaaaggaaggaaggaatgagggaaggaaggaagaaagggagggagggagtgggggagggagagacagagagagagagaaagaaggaagaaaaaaggaaggaaataaaacaaaaaaaaaatgtttcaagctttacagtagcaaagccactctgtaatgaacaaacaacagaaccaaaacaaaaaaggattctaccgaccaatctaaccaacaatacaattatgaagttgattcaaatatcaaaaatcaattttaataataactatatggtatgaaaaccccacaaagatcaagtaggatgtattatacttgaatgaatttatgagttgagagtaggaaatctataaatttaatcaaaccagtctaagaatcatgaggaaattgtactgctaatgtattatttgacaagccattcagtggaacaaagatattcttaatgaagttgcatatatattttaaaatgttatcgaggtagatttttaaaaatgagatgaataacttgaaaaagtattcagggataaagagaaaaataaatttagatagtttacatatataaaatatattttaaaagctaggcttgtctttttttattccttaaataaaaggaatggatatttaaatcccatgcctttcattttaaaatttaggaaatgcttacagcttcccacactgaaatctatactaacacagctaatctaatcaatggataacaaaatcaaaacaaatggaaatctcttgaccaatctattttcttgatttttgaaagtctaaatgtatactcaaagaaagaaaactattaataattgattctgttatttgaaaacatttattgatcatttaccttacactaagtgatctccagctcatggagacagatcagtggaaaagtatgtaaagttacccaggtttgttaagcttaaattctaatgagggagaaaagaagtaatagcgcaggtactttaaaacaggagcgttggccgggcatggtggctcacgcctgtaatcccagcacttttgggaggctgaagcaggtggatcacctgaagttgggagttcgagaccagtctggccaacatggagaaaccccgtctctactaaaaatacaaaaaattagccgggtgtggtggcgcacgcctataatccagccactcgggaggctgaggcaggagaattgcttgaacctgggatgtggaggttgcggtgatcccagattgcgccactacactccagcctgggtaacaagaaccaaactccgtctcaaaaaaaaaaaaagtgtgttatgatacggcttggaattctaaaaaattgcatactgtggttgctgtgtagagactggaatgaaaaaaagggcaatgataaaagcttaaattcatatagaatatggctagcctataattttgagggtgcctgaaataagaatttataatagttctcattatttcccccaagaaatgtctgcagtagagccctgaccgtgtgagggaagtagtgtagttaccaagtggtgagggtgggaaggtgaatttgaaaacaccatttggaattactgcactttaaaggcaaagctggcaggttttccatacacgacagatctgaaaatggggtgtgtgtgtgtgtgtgtgtgtgtgtgtgtgtgagatggagagacagagagagagagaatgagaaccagacagatacagagagaactaaaaggggatatcaagaatattgagctgagaaactataaaatgggagttgccattaaacagataggggaagagcaagtctggggagtattggaggctccatgtggaccttcattttgagattcctgactgacacccaagtgaagaagtcagacggtgctgggtgtagtctagtgttgaggtataatatgaaatatcaggaaattaatgacacaaaaattagtaagaaagtaaataaaagaaagataagtccaggtcctgagcctagtgcttctctaacatttaaaaaatagtaaaggtgagaaaaaaacagcaaaaaaggactaggggtaattataaaaaatgtcaggggaaagtgggttaagtgttctggaattctatcaaagaaagttttgcaaaaaggacagatcacctgtgtcaaatgctgctgatacataaattaagacaaaggctgaggaattatgctttaattcataatttaacaatatgactatcgtttgtgctttgagaagagcaattttgttgtagtgagtaggtgagaaaccatattggagtccttactaaaaggaatgtctgatctctggattctctgttttttttttttttttttttttttttttttttttttgagacagagtcttgctctgtaacgcaggctggagtgcagcggctcgatctcagctcactgcaacctctgcctcctgagttcaagcaattctccagcctcctgcttctactcacagaagcagagagtagaatggaggttaccaggggtggaaggcaggggtttggggagacggtgaaatcattcaaaagtgtagttagacaggaggaataagtttaagagatacattgcacaacatggtgactgcagttaatgtattgtattcttgaaaatcaagaagggttctcaccacaaaaagtaagtatgcatatgttcctgagcgcaatgtaatcattccaccatctacctatttctaaacaggttttacacaacatatatacaattttatttgtcatttaaaaaacgaatgaattgtaaaaagaattaagtactggaaaacttgtcacagtttaggacaactctctttgtaaaattagtggttcttgggagtcaaaatgcttcctggtgccgggagtgagcgatgagccggcttctgtccctggcggcagagtcgccttggccgccttgccctgccgccgctctcgcgggttcgggatgttctatgccgtgaggaggggcggcaagtccgcggtctttctgaccgggaatgagtgcaaagcacaggtggaccggtttcctgctgccagatttaagaagtttgccacagaggatgaggcctgggactttgtcaggaaatctgcaagcccggaagtttcagaagggcaggaaaatcaacatggacaagaatcggagacgaaagccagcaagcgactccgtgagccactggatggagatggagatgaaagcgcagagccatatgcaagcacatgaagccgagcgtgaagccgagcgtgaagccgagcgtgaagccggcgcctccagttagcagagacacgttttcctacatgggagacttcgtcgtcgtctacgctgatggctgctgctccagtaatgggcgtagaaagccacgagcaggaatccgcgtttactgggggccgggctatcctttaactgtaggcattagacttcctgggtggcagacaaaccaaagagcggaaattcatgcagcctgcaaggccattgaacaagcacagactcagaaaatcaataaactggttctgtatacagacagtatgtttacgataaatggtataactaactgggttcaaggttggaagaaaaatgggtggaagacaagtgcagggaaagaggtgatcaacaaagaggacttcgtggcactggagaggctgacccaggggatggacattcagtgggcgagtatcttaaatgttcatgtcccatggctattgtgaccaaataagctaagtttactagagattaatggtttatgtaagtggtttaatgacataacaatttccatgaagttaatatcataatatatattaaaacatatttgaggctgggcgcggtggctcacgcctgtagtcccagcactttgggaggctgaggtggatggatcacggggtcaggagttcaagaccagcctggccagtatggtgaagccccatctctattaaagagtacaaaaattagccaggcgtggtggtgtgcgcctgtggtcccagctactcgggagcctgaggcaggagaatcacttgacctgggaggctgaagttgcagtgagctgagatcacgccagtgcactccagcctgagcaacgatatgagactctaagactccatctaaaaaaaaaaaaaaaaatttgagactgggctcagtggtccacatctgtaacccagcaatttaggaggcccaaatgagctgactacttcagccgagaagtttgagaccagcctggttaacatggtgagactctgtttctagaaaaaataaaaaattagccaggtgtagtggtgcatgcctgtagtctagttactcaggacgctgaggtgggaggatgacttgagctggggaggtcgaggttgcagtgagccaagattgtaccactgcactctagcctgggcgacagagcgagaccctgtcacaaaaaaacaaaacaaacccacccatgtacatgcatttgattcttttccttatcatacaagtaatacatttttttggtttggtttggtttggtttttgagacaggtcttactctgtcaccccaggctatggcgtgatctcattgcaacctctgccttctgggttcaagtgattctcatgcctcagcctcccaagtatctgggattgcgggcatatgccaccacacctggctggtttttgtgtttttggtagcgatggggttttgtcatgttacccaggctggtcttgaactcttgacctcaaacaatccacctgccttggcctctcaaagtgctgggattacatttgttttatgtcatttatttcttttccatgcctttttgcactagctagaacttccaacgccgttttttgttgttgttgtttttggttttgtttttgagatagtcttgctctgtcacccagactggagtgcaaatggcgtggtctcggctcactgcaaactccgcctcctgggttcaagtgattctcctgcctcagcctcctgagtaactgggattacaggtacctgctaccacgcctggctaatttttttgtatttttagtagagacggagtttcaacatgtttgccaggccggtcttgaactcctgacctcaggtgatccacctgcctcggcctcccaaagtgctgggattacagtccagtacagttttaaataggacaaatgaaaaagggaatccttgccttgttcctgattttacggggggagtgggagtgttttctgtgattggttctgttttttatttttatttttacttatttattttgagacggagtttcattcttattgcccaggcgggagtggaatggtgccgtctcagctcactgcaacctccgcctcctttgtttaagtgattctgctgcctcagcctcccaagtagctggaattacaggcgcccaccaccacatctggctattttttttttttttttgtatttttagtagagagagggtttcatcatgttgctcctgctggtctcgaactcctgacctcagataatccacctgcctcagcctcccaaagtgctgggattatgggcatgagccaccgagcccggctgttttttttgtttttttttttttttttttttgagacagagttttgctctgttgctcaggctggagtgccagtggcgcgatttcagctcactcaggggtgagccaccacacctggcctgtgattggctctgtttttagtaattatgtgcaaaccatctagaaccagctctgggcaatggtgttgcaatttccctccctccatgctggcaccataccagcccctctccaatgggagcccaagttgccagtgactgtggccaaactctccatttttgtctgtatcctgctctctttaggttaaaaagaaggaaagaaacatgaaaggccatgtgcaatttatttttataactcaaggagtttccccgactaccattttttttgttgccagtgggtgtgcatatagaagaggaatgctatatcctgtccctagaagtacacatggtggtcaggtatggtggcttatgcctgtaatcccagcactttgggaggctgagatgggaggattgcttgagcccaggagttcgggaccagcctgggcaacatggcaagacctctgactccacaaaaaaaaattgttttttttttgagagagcatctcactccgtcgcccaggctggagtggtataatcttggctcactgcaacctctgcctctgtcacacacacaaacacacacacacacacacacacacacacacacacacacaaagaaaagaaatacaggcggtgtttcagggaagggaaggttctgctggggtcctggaactgtgactgatggcctcagggatgcaggaataggccttctagcacagcagctagtagsctcccccargccatccgctggcgtgtggaggtgcaggacctgggggaggcagtcctcaccccagctaggccaaggggtagggtttttaggtctgtttttaacagaactcagagcaccaggtgaaggtggaaagttggtaaactgggaaaacaaggtcagcatcttacattttctatactcagcagagtgtgccattcccggtttctgtcctgaggctttcagaggccacaacagccaggtttctttccatcttccctcagtcagtatgtagtcatttaaaattctttggttgttctgaagatcctttttttatgtataatttttacatgaaagacagctgcaaaatgcaagcctcagtagagtgggggagtttttcaaggtgagaagtcgctgttctctgcactgaacagggattgaattttccttgtctgatggtagcccatccccctcccccgccgccccccgcagggataacattctcaggaatttctcttgtcctagcccctttcayttcaaaaacaatattagtcttttgttttcctttttcattcatttgtttttttacagcttttgtagagaccaacccaagtagatgccagtgggtattaaacaaaaacacacatacccaggggacaagccctccagcggtgaggaatctctgccatgttctcttccctgctgcccacgaacattacggagactcccttagtctccccctcctcttccccactgaggggcggcttgtggagatggaggactcgggcccatagatgcagacccactgtcaaatccagcaatagttctcattcttccaaagctcgagtgccattttgagatgccctaccaatgacatgcagtaaaggacataacctcacagcctttttagaagcattttgaatatctacagttgcctcaattcacggggcatttcattcctctgatccaggttagagttttgctaaatctgtagcatcctgagtagcacactaattttttttttagcacactaactttaactacattagttgagtgtagttgatacatctgtggccttgtgtctataaagagcacactagattgtacccagcacttttggatatgacatgctaattagatgtatttaactattcataggaaagtgtatgataaatgactgtaatatttctaataaatatattttgtttctaattatttttttctcactgacatgtatcaatattttttcaaagtgccacccttaaactgagtctgttttcagaccagcatcttcatgcatatatccttgtcaggtcacagtctccactgcagctgctcttgcgggtggtgctggaattttccacagaggactgggctcctgctggttcctccgctgcccgtgtgcagctttcttgctcaggccacaggcttacgtgaagatcacccttcaaggcctacccaggacactgctgagctgtgcagatgtgcacacgatatgtgcaatgtcatacgtgtgactaaatgccaactgagaccccagaaaccactcatagggggaattatgccaagattgaggaggcagggtgatactttttttctttttctgtttttttttttttttttttttttgagatggagtctagccctgtcgccaggctggagtacagtggcatgatcttgactcactgcaacctccacctcctgggttcaagcgattcttttgtctcagcctcccgagtagctgggactacaggcacgtgccagcacgcccaactaatttttgtatttttagtagagaacaaggggtcaccatgttagccaggatggtcttgatctcttgacctcatgatctacctgcctctgcctcccaaagtgttgggattacaggtgggagccactgcgcccggccacagatattttgtaaatgattgcttccttacgcctttctagttcatgttttcttatacatagttacatttcttctttgctatactaaaaatccctaattttagttggtcagagagagggatttgagactgagctcccatctcctcggctgcagcatctgattaaagccttcttcctttgcaatactcatctcagtgattggctttctgtgggtgagcagcgcaggatctaggctgaagccctgaggcttcagtgacaaaatctgtttttcataatgctatctgtcttaattgtcctcaagaattagtatttgagtgctctctagattctcctttgtcacccttccttcctttctttcttcctttcttccttccttctttccttctctttgcttcgttctctccttccttcttttctttctttttttgagacggagtcttgctctgtcgcccaggctggagtttggtggcacgatatcagctcactgcaacgttcacctcccgggttcaagagattctcctgtctcagcctctggagtagctgggactacaggcacgcgccaccacgcccaactaatttttgtatttttagtagagagggtttcaccatgttggccaggctggcctcaaactcctgacctcaagtgatctgcccgcctcaacctcccaaagtgctgggattacaggtgtgagccaccgcgcctggccgtcacttttcttcaatctcactggtgctcgcgggctgaagggtcaggacggactagaggcgagcaatcctggtggcaccaggcgttccccgacccgcccgggtcgccagctgcacggaccctgggcagatgcgcgcagcggctgcggcacacggcggggagcggctgcttggccccatcctaaggcagcagaatgcccagagctggtccctggctccaggcgcaggccgagtaggagctgggcgggcagcggcgtcgggcaggcccttccagccgggctgacaggccgctctgacccagccatctgactccgcttgcgtcctggcagcgcggaccctagggcaactttgctgcagtggccaagccgggggcggaactgacccgtacccctgaaccgagcaagcctaggagcaggtgcgccggcggcgctgtgaagcggcactcatgacaggcaggctgggcaccgccaccccgaaacctccgagggaggaccagccagcccaggttggcgctggagctgcagcgccacctgcaggccaaggagtctttttctgggaggctggagctgcagcgccacctgcaggccaaggagtctttttctgggaggctggagctgcagcgccacctgcaggccaaggagtctttttctgggaggctggagctgcagatgcagtgaagtcacaggttccgtgatgtcacaggtgggcaggcgcactggtctgtaacggattggcttggccttacccy

SEQ ID NO: 97036 - DNA, 20915 bp, Homo sapiens
gaagctgtagggtgcagtttttccattggcattcgacttaagtagagtgggtgttgccaaaacaattttcctgttgttgggtcactgtgaagttaaggaatggttcccaagacccctcttacttatgacaccaatagcaaatgcaggcgtccctgagaccactgtggggtttgatgatttgctagaaagattacagagctcactgatcacagttattcttgtggctatggtttattataggaaaaggatatagattcgaagattaaaatcagccttggcaggagaatggcgtgaacctgggaggtgcagcttgcagtgagccaagatcgggccactgcactccagcctgggcgacagagcgagactccatatcaaaaaaaaaaaaaaaaaaaaaaaaaaaaaaaaaaaatcagccttgggaagagttgcagagggcagagtccaggagggctcacacctggagctggtctccactccctgggaggcgtcctcttcttgggagttgtgggcaatattactttcccgccagtggcgagtgtcagcacatgtggagtactgccagccagggaagcacgcgagccttggcgtccagggtcattactggtgctcgggcacatggatgtgtagactccctgcactgctgacctcagcctccagcccctctggagggcgagctgatatcacgtggcccagcgctcctgctcctccggaccccagtcccccactgatcagaaggcaggagtcagagccccagtgcacctcagtcattaactagtgtgtcattgcatctgcaggttcccagcaggatgccccggctctgcaggaagctgaagtgagaggcccggagagggcccagcccgcccggggcaggatgaccaaggcccggctgttccggctgtggctggtgctggggtcggtgttcatgatcctgctgatcatcgtgtactgggacagcgcaggcgccgcgcacttctacttgcacacgtccttctctaggccgcacacggggccgccgctgcccacgcccgggccggacagggacagggagctcacggccgactccgatgtcgacgagtttctggacaagtttctcagtgctggcgtgaagcagagcgaccttcccagaaaggagacggagcagccgcctgcgccggggagcatggaggagagcgtgagaggctacgactggtccccgcgcgacgcccggcgcagcccagaccagggccggcagcaggcggagcggaggagcgtgctgcggggcttctgcgccaactccagcctggccttccccaccaaggagcgcgcattcgacgacatccccaactcggagctgagccacctgatcgtggacgaccggcacggggccatctactgctacgtgcccaaggtggcctgcaccaactggaagcgcgtgatgatcgtgctgagcggaagcctgctgcaccgcggtgcgccctaccgcgacccgctgcgcatcccgcgcgagcacgtgcacaacgccagcgcgcacctgaccttcaacaagttctggcgccgctacgggaagctctcccgccacctcatgaaggtcaagctcaagaagtacaccaagttcctcttcgtgcgcgaccccttcgtgcgcctgatctccgccttccgcagcaagttcgagctggagaacgaggagttctaccgcaagttcgccgtgcccatgctgcggctgtacgccaaccacaccagcctgcccgcctcggcgcgcgaggccttccgcgctggcctcaaggtgtccttcgccaacttcatccagtacctgctggacccgcacacggagaagctggcgcccttcaacgagcactggcggcaggtgtaccgcctctgccacccgtgccagatcgactacgacttcgtggggaagctggagactctggacgaggacgccgcgcagctgctgcagctactccaggtggaccggcagctccgcttccccccgagctaccggaacaggaccgccagcagctgggaggaggactggttcgccaagatccccctggcctggaggcagcagctgtataaactctacgaggccgactttgttctcttcggctaccccaagcccgaaaacctcctccgagactgaaagctttcgcgttgctttttctcgcgtgcctggaacctgacgcacgcgcactccagtttttttatgacctacgattttgcaatctgggcttcttgttcactccactgcctctatccattgagtactgtatcgatattgttttttaagattaatatatttcaggtatttaatacgaaatgtggaagggaatgctggagtaaaatatcccctctcccctccgcccgcccgcccgcccgcccgctcgcccgcccgcccgctcgcccgctcctgtggtttttctgagcgtgcgggctccgggaggggatgctgaggctgatggagctgcctccagggctagggccactcaccggaggagggcggggcctgcacttgaagtcaggccgcacctgtctgtttttggaagggtagccgacaaatccttccagagggaaagttctttgtttaagtgttgtacttgaaaaggtcaatcttcagggcttcctgtttgaagtcaagtcagaggtaaaccggtcagttacagaagcaggatttctaggatttctaactccagctgttcccatactgtctagtttaaattatggctgttaaggccgggcgggtgactcaggcaggtaatcccagaactttgggaggcccagacagaaggatcgcttgaggtcaggaatttgagacctggccaacatggtgaaaccctgtctctactaaaaaaaaaaaaaaaaaaaaaaaaaaaaaaaaaatgagtcgggtgtggtggtgtgcacctgtagtcccagctactcaggagttctgagatggaaagattgcttgaacccaggaggcagaggctgcagtgagctgagatcgcgacattgcactctagcctgggtgacagagtgagattccatctcaaaataaataaataaatattaatacattatggctattaaggctgggcacggtggctcatgcctgcaatcctggcactttgggaggctgaggggggaagatcacttgagcccaggagttcaagaccagcttgggcaacatagcaaggacctcatctctacaaaaaataaaaaggacgtggtggtgcacatctgtaaacccagctactcaggaggctgaggagggaggatcacttgagcccaggagttcaagatcagtttggaccacatagcgagaccctgtgtctacaaaaaataagaaaatcagccggacatgatggtgcacacctgtaatcccagctactcgggaggctgaggcaggaggatcgctggagcccaggagttcaaggctgcagtgacctatgatcgtgccactgcactccagcctgggcagcaaagtgagactctgtttctaaatagacagatagaagataggtagatagatagattaaatagaaagtaaactatggctgttgaggtttacagttggcaggagtggagtggtttggcgtttatctctagaccgtgctggatgacagtacccagtgtcaccaagaagaggctccgtgtgactgtctctgtggctttctggttggtttagctccagtgccttcaccctcaaggacacgactgaccttgaaccctcaggtttgatgggccctgtcttgataaaagtgtcagaggaggctctggaaacatctggctgaaactcctttgctatttctgcttctaagctgtagttggagagatggttgcaatcatttcgtggtgtcgggcaccctgcttgacctgtcttcctcgtgtgtggtatttgtcaccactgcccagtccctggttgctggccacgctcagttgggacataccctggtgtcctctgtgtgtggtgtccctgtgtttcccaggctcaggtgggcttgtgtgggtcttggcccccagtgcctgctagcctcaggtgtcccctgtgttagacacctcctgccttcctttctgaagcttcgctttcttttatttttgttttgttttgtttttggagacagggtctcgctctgtcatccgggctggaatacactggtgcaatcacagctcactgcagcttcaacctcctgggctcaagtgatcttcccatctcagactcccaagtagctggggttacaggtgagcgccagcctgcccagctagttttttattttcagcagagatgaggtctcactgtgttgcccaggctgctctcaaactcctgggctcaagtgaccctcctgcatcaccctcccaaagtgctgggattacaggcatgagccatcacacctggcccctccaagttttttattatgataaaaatgtttaattttaaacgtaccatcttaaccattgttaagtgcactgttgtgtggcattaagcacattcgtattgtcgtgccaccaccaccatcatctccagagctttctcatcttcccaaactgaaactctgtccccattcagcactcgctccccattggtagaaggcagcagcttccactctctgatttctactacccgagctccctcagaaatggagtcacacagtattggtccttttgggactgaagtacttcacctcatgcaatgtcctctaggttcatcggtgtcgtggcaggtgtcagaactaacttcctttctgaggcggaataatgtcccattgtgtggaagaggcatggtttgtttatctgttcatcagttggtggacactgagttgcttctgccttcctgcgaatgtgaattgaatgctgctgtgaacagggtgtcagtgaatctgctgagggcttgttttccgtattctgggcatggccctttgtgtctgcctttgctggagcacctccccgggatgcgtttgtttataggatgttcagacgaatgtcagaacccactgggcggttcactcactgaggggggcccgcgtcccctccatttctgcattcccagttcttggtatggttcctctgaggttcggttttcctgagcacctggggtgtttgcagggatgtggaggggttcctgcagaagacaccacccacatccacgcacctgctcagattcccgggccatggtcggggccaccgcccgtggggatgactccggatgggagtggcagaaaagggcctgctgggccgaggggaggcgtctccgggaagagagggaggtgtgagcggggagaacccactttgattcttcgctgtttgcctgatgcgcagcaccacactgcgtagagacctttggctctggttttttctttttccactgaaacacagcaaattatacattttatgaaaattggcatcgtacaactggaaaatttaaccataaacttaaaactcttttaccctgttggcccccatcctccagctgtgtccacactttgagcacagtcatgagaatgacttggttgggtgcggggtggtgtcacaaagccctgtctcttgtgtgatggctgcgcctcgaatcagtgggagggcacctcgcccgtttacagttgggcaatgcttgggctgggcggcctggctgctcctggactcgcctcccagcgtctgatgctgtgtattttccatctgccccaggaatttgacacaggtgtgacttgcaggttgtgtgggtgatgcctccctccctctttcctcttaaagcatctcatgcttcttcattcgctgatacttacaacccccagtggatatttagtggagtttgctgtagtgcttttgccatttatttggactattggaaaaatttcaggtttggttttggccctatgtcttgatggagggcaagggttaggatttcagtttatcttcccggtgaggtctgagcacgtctgtgccctgaggtgggtggtttggtgaaggtggggctttaacctagctctgccacttaggaatcagaacacacacacacacgcgcgcacacacacacacacacacacactctctctcacacacacatcgggatatttttcttgtttccttcttccagagggtgtaggagttgtgttccaagtttgttcctgcaaaccctccgatgaggccagctgcattcatcggggcctggatggccgcacctctctctccccgccctgtctcctgcactcaggtgagaggctggcagggctgccgtaggggtggagagtgaacgcagggtggctaagccctcgtccctgtgagggacagtgacacggatgggagcagccatctgagctggaagctgtggacatggtccttgtgtgggtccaagcaaagtgggtggcgtgtgcattttgtgaacacgtggtctgcttcctggtgcagaccaggtctccccagagggaccctcctgagctgagctgcccggggcacctgtccctggatgtgaactgccttggttgtaccttggtggggggacctttcctgaatgtgttggttcggcatggtgacaggtgtttccctgcggcagaatgttggggccacaccaacgtccccagagtcttctccctagagtctytgaaaggaagcctgggttcctggtggtgctcccctccatgtgtgctcacccgcctgkatggaggcagcccaggggagyggctgagactcttggcagagagctggggacgctctgttctcattggcagccccaccctgaagaataacagactcccaaatatcacacaggctgcagataccacccagcccccaaggatgccatcaccaggctggggcgctcccatgcccattatccaggggtaatttttgctcacttatttataagccacacatcctcttctatcctaccaaacctaagaatatcaaaagggaaagcttggcttgcatggacgtaattaacctaaaagtctttaaacgtttctcccgagtgttggagtgactgtttgcacacatctgttgtgttttgcctgtgtgcattyctcctcctggtcagagagcccgtctcttccgccctctcccttaccctaggagggctgagtcaggcctccctacccaggcccaagggcagatgcacctgagccattgtgtcccatsswtkatacgggacggggctgatttcctgacctggacccctgagacccagtgctcttagctgtgagcctctgggaagaggttctggcaggtggaggggatggacgttacagtgctgtggccacctagaaaagccgtcccggaactgagaccaactgctgagggaggaagggccaccagatcgggggccgggccggggtgagcacctgaagccggctccacctgctcttctcagctgtgcgcctccaggaatttgcactcgcttcagctgatttgggttggatttctagcgtttcacatacaggatctagactcgcacacaactgcattaatatgttggtgtttgataaactagggttgaaggagttccatcagtgaagagagaagccacgtgacctgaggatgcagggcactgttcacgtggacatgagccgtttcttagcatcatgagattttagaaacatgttcttactctgccaggacccagggataggtgaggctctcctattgggataccatttcaccagcagagagattaattggagaatgtgtaattytttcccctttggaaataatttgttcttttttttttttgacagagtttctttctgtcatccaggctggagtgcagtggtgtgatcatagctcactgcagcctcgacctcctgggctcaagtggtcctcccacctcagcctcccaagtagctgggactacaggcatgcaccaccatgccyggctaatttttacatttttggtagaggccgggtacggtggctcatgcctgtaatcccggcactttgggaggccgaggtgggtggatcacgaggtcaggagatcaagaccatcctggataacatggtgaaaccccgtctctactaaaatacaaaaaaattagccgggcgtggtggtgggcgcctgtagtcccagctactcgggaggctgaggcaggagaatggcgtgaacccgggaggcggagcttgcagtgagcggagattggcgccactacactccagcctgggcgacagagcgagactccgtctcaaaaaaaaatttttttttttggtagatacggggtcttgctttgtcacccaggctggtctcaaactcctgagctcgagtgctccttctgcctcagcctcccaaagtgctgggattacaggcgtgggctgctgtgcccagcaggaataatttctcagtgcatctctgatggggaggctaatgaagaaaggacacctggtttgaaggcttctctgtgtctgtccgtgggcgctactgatctgagccaagcaccattccgcaggcatgcctgaaatgactcccatggctgtcatggtgccatctggagagcatttgctcactgtaatggtcccgtcacacttgtctgatgaggatctgttggttgactttgacagtgataaacgaacacagcctatctgggtgttttttgcacttatagtttgggggtttgaagtactggctagaagctggcggggtgtgtgtgtgcaggtgtgcgagtgcatgtgcaagtgtgcgtgcaagtgtgagtctgcacttgtgtgcaagagaatgtgtgtgtgtgtgtgtttggagatttggacttgaaaattctagctcaggtctttggggtagtgtttgacctgaactctgaaaggcagagggtcccagactttcctgggatgatgggaactgggcaccccagatgaggctcggttgtgagtaggagcggggtgggccaccgaagagaagacagagtgggcctgtagggccagcccgaggtacccacagtggagggtctacaggctgatttgggaggtggtggtttatacctgtagtcaccttctatcttagttaggaattcaccttcacacttccagaaactgccaagaagaatgccgccgctcaggtttatctggtagaataagctgtttgaacaaagatctggaggttgcacaatcctgtgtcattctggatttatcttggggtcgggagtcaacgatacttcttgtgctgtcgtttctccggccgtgtgaagttaccacctcgtgagtggtcataagttagcgtgtctaaatgcactttgaaatcctaggatgaaaaagccaggccctgtcttttttccttgtctaagcaccatccttgcttaggagagacacggctgtggctctcaggctgtggggcaatgttctgcttataatgtttcaagaggttcaaagcgtgcaggccccatgctccgtgagagccttgacctgggtcagcaggggcggctgggcttgactcgagaattcccacagggcccgagggaagagcagagcaagagggaggagcgcgtggagccctatgtggcctgcgatattggggtggcgtccaggcccgcctagatgggggagggagacaacagagctgccacctgctcaccgcagacccaggggcccaggaggagcggactaggaccggcagtgccttccagcctaggtctcctgcccctgggctggagttcatcttttaggcaaatttggaataggaaccttaaaaatgctttcttcactcgtttaaatagtaatgataagaatatggctgcagggggcagcttatgcctgtaatcccaccattttgggagctcaaggcaggagtattgcttgagcccagaagtttgagaccagtctgggcaacatagtggaaacttgtctctccaaaagctaaaagaaaaagccgtgcatggtggtatgcacctgtagtcccagctacttgggaggctgaggtgggaggatcgcttgagtctgggaggtcgaggctgctgtgagccatgattgcaccactgcattccagcctgggtgacagagcaagatcttgtcttaaaaaaaaaaaaaaaaaaaaaggtgttgtattttatcattagaaggccatcctgtttagaagagtgggtttctcataagaaaaaaaagaaaaaggttgaccttgtaagtatattttcttgggtgaattgtggtggtggtaatggttttaactggtgttaatttcagttcttttaaaagttgtggtaagatacatgcaacataaaatgtgccctcttccccatttttaagtgaacagttcagtggcattaagcacattcagtttgcctgccaccgttaccaccatccatctccaaaattctctccatttacaaaactgaaactctgtccctattaaacactagctccccattccccactgtgccgcccccccaaagcccctggcaccaaccattctacttcctgtctctgagtttgactagggacctcctgtaagtggatttgtacaatatttgtccttttgtgtctggcttcttcatgtagtataatgtcttcaaggttcattcatgttgtagtcaggatcaccttccttttaaaggttgaacgatatcccgttgtatggacagaccacattttatccattcacccagggatggacacctgggttgcttccatctctcggctcttgtgaataatgctgctgtgaacacgggtgtgcagatacctgttcaagtccctgctgttttcttttgagacggagtctcgctctgtctcccaggctggagtgcggtggcaccatctcagctcactgcaagctccgcctcccaggttcaggccattctcctgcctcagcctcccgagtagctgggactacaggtgcccaccaccacgcctggctaattttttgtatttttagtagagacggagtttcaccatgttagccaggatgctctggatctcctgacctcgtgatccacccacctcggcctcccaaactgctgggattacaggcatgagacaccacgccccgccgagtccctgcttttaattctttggggcagggatccccaaccccctggtgatggaccaatactggcctgcggccccttaggaactggactgcacagcaggaggtgagcggcaggtgagcgtgcattcccgcsggagccccgcctcccgtcagatcagcggcggcattagattctcataggagcgggaaccctcctgtgaaccctgcataccagggttctccatgcaacaatctaatgcctgatgatctgaagtggaacaggtttttgttttttttttccagacagagtcttgctctttcgcctaggctggagtgcagtggcatgatctcggctcactgcaacccctgcttcctgggttcaagtggttctcctgcctcagcctcccaagtagctgggattacaggtgcccgccaccatggccagctaatttttttgtttatttgtttatttattattttttgaggtggagtcttgctgtcacccaggctggagtgcagtggtgcaatctcagctcactgcaacctctgccttctgggttcaagccattcttgtgcctcagcttcccgagtaggtggaattataggcgtgtgccaccatgcccagctaatttttgtatttttagtagaggcgggatttcaccatgttggccaggctggtctcactcttgacctcaagtgatctgcccgcctcggcctcccaaagtgttgggattacaggtgtgagccaccgtgctcagcctgaagtgaaacagtttcatcccaaaagcatatacctctgccccatccatggaaaaattgcctctcatgaaaccagtccctggtgccaaaaaggttggggaccgcggctctggagtatatgcctaggagtaggagtgtggggtcatatggtaatttatctttaatttttggaggaattgaatttcaattcttattattaccaaaaatacttaaaattcttacagatggcatgggaaagtagcacacagtcgggactctgcagccgagtttgcctccttgaatgcacacataacacaggaacaaagacagagctgcttccctcctgttgggtctctggcggacagtcaggtatgctgagggagacactgttctcaaactccaggccagggtggtttccggagggtccaccggtggtctcatctcttctctctcaaaccatggatggtgccttttaaagaaaatgacaccggccaggtgcggtggctcatggctgtaatcccagcactttgggaggccgaggcgggtggatcacctgaggtcggaagttcaacaccagcctggccaacatggtgaaaccccgtctctattaaaaatacaaaaattaggccgggcgcggtggctcacgcctgtaatcccagcactttgggaggccgaggcgggcggatcacgaggtcaggagatcgagaccatcccggctaaaacggtgaaaccccgtctctactaaaaatacaaaaaattagccgggcgtagtggcgggcgcctgtmgtcccagctacttgggaggctgaggcaggagaatggcgtgaacccgggaggcggagcttgcagtgagccgagatcccgccactgcactccagcctgggcgacagagcgagactccgtctcaaaaaaaaaaaaaaaaaaaaaaaaatacaaaaattagctgggtgtggtggtgggcacctgtaatcccagctactgaggaggctgaggcatgagattcgcttgagcctgggaggcagaggttgcagtgagctgagatcgcgccattgcactccagcctgggcaacagagtgagactctgtctcaaaaaacaaacaaaaatcaaagtgccaacctctgggctgtcccctcctggcctgccttgttcctgagctcaccagggtccttcactctgtggcactggcctcagccagcaccaaggctgaaagagcccattcagaggccagaaagaaactgttaggctctgaagccgtgggccaggccaagacagagattctgaggcatggttctggaatgggtttttccgcccacaggcactcaaggaggacagcattgggagatggctgggtggagagtctgcgggaggctacaaggcaaaaatcccctactccccctgggctccttcacagtttgtgtgtcctcacagagcaaggaagttctgtgagcctcattcaatcatctgaggttcttcccaggaaaattatagtgggaactctggctttgatgaaactgcttttttttcaaagcagtttgcaaaataaccggggccttaaaaaacaatctggatgaaatggtttttgccatttcaattggttctcttccaacgtgtcttccttccagtaggtttccagaatattttggtttcaaaatttgggggcacagatttgcaaagtggatttcaacatgtcgggtttcaaagggggctggctttgaaagtggtctgggcttctaaaaggtttgattgaaaactggtttggttctcagacattccagaagcttctcccggagtccagagcctcccagtggtgctttgggaagggggccaggcagggcgtcctggtgagtggacgtagggtgggcagggccacccttgtcctgggatgttgtggaggacttggcacgccctgtctcaggcctggctctggctctgggtggatgttttgcatcttcagaaaaaagctcctgtgggatatttctcctccagccgaccccgccccccagggcattcgagaaaagggtgcttgtctcttggtgagagggccacggttccttcagtttctccgttcctacgggcctctttctttttcctttttgagacggaatctcactgtgtcgcccaggctcactgcaacctatgcctcccgggttcaagtggttctcatgcttcagcctcctgagtagctgggattacaggtgtgtgccaccacatccagctaattttttgtatttttagtagagatggggttttcccatgttggccaggccggtctcgaactcctgacctcgtgatctgcccacgttggcctccaaagtgctaggattataagtgtgagccaccacaccaggcccgtttcatccctgcctcagcctgcatgccaagctccctgggtgcccgcccacaggtgtcaccctttaaggagaaagtggcctggggctggaaacaggactttgtagggaaggacagcgcgtgtgagaaaaggcctgttgatgggcacgccagggtttaatggacggctctttgaagtcatgggctgagccagaaggaattgtcatgatgtcagtctcatttccagatggggaaagggagacccaggctgcggtgacccactgaggcacaggatcagtgagaacccagccctggctttgcccagacctctcaagggcacttcgtgggaccattgccggccgttgtggcatctgtccctggccttgcccccatccgtctctgcacagcccaggtgggtccgagccagccccaggtctccagggtcccagcccagcctctagaagagccagcagcagggctggaagggagagcacatgctgggccttggggctgccttggacctcaggccgttgacaaggaaaagcggagagttgggaaaaaaggacaaatagctgagcgccagccgcagtcygggggacgggagcctcgtgcgactctcggagtgctggccagattggcagaggggaggagagaggaaaaacycaggctctgaggaaaaacctctccagcccagcgcgtggcctggcattaacccactgcagccccaggaagtggttccaccccaggcagccaacaaggcggtgcctgaactatgtctgtggatgacggagccacgacctgtccctcagggctcagcgctgcggctatgtccagggacccctggcygtgcccacgtcggggcttcccgttccttacctgccatgagaatgagatgtccagggacctccctgctccagctgggacctgtggggctttgtctgttgtcccgagcaccttggagatgtcatttctaacattttaacccaggaatccccccaccaagggacagagtgcaaggacatgatcgaacagaaaaagttctggtacaagatcaaccccgtggggtggtgagtgctgcagccccgggcctcacatcctgccgtccctgtgggagattggagcggtcccagtgcccaccgctgattctctggctccagcaacccctccaggtggatccgtcccacgcagcctggcctgaaacactgcccagccactgggtccagtaagacagagcctcgagtcattctgccgagaggatccagaaacacagactttttctggggtcctggaggcttctggcccatggggagcccctgggtcccagcgatccagccctgatgtgctgagggtgcagggcccagctgcagagcagaggagtgtggcccccagggaccagcagcacgaaaggcacactgaggcacactggcaggcctgggctgcagagagcctgaaggtcatggggtagctgatggaagcaggaagaccccatacagcagcgaccactgaggctggtgctgcactttctcagggaattgagtgtgggctcccaccatcccggccactggcttcctccaaagcctcctcctcttacatcagcaaaccttctgttcggtgaccccctcagtgaccctctgtgcttgccttcgtggtcttcctcatggaggatttcgggtcagcgtgggggtcagaggtcatttcccataccccctcaaaggtacttcttgctgtggtccccacactctgacaccctcttctgaaatgaacacttttttgttgttgttgttgagacagagtcttgctctgtcgcccaggctggagtgcagtggcacaatcttagctcactgcaacctccacctcccaggttcaagcgattttcatgcctcagcttcccgagtagctgggattacaggcatgtgccaccaagcccagctaatttttgtatttttagtagagatgaggtttcaccatgttggccaggctggtctcgaacttctgacctcaagtgattcgcccgcctcggcctcccaaagtgctgggattacaagcatgagccactgcgcccggccacaaacacttttttttttttaaacaagtgaaaacaagtttattaacaaagttaagaaataaagaatggctattccatagggagagcagcctgaataaacactttttttgttgttgttgaggcagagcctcactctgtcgcccaggcaggagtgcagtggtgcgacctcagctctcagctccctgcaccgtccacctcctgggttcaagcgcttcttccccaagtagctgggactataggcacacaccaccatgcccggctaatttttctctttttagtagagacaggatttcgccatgtgggtcgggctggtctcgaactcctggtctcaagtgatccgccctcctcggccttccaaaatgctaggattacaggcatgagccgccgtgcctggccacaaacatattttaaatttgaacaataaaggaactggaccaggaagtgtggagttggggagaccctgctctcgccaggtgccttcccggcaggttgtctctgcctccccttgcaccccttgaatggcgggctccctctcccatagcccctgccaggctggataaccaacttcattcttatacccgtccgaatctgccccctgttaatggcacccaccagtccttgtccaaacctcgaagctcaggacctcacagagcaccacgtcctcttctgtgtcatatgcagctggatctcagtaaatggcaatgtcttctctacccgggactgaacaaaacccattcctcctatgaaagccgataagacctgggggcagagcagcccgccttctgtccccgcggctttaggggacaccggccacccaccctcggcttcttcccccacttcttggagaatgtctgggatgtgggtgaagactggcagagaaaagctggtgtaaccttctgcaggggtttcgagcaattctgaatctcagctggtgaggaggccaaaacctgctctgcctagcagactggtcatgtctccctttcccttcccttccctttcccttcccttccctttccttgtccttcctttttccttcccttttcctttcctttctttttctttcagagtttcgctcttgttgcccatgctggagtgcagtggtgtgatcatagctcactgcagccttgaactcctaggctcatttctatttatttatttatttagagatggagtctcgctctgtcgcccaggctggagtgcagtggcacgatctctgctcattgcagcctctgcctcccgattcaagtgattctcctgtctcagcctcccgagtagctgggattacaggcgtctgccaccacgccgggctaaatttttgtatttttagtagagtcagggtttcaccatgttggccaggctggtctcgaactcctgacctcaggtgatccacccttcttggcctcccaaagtgctggaactacaggcatgagccactgcacccagccttctttttaaatatacattttttgagacagggccttgctctgtggcccagggctggggtgcagtggcatgatcatggctcactgtagtctccacctcccaggctcaagccatcctcctacctcaacctcctgagtagctgagaccacaggtgcctgccactatgcctggctaaatttatattttgtggagacagggtcttgctgtgttgcccaggcttgtctcaaactcctgggctcaagcaatccccctgccttgacctcccaaagtgctgggattacaggcctgagctgccgtgcctggcctggtcacatcttgaatggaatcgggctccgtattgtccagatacctcccatattaaaaaagaactggggccggcagcagtcacacttcccagcccttccctgagcttgggtctggtgggagtgtggagacagcaacagggtccctgtgtgtgcagtctggctgcaagactcaggggtgtgcgtgtgtgcacctgtgtgtgcacctgtgtgtgcacgggtgcaagggcatctgtgtgtcgttttcttacaggaaggcgtgggccaatgaccagctggaagtgcaggttcatgtgtcctcagacagtggctggtgcctcacgctggcttctggctgtgaccagggtagcagagagagcaaagaggtcctttcctcaggtgggtggagtggggcttgagcacagtccacatgcagagatgagtgtggactcggaagaccctgacccccttgtatcagtgtgtaggggaggtctcaaggtcattgccctacagaaaccaggctgggtgcggtggctcacacctgtcatcccagcactttgggaggctgaggcgggtggatcacctgcggtcaggagttcgagaccagcctggccaacaaggtgaaaccccgtctctactaaaaatacaaaaataagctgggtgtggtggcacatgcccgtaatcccagctactcaagaggctgaggcaggaaaatcgcttgaacccgagagttggaggttgcagtgagccgagattgcgccattgcactccagcctgggcgacagagtgagacgccatctggaaaaaaaaaaaaaagcgtaaagaattccctccctggggccgaggtggcagctctccacaccttcccacaagggtgccagctgaggagggacagtggaaggggcccctgcagggctaggggatgcctctgagcgttccaggcaggcaggcacaggcaggagctcctggagctgtagcctcctcacccaaggcttccagctccttcctgtgtggggtctcagacacgcgacccacccggacgtccgtgacagtgtagcttcttcatctccggcatgacccgaatttcctcggggccccccactccctggggaacaggaagaaaatacccatttcaccctcactgatatacacagcacacaggcacctacgtacacacttgcacacatccagtgtctcagcccgtggctgcttccgccccactgcccgtctttgtagcaggacacaggtgcacgcctggggcccagggctctcatccaagctggtatgtcccaccgccccccaccctctcccaggcacccagcattttgagcccagaatcatgggaaactcccgtcaggtccacacggtgctgagcccaagcctgcagggcttgggggaggtgggctgctctcagcttcccccagcctggcctggcatctcctggacccccgcaggggtggcagctcagccccttgtgggttttttctttggggggacagactctcgccctgtcacccaggctgaggtgcagtggcacgatctcggctcactgcaacatccacctcccgggttcaagcgattctcctgcctcagtctcttgagtagctgggattacaggcgcctgccaccatgcccagctgttttgtatttttagtagagatggggtttcgccatgttggccaggctggtatcgaactcctgatctcaggtgatctgcctgcctcagcctcccaaagtggtaggattgcaggtgtgagccactgcgcctggccctgttccaggatcttggctctctgtcccgggcagggtgcttccgggcctctttgattctggccacaatgctgagcctgtcccgcagccctgggagtggcccccagaccttccactgccccaggaatggctgacgcaactattccccccaaccagtgagacctgtgcctgcccgaggaaggtgtgagccgggccatttagaggagctccctcgggtggatccacctctgagtcctgggcctgcagcctggcacagggctcctggaggggctgcatggagctgggcaggccgggccctgggcatcttccaccagggggcagccacggctcaggaacgcgacctgcggcgcacccttggctaaacgcggctgcacgcagggcatggggtggccggccaaagcgcatgtgaacctggtaatgcaatgtcccccgtgggtccgaaagccctgaggccacccgagtgagcatccctccagccctgaggccaccctcccgggcctctgagacacggtccctgtgtgggtggctgtacagtcccggttctggacaggccgtggggggcacaggaagtggctgctcagccccctgggcggctggaccaggagggcactgggtgatctgggggcaccgtggcagggctgggcctggtcacccaggctctgacgccctcgtgattcctgtctgctgggccccacagcgccctcagcaccatgctggccatgctggccagagctgtcttcctcccaccaaacactgtccgtgagggcgacctgtttccagtttgaaccaagttcacactgactccaccactcacttgctgttgggtcactgctctgggcccctctgggggactcaaggagctgagtggctccgactccccaggcctgaagccccaagacgcgctgccaggaccacgctggctgaggccactctttgagcccctcccccacaggtggccgagcacacacagtccagtgggctgaggtggccccaagggcaggaacgtggcatctcttcccaccagtcagtggctctgggggcacaaggacttgtcgggggaaggaggcagcaaccgcaggtcagaagctggaagcagcggccactcagcaaatgacacagctgagccggaaaacccagtcccagggctgtgaagagctggggccggcctcacgggggctccccagtttcccctgcccggccctgggccggcctcacgggggctccccagtttcccctgcccggccctgccctgccctgccctgccctgccctgccctgccctgccctgccctcccctcccctcccctcccctcccctcccctcccctcccctcccctctcctcccctcccctttccttcctttttctttccttctttcttttccttcttctttccttccttcctccctcccttc

SEQ ID NO: 97037 - DNA, 17817 bp, Homo sapiens
  misc_feature (1)...(17817): n = A,T,C or G
ttttataaatatagaaaagcctattgaacaaagcaaaattggccacagttccctgagcttgctcctgcagacacttagatccagagatgtgcatgaacacccggtcctccccaccctgcaggctcagcctgtttacttttcagttcacacagtgggatcgcccatcagctgttctgcacctgcttttactgctctagtttcttggtgatcttttcatgtagcacaggctggccaaccatgggcttttcctcttagaggcgtgtgtgcatgctgcaaattcagagagaccccaagtgtctcctggttggctcccctcctgcagccgctgtgcatgtcgtgccacagcgcacacatctgcgccattgttttttgcgttgtagcgtgtcctctgcccgatgtgtttttcatttcgcgttccatctgggtcctcttgtgtgggcttgcagagtggtgctgtcaacagccagcatggagtgcccggggctatgtgtccagcatctttgatcttattggtttttagtctggttattgtaacggactcgctggacataccgtcaccctctgtggtacacacgggccgtcaggggttttgtgtctgaggatgcagctgtcctaggttgctggaaatggaattgctgggtcagagagaacgtgcgcgtggtcaagcctgctgagtgtcctcactgcaggagggccgtactgctcgggcttcctggtgcaccgggatgcccacccccactgtgccctacagggacctgcttcccttttatttccttgcagggccaggggtgcactgtacgatccctccccagacgcaaagctgtgtctgtcatgaggcttatgggcatgtttgggctggtccccagagtcacagcacgtttgatgcagggactctgcccccccagctggttctgcgtgaattgtctggtcccagacatcgcttttgcttggttgctggtctttctttttcatgaggtgctgggaggggcagatgctgctcctgttccttctgatcctgtggatacccttggaaagagccagctcactggatggatctgggtctgccctcggcctcctctctgtgcagctggtaatgagaggtgcaggcagccacaggcctggaactgggctcacatggcactctccacaggtgcctggactacgtgttggaggagctgaagcacaacgccaaggccaaggtgatggtggcctcccacaatgaggacacagtgcgcttcgcactgcgcaggtaggtgtgccccaccctgcaccgaaaccccaacctgagccgttgtctcctccggctggggagaggtggcagcagcgcagagctcagggtgggcagagcgacctgctgggtggtcgggcatttgtggggaaaggctggtgaaatgagctggagggtggcttcagtgggcaggcccaggcccgctggcgttctggacatcggactgtgagagcacaatggctttttgcagttacgttggtttttaaaattaacttttttttttttttgagatagaatctcgctctgtcacctatgctggagtgcagtggcgtggtctcggctcactgcaacctccgcttcccaagttcaagcaattcttcatgcctcagcctcccaagtagctgggattacaggcatgtgccaccacgcctggctaatgttttgtatttttagcagagacagggtttcaccgtgttggccagactggtctcaaactcctggcctcaagtgatcctcccttcttggcctcccaaagtgctgggattacaagcatcagccactgtacccagccttttaaaaattaacatctgacttattaaacttcacaattaaaaaactaaatttcatcagggtattcggatggctcctgaaaggtacaaatgcagtgttggaggccagtccctcaggaggcctccacagtgccacctcattaatacgcccttaacattttaactacatctggaatgtaacggtttgttttctctttaaacatttgtcccatggagcacaacttcggtagaattctaacaagtcaaatgcagaagttaggtgaagtcagttcttggatactcctgtactgtcaccctggtcttatctcatgccttagtccaagctatgcacacaatggggtcctaggtccccctcccctcccagattccgccttcccagggatgggaccccctagaaccctcgggggcctgggcagtggcctcgctggctctcgccttcctaggagctgagcaggagctccactctcagcagggcagggtgccccagatccagggcttgtggcacgagggggctccccaagaagctgtgaagccacagggccaggcttggggccagggctgcagccaacaggacacatcctggtgctgctcgggagctgactcacggctctgaaatcattcagtgatgtccacattcagcctttgtttacgatgctgctactttttcatggcctgaaattgcagcacacccatttttgtgccctgatcctctgctaattgtcatagatgtgtcggtgatgggacagactcactttctccacatgcacaggcctggtggccagcannnnnnnnnnnnnnnnnnnnnnnnnnnnnnnnnnnnnnnnnnnnnnnnnnnnnnnnnnnnnnnnnnnnnnnnnnnnnnnnnnnnnnnnnnnnnnnnnnnnnnnnnnnnnnnnnnnnnnnnnnnnnnnnnnnnnnnnnnnnnnnnnnnnnnnnnnnnnnnnnnnnnnnnnnnnnnnnnnnnnnnnnnnnnnnnnnnnnnnnnnnnnnnnnnnnnnnnnnnnnnnnnnnnnnnnnnnnnnnnnnnnnnnnnnnnnnnnnnnnnnnnnnnnnnnnnnnnnnnnnnnnnnnnnnnnnnnnnnnnnnnnnnnnnnnnnnnnnnnnnnnnnnnnnnnnnnnnnnnnnnnnnnnnnnnnnnnnnnnnnnnnnnnnnnnnnnnnnnnnnnnnnnnnnnnnntgtgctgggcccagactgccacaccacccaccctcaaacaatcggagttggctttggccaaggaacaaaccagccccaaacttagaggctggaacagtggcatgttctgtaggccaggggtgggctggctcagctgatgcttctgctgctggctgtgcctgtgtccctcctgcgtctgtgatctggggccggtggggcctaatgagctcattcatggctggggcagtaaaggagactgcatcccgggtccagcgtcccacaggccagcccaggcttgagcacgtggtgggctcaggcttccagaaggcctggagagggcaagcctctgcttgtgtcacctttggtacctccctgctggccaaagtgcctcacgaggccaagcccagatgccaggtggagtgagccactgtcctgtgctgggaggagccgcagtcacatggcagaggctgtgcacaccagcaggggagggggcagccagcagtggcacccggctctcgggttcatgtcctggggttgaggaagacacaagatggaagccagggcgatgtggcagagatgggtgcctgctttagactgggtggtcccgggtgatgcgtgagcagcaggcggaactcaccccagggtggggaccccagtgctttgcagaccagcgaagtcgggatacctggatatagtaagctggagatgaaacttgagaactgccactgcgtggatatttcagaccctgagaatctttgtaagacgctataccgggtggtgtgaagcaggacagagtggaggccccaccccagtatctgagcagtgctaatagatatataatgcaagccacatctgtaatttaaaatttagtagctacgttaaaggaaaaagataaaatgaatttcaagaataattttaattaacccaaaatattcaaaatattacttcaaattgtattccagttgcttttagaaaagcaacacggcatcgtgcattatttttctacaaagtctcctaaatcccgtgtgtatttgacatttgcaacacatctcgattcagagcagccgccttccgaggactcgggggctggtggcagctgtgtgggacacagcagctgtggggatggggcagggcagcagcccacagagggcgagggcaggggccggagaccagtcataccacagaaccctggaggggcttgaggaagggatggcaggagagctgaggagcttctctgccctgtggggcaggctgctgggtgggtcagggcccgaggaagggctgcacctccaagaagggagctagaggagaggtgagagaggagaggggagggaaagcaggtgggaggccttgttggctaagggctgaggcctccccagggagacgagtagggcagcccagcagagtcctgctgggaagaggcctcactggggcagggccaggcagagcccataccccagccccaccttgcaggggatgaagtctggagagtgcagatggggcacctgggatggcaggacaggctcagagctgggacaggagccctgtatccctgcaccggggacagtgtcctggaactggccctcagttcctggcttcacctgcacaggatggaggagctgggcctgcatcctgctgaccaccaggtgtactttggacagctgctaggcatgtgtgaccagatcagcttcccgctgggtgagtggggccctccctggtgcgatggggtacggtgctgggcctgggcctcatggtgtatctgcccccatgcaggccaggccggctaccccgtgtacaagtacgtgccctatggccccgtgatggaggtgctgccctacttgtcccgccgtgccctggagaacagcagcctcatgaagggcacccatcgggagcggcagttgctgtggctggagctcttgaggcggctccgaactggcaacctcttccatcgccctgcctagcacccgccagcacaccctcagcctccagcaccccccgcccccgcccaggccatcaccacagctgcagccaaccccatcctcacacagattcaccttttttcaccccacacttgcagagctgctggaggtgaggtcaggtgcctcccagccctgcccagagtatgggcactcaggtgtgggccgaacctgatacctgcctgggacagccactggaaacttttgggaactctcctcgaatgtgtgggcccaaggcccccacctctgtgacccccatgtccttggacctagaggattgtccaccttctgccaaggccagcccacacagcccgagccccttggggagcagtggccgggctggggaggcctgcctggtcaataaaccactgttcctgcagctgagagccctttgccctcacacagggtcagctctgggcaacaaagagggagtggctcagacagggtcagagaagtctcatcccagactctggcttccagcatcatctgttcctgggggccaggccctgcgcagacctggccacccagggtgctggacacccccaaccctgactccacaaggacccagcagggcccatgggcccaggccagcacggaggggactcatgcagatgcagaggccaagctccccaggtgggcctggcacgcctccccgcagggctcctcctcaggccattcctgccaccctgagtcctctaccccagtgacctgcatcaggctcctcctagtggttcccacaggacactgaccaggctgcggcaggcgcatacttgcactccgggccttctcccatgctctccagcccccagccccacaaagcaggctggatgtggtcctcatgccctggggcttggatgggggcccctgtacagatggcagtgacagcatcctgggaccagggctggggcaggaaaggctggagggtcccagtctccaggcagggggaggggtggtgggctgggcacacagcccaggaaggggcccccaggtagaggcctctgctgcaacagaggtgggggccctaccagggccccggttatggcagaacctgcagctatcacacaagccacatgygggccacactgaggcatctttatttctctgggtcacacagagcttgggcctgggagcctcttctgcatgggggctgcagctgccaagggagcggctgaraccaraacaagcrctygagtgggccccagtgcaggttgggatgtgcccggtggagtaaggtgtgagaacccccagcctcactctctgcctggccctgaagcagacagcagcaggctggcccagcctcccctttatgagactatcctagggtttgacagcaagtcccagatgaagggtgacaggcagctggggtccacctggtctctcctcagcagggggaaccccctgcgggcagctgggaaggcagtggccaaaggtcaagaagatgaactctgcccagacttctgctgcctgtggctatggtgggacagggctgcctttctggtcacactgggcagcaggcaactgccagggacctcctagccccagggctgccttccctgcccagcagcccctctgctgcagcttccggatgagttccagcaggttcatctgcagcatcagctcctgggatacagaggggccccatgaaggccagagtgayccccaggcccctttcatcccggcccaaaggtgccaggcagtgagcccacggggcgaccatcctgtgaagcctggtcatggcctgctacgacagggtggaatctgagcttctgcccccagcagggccactcggaatctgagcctctgcccccagcagggccactcggaatctgagcytctgcacccagcagggccacttggaatggcatgcgggaggggagcagaagagggccctgtggggcacagcaggcctggggagggtgggcagtgcccatggctggctggctcacccccctgtagggaatgggcctggcctccatgctgggaatggcacagaaatcctttccagagcctcaatccttccacttcaccccctataccctgagcctggctccccagggaccagcagtgaaatcccagatggaatggggcccaggggcactcgggctaggacagagcaggcccaggcactgacctgtgggttggtggtcacgtagaagccagccacccccgccttctccagtgtgctctgctggtcagccaccttccggtccagctccaggacgatcttctggtccatcgcccgctgctcctcacggatccggtgctccaccgcctgccgtggggccgggggcggcgggggaggtgagggcagctcaaacacatgctcctgctgcygtccccaacagcaccagctctgacaccaccaatgcatcctcaccacaccsaggcctctcctcggccaagtgaacccctgaagggggccccaaggggcttccacgaatgctttgacttgggactgccttgggaccacacacacatctccgcaggcacaccctgccccatgacttgttggttacatgccggtctctggttgtccctgtgctcccggggagaaggatgggccccttcctggctggccccatcaccccaccattgcctttgtacccccygaggccacctgctctgcggagaccccaacccacgaggggcactaatggactccaggggagcactggtgggttctcaccctccacccagtcccagcacacctggcaccctcagcgaggagccacctggtgggactcactaggcctccagtgtcccactcaggcccagggtagccacccacacctgagccccccacaccccttcagctcagcccagtcagcagagccaggtggtgcccacaggagagctgggccggccaccctgcctgcgtccccagtacctctagttctcgctgctgagccgcctgaagcacaggcaggttatggggccggcaggcctgctgggcttcctggtgcttctgccgcagcgcctgcctgagcactgggagggatgagagcccgtcagcaggcggtgggactcggcagcagccctcacccatgggcacctgccttaccaacccagcagagcagccaggccaaaggggtgtctgcactggggaggacgccagcctcctccatcctcccaccccactgtcacggcaagtctccaggggattccagaaggtgcggggcactgaaagagagtgggggtggggaagactggccaggtggggccaaagctgcagccccagacccagggcagctggaggrggcaggcgggagggaggctgcagtctgagggcttcagggcccccgtggccacaggccataggacatctactcaagtgttggagaccacctcaggcaaaggcatgggaaaggagcaggaggagcygggtcgctgaccctgagcgtggggcctctgcctaccaggtgtgtggttggcccctccacccttkgtgctgcccttcagggtgggcagccccctcccccatttgcagctcccagcccctacacagcaccagagggagaagggtgagctgacctgggaggcccaagtttgggatgaacctggggtgtcataagcctgtgaggctctgggccagggagtctgtgtggctttgaggggctcaccctcggccaccaagcaaagctccacggtccctgctaaactgtgcacaaacacagatgtgcaaactctagtctgaagggagtgtacagaggaagcgatcatgggacataaaccatcatggcaaaatggaacatggagcaccccgcagctggcgccagtgcattaagtgccaaatggctacagttccccaggaaggaggggtccctggccacaacaaaacgtgaaatccaacactctgttcctgggaagagccctgatgttgcagctcttctctggtggcaagtctccagggaactccacggcccctgaggctcccctgcaggtagcctggctccagctgtgcctrcagccttccccaatctcctgtttcttggcattctgtacacacctcgacgatggtatttaccaaaagcccccctcaagacagctccataacacagggaagcaggraaatgtcatcwtcttcactctactgatcaaacattgctacaagtgccaggtccactacgagattccactagatakrcaaccaaaaggcaagaagagagccacgccggctgcctgggcagaaggggcctggccttagacacraccgggaacacaaaggaggcaggagcagccagtcacccctgccaaatcagcaggagaagcagaaagtcaacgcaggcatgcctgctgctggtggaaccaggrcctggcccaaaccttctgaagcacaaacagcattgggcccaggcagttactgaaactccccatcctgctagaaagaactacaactctgtggaaaaatggccgattccaggactgagacacggagaaaacaagaaaagatgagcctgaacacatacctgaaccagaaagcaagraagtgctcacagaatgatgrggcggcatctaaaggtgcctggagcgcccccaactggccacacatggcacagtctgagcattaaggaataatgagccatgcacttgggattagtaaactgcatgcatcttacagctcaataaaatttttaaaaagacagtcacccagacatttaggggaagaagtaatgccaattctacacaaactcttctggaaaactgaagaggagagaacacttcgaaactcatcctataaggctggcaaaaaccctgatacccaaaccaggtattacatgaaaactatagaccacagtttatcatgaacatagacaaaaaaattcttaacaagattttagcaaatcaaatccagcatacataaaaaggatactacagcacgacccagtaggatggaattcaagtgactgtaattcactgtagtaatagaaaatgattcaccacgtgatcatctcaagagctgccaaaaaggraactgccamaatccaacatccattcttgatagaaacacaccaatcctggagcagatggacactgcctgccttctggggaagggggccttgcmccgctaggaggaatttttgccacattaaacctgcctctaatcaggctyctaccagsagtccagtgtacagtaaacccagagagtggagaagcaggttaaatgcacgaggaagcatttcctctgatagatccagagcagggcattctaattatagaattagactctataaaaagtcaatgccacaataaatgttggggactgttccagaagcaaagagaccaaagtaaccaattgtagtacatgaacttggactggatccttacttataaagcaacaatttgccacaagttaggtaccatgatgtggccatgcactgaaagtcaggagacacctggaacagttaatttctcagggggctaccctctgcagctgtgtaggagaccrctcttgttctagagcacttgctcccaatccaaggccaaggttgaccccaccacccaggttgtctggaggcattcttggttttcasgactagggagggtacccctgccatcctgcaatgcgcaagacagcatctcaccataaagacttacccagccacaaatgtcagcatggctgggttgaaaatcctggtctccaggaatgctgaagactcttggtgaatkctatgctgtcacatgtatgtattttgggatgtcaagaactagagcaaaatgttaactactgaactttcggtggagagcacaagcgtatgcactacactgtcttttcagtttttccaaatgtttgaacttttaaaataagaagtttgggaaaaataaaacagcaaaggtggaaatctgatggtgcagggggacctgccctatataatttgcaggaaagggctccgaagcccaggaagcatgcggctcaagtgggaagctcttctggtttgggagggcgccacaggagacagtgcttaggaatttgatgtgcaactagaatgaggccctgcaggcctgagagggaactgaccctgaagggcgcgcacagctgtcaacagacctccaactacccaagggcgctgctcasctgtcaacagaactccaattaccggagggcaacgcagtcagatctaccaccagagtcagcctgccggccaaccaagcacggaggcctagggccatcaggcctggaagggggtggggcacagggaagcccgaacagggagtttctgctaagaaggtgggtgctgcgcaactgaaaacaaaactcgttggacacattggtcaccaaaaaggcgctgtctcagtctctgcgcccttgattttgttaatcttagggacctcttccgaacactcccaaggaaggagccgagctgcacagataccaagagctgccgggaggcgccgaccccgaggaggcggcacctcctcccgctgcccccgcgcacctcgatgctcgttctgtaggcgcaggcgctggttgtacaggctcttttcggtgaggtgctggatctccagtagcccctgcacgatttcgaacacggtgccgtcgagaagcgccagggccaggtcgctcagcgtggtgtaggacaagcgctgctggaatgagctgcggggtagaggagcgcggtgagccccggcgggacacgatgcggcctcggcaggccgccgcccgccccgcccgcgtacctsggcaactccttcaccaggctctgtaacgccgacagcagctggtagtgtcgctcctgctgccgggcaccgtccgccacctcctccaaggcgccsgcgtagcgctccatggcgcggacgcccgctagccgccggctgcagcgacgagcgcccccagctcacgtcatcccgaccgcggcgcgtcccgccccttttatgacagtccctagcgcagcgcgccccgcccgtcttaggacagtccccgatcgcggcgcgcctcgcgccttccccgccccaccacgcgccccgccccttgcgtcattcagaaggagacgcgccccgtccctccgtggtggctgcaaggagggtttcgctcagctgaggctcgtaccttcctgctccccgggccactttagaggcgagactccgtcgcctggatatcgcaggaccatgtagaatcccaccggcccttgctgagtcattgcgggctgaggtccgggctccgcgccggcgcgcctgcgaggtggactgtcccggtcaccggccttcccagagggaggggtctcgggccagagcccacaggacctgggtctaaggcaccatcgcggccgagcagtggtgttggggtctgtctgcgtcctctctgcccccggagtgagacagacaagaccaccctagagcctctgggccaggagagttggaaccggagtccccatctgggcctgccgtggtcgccccggggtgcccagcccccagccggaaccgcgagcccagactgccctctccccgctccccagaccagctgctgggccggggctggggagcttctggtggctggtgtgggcggcaagccacccaggcgctgaggcaagagaccgaggacacgagctgttccagtataataaaatataaaacaagaatagttataccagatatagatcttagatatgattatatatgaatatcaataatcattagttggtagcaattactctttattccagtattataataatcctcactctataatcataacctaggaaaaaccaggccatacagagataggagctgaggggacacagtgaggggtgaccagaagacaagagtgcgagccttctgttatgcccagacagggccaccagaagggctccttggtctagcggtgacgccagcgtctgggaagatgcccgttgccaggtgggccgtggtctagcggtagtgaaaagtgtcaaggaacaacacctgctacttagcagaccgggaaagggaggctccttttccccgggggagtttagagaagactctgctcctccacctcttgtggagggcctgacatgagtcaggcttgcctgcagttatccggaggcctaaccatctccctgtgatgctgtgcttcagtggtcccgctcctagtctgcctttattatgcctagtcatcctgtacacctggctctgccttctagctagcagtagtcaattagtgaaagtactaaaagtctctgatatgcagaaataatggcataagctatctttctctctgtctcctctccctctctgcctcggctgccaggcagggaagggccccctgtccagtggacacgtgacccacgtgaccttgcctatcattggagatgactcacactctttaccctgccccttttgctttgtatccaataaataacagcgcagccagacattcggggccactaccggtctccgcgctttggtggtagtggtcccccgggcccagctgtcttttatctctttgtcttgtgtctttatttctacactctctcgttgcggcacacggggagagacccaccgaccatgtggggctggtccctacaggctggggctgaaccggctaggaacacgttttaataggaggggttcgggtggaggaatggctcctgcaaaggccctgccagagtcaggtcaggtggatgggcgagaggaccagtgtggccaggctgcggaagccagcacaggagacaagggcaggtgctgtgcattacagaggctgctgggggcttgtccaaagagcagcagggggcacggaagggcttggggacgcagacacgatcagacttgcatttcaccaggcattctttagctgcctgcggtgctaaagaatgggtggctgggctgtgtgagatgaccctgctttgaccaggttaggaattatgactggtttccagagagaacattggttagcagttggctatgggggagaggggggcattgagccaactggggtccccctgaagtgccagcaaagtctctggttttctccaggatctgtttcctcagtccctggcaggattggctcccctgcaagccatgtctttgtgatcccttccagacagaaaccaggagtgaataaagtgaataatgacaacaagcgctcaggccactgccgtggagggcggtccacaacccagagctggtcatgcgccgggcaccctggcctccaggtccctcggaatggcaggagctggaggtgggattcgagattgtgggagctgagtctgtagtgagtgaccaggagccagctggggctgggcttggtcactgtcacctcccccggaggtggtgagtgggatgagtagctgggtgaagacgcctgcctgtttcaccagtgtccctgccctcagtcccccagtccatgaagggtgtctgtgtggagactgggagcatatagggcagccccacatgatgatatgtctgtggccagctgggcaacactgtcgccagctccggggtctgccaggtctgccaggtggggtgggggctgtgagccacagcaggagcagaccaggcctgggtttggacacctgctcctctgccttgtccgggtgctgatgcaggaaggccccttctccaacccttggtgcaacatctgacctgaaccagcttccccagcccagcagcactgctcccctaatgtggatgtcgacctaaagaaacaaactgaaccacagttcatatagagagtttgtctggaccaaggctgagagagctgcccaggacacaccaagttgccctgggagtacttcattcagccttattacaagcaagtttttaaagactgaaggggacaaggagtgggctgatatgaagtcagcaggaattctgactgctttccagagagaaccttagtgactggctataaggtgttggactacaggggaagagttatggtgtccagcgtctggctttttatgtctacttggtgtcagtctggaacccacagagcaattggcttcaagaggtcgttagctcaagtgggagtgacatgtgactgctgtttcagtccagtgactctctgggccagataattaaaggggtctcgcattcctcagataaaaagttcttttcttttgcatggacgtgagcagtgggtcactcaggcatggggactcctgtgggtcttcagggaggggtctcatcccccagagccctagggatgggtgatatgtgtgtaggaatgggggagctggtgcgcagacatgtgtgccccttgtgtgcgtgcacatggtggaccccatggctctttacatcaggtggtatccactgaaggcctttgctctgtggccactgtccacctccacttagcttcccaagtcctccaggctggctggtgacaccttgggttagtgtggagtgactggtgtatgttggggagctgcagatcccctttctctgacacaggtgtgtctgggcaaacaccaagtctgtggtttgaaaggatgggagcctgtgtgtgtgtgtgtgcatgtgcatgtgtggcaaaaggctttgctgcatggcttttgtgtgggtctgtctttgagtgtcacgtgtgcctttctgtgtttctctgtgaattttcgtgtgtcaggttgtgagtccattgtgtgggcagagaaacagctctgccgtgagaccctgagccattgcaggatccccataggccacacagaggtgcacacagcacctgacctaagcctgctcctcccagaacatcaggctgcacccaggccactggtcacttcctctgtctcccaagactgttcctcactgcctgcctcactggccctggtgagggttcctcactgccctgcccctggccctcacaacagagctgcagatgaggacaccacccagctgcagtctcaaggggctcctctgcattgggtgtcctgcaatgcatgccctctgaccccttttgtttcggtgctgtcctttttagtgtgtggcaccaggatggcagggagctgccacctcagacttctcttattttcactctgtgagtaataagctctgaatgagaggggctcattgtgtctttactgtcaaatcagtcaggccttggccttggcatgtctcgcgtgtgcttgacaaatgtattgctcatggggtctggtggaggcacagcacccttttagaagacagggtctgtgcagaccagttacgggtgacatttcctgggcacagctcttgcctaagtggtgggggatgggaggaggactatgtgtggaacacaggattatctcagtcattccatgtgtgatagtacatgaaagacatgagcagttgtagtgctgttcactgtgcaaaagtatcccttcttcctaacgtgggagggctgcttttgcaaatatgtctgtgctatttctcactggtcctgcctcttctgttcttggaatcaaactcagtccacgacagatcccactactagctgaatttctttattagtcctatcacaaatgaaattttgtattagcacctcaggggatttctttaattttgcaaaagtatgtcatcctaatttattatttttttcctaagatctggcaatgagcatcggttctctgcttcctatcttaccctgcttactcacagctgcttcaggtgacctcctttttaggttcagagttatggctgacctctgctttaatcaaaacagaatgtattttggtttcttattttgtttatcgcttctatcttcaaattagaaatcctagagctcattagatttacttttatgtttatttttgaaagagcatcctgctctgtcacccaggctggagtgcagtggtacaatgactgctcattgcggccttgacctcctgggctcaagtgattctcctgcctcagcctcccaagtagctgggattacaggcacccgccaccacacctggctaatgtttgtatttttagtagagtcagggtttcaccatgttggccagctggtctcgaactcctgatctcaggtgatctgcccaccttgacctcccaaagtgctgggattacaggtgtgagccaccatgcccagccaatttttatgaccatgaatggggacagatctcttaaacagttcacaaagagccatagttttaagggaataaattgataaattagactgtattcaaattaagaatttctgtttattaagagactaagaaagtgacaaggcaagttgcagagtgggaacagatctatgaacacatagaactgacagagggctcacatcaacaatatgtaaagagctcttaaaaatcactaagagaggtgctcaatggtgcccaggctggagtgcagtggcgtgatctcagctcgctacaacctccacctcccagccgcctgctttggcctcccaaaatgccgagattgcagcctctgcccggccgccaccccgtctgggaagtgaggagcgtctcttcctggccgcctatcgtctgggatgtgaggagcccctctgcctggctgcccagtctggaaagtgaggagcgtctctgcccggccgccatcccatctaggaagtgaggagcgcctcttcccggccgccatcacatctaggaagtgaggagcatctctgcccggccgcccatcgtctgagatgtggggagcgcctctgccccgccgccccgtctgggatgtgaggagcgcctctgcccggttgtcccgtctgagaagtgaggagaccctctgcctggcaaccgccccgtctgagaagtgacgagccccgccgcccggcagctgccccgtctgagaagtgaggagcccctcttcccggccgcccctactgggaagtgaggagcccctctgcccagccagccgccccgtccgggagggaggtgggggtcagccccccgcccggccagccgccctgtccgggagggaggtgggggggtcagcccccagcccggccagccgccccgtccgggaggtgaggggcgcctctgcccggcc

SEQ ID NO: 97038 - DNA, 83111 bp, Homo sapiens
  misc_feature (1)...(83111): n = A,T,C or G
ttttttgatatggagtctcgctctgtcgcccaggctggagtgcagtggcccgatcttggctcactgcaagctgcacctcccaggttcacgccattctcctgccaaggctgattttaatcttcgaatctatatccttttcctataataaaccatagccacaagaataactgtgatcagtgagctctgtaatctttctagcaaatcatcaaaccccacagtggtctcagggacgcctgcatttgctattggtgtcataagtaagaggggtcttgggaaccattccttaacttcacagtgacccaacaacaggaaaattgttttggcaacacccactctacttaagtcgaatgccaatggaaaaactgcaccctacagcttcatcagggccaccctgagagctgaccttccacaccaccctggcttcccaaaagtaagtggcacattgctattcccctgccaggcaccagggggtgttggtggggctgagctgggagctgataccccttcctctgcccatggaagtagaggtgcttcctctgtctgtcccaccagggtactgtcagtgtggtccagcagggagctaagccttgaccccacctggcatccacaaggtggaaggagatggtgtgaggcaggagagtccacactctgactccctctcccccagccaggtcagggcccagtaggagctgaactccaactctactccacccctatctggcacccatgacatggcgtgaggtggttagaggtggggcaagttggccctctactttctcacctcctctctcccgggaatggaaaacattaatcatgcaaatattaatgaaaagaaagcaggagtggctatcttaatatcagatgaagcaaatttcagaaggaaggaaactactagagacaaaaggacattacataatgacaaacagttcaatccccaggaagacataacaatcctaaacatgtatgcaccaaacaacagagcctcaaaatacaaaaagcaaaaatcgatagagctaaaggataaacagacaaatccacaattatggctggagacttcaacacttcactcttgataactgacaaaactatgaggcagaaaatcagcaaggatacagaagaactcaacaccagcaaccaacaggacataaccgacatatgcagaacactcacctaacaagagaacacagttttttctaagtgtccacaaaacattcaccatggtagaccaaacctcagctaatttaaaagaattgaaatcttgacagggcacggtggctcacatctgtaatcccatcacttcaggtggccaaggcgggtggatcatttgagatcaggagttggagaccagcctggccaacatggtgaaaccctgtctctactgaaattacaaaatttaggctgggtgtggtggctcatgcctgtaatcccagcactttgggaggccgaggcaggtggatcacttgagatcaggagttggagacccgcctggccaacatggtgaaactgtctctactgaaaatacaaaatttaggctgggcatggtggcttatgcctgtaatcccagcactttgggaggccaaggcaggtggatcacctgaggtcaggagttcaagacccgcctggccaacatggtgaaaccccgtctctactaaaaaaatgcaaaaattagctgggcatggtggcaggcgcctgtaatcccagctactcaggagactgaggcaggagaatcgcttgaacccaggaggcagaggttgcaaggagccaagattgtgccactgcactccaacctgggtgactgagcaagactccatctcaaaaaaataaataaaaatgaataaataaataaaaataaaagaattgaaatattttatataaaggaataaaactagaaatcaataacagaaaagacaacaggaaaatccacaaacacaaattcctggaaaataaatgacacatttctaaataatagcaaaggaaaaagttaaagtacacagaatagaatgagaatgaaaatacaacatatgttacagtcactgtggtgccaagagcattagaaagcagaaaaggccgggcacggtggctctctcctataatcctagcactttgggaagccgaggcgagagggtctcttgagccctagagtccaagaccagcctagacaacatggcaaaaccccatccctataaaaaatgcaaaaatctgccgtgcatggtggcatgcacctgtagtcctagctactctggaggctgaggcaggaggatcgcttgagcccaggaggtcaaggctgcagtaagccgagatcgtgccactgccctccagccttggtcttagcaagaccaagaccctgtctcaaaagaaaaacaaaaacaaaaaaccaaccaaacaaatgaaaaaaacctacaaattatctttatcaggaacaagacaaggaatgaaattatagatcctgcagccattgaaaggataaggaactattacaaacaattttacgcccacaaatttagcaacctagatgaaacagaccaattccttgacaaccacaaactaccaaaatgaataatcctatactaattaaagaaactaaatttgtaacgtaaaagctccttaaaaagaaatctctgggcccagatggtttcactgaagaattctatcaaacattcaaagaataacaacatcaattttatacaatctcttacagaaaggagaagagaggacatgtccaactcatcatcctaatacccaaaccagtgaaaataagtacaaaaaaaaagaggccgggcgtcgtggctcacgcttgtaatcctagcactttggtaggctgaggcaggaggaacacctgaggtcaaggagttcaagaccagcctggccaacatggcgaaaccctgtcttgtagggagaccccctgaaactattgctatggaataaaagatgaaatgctcctgattactgtaaatacaaagttgcattcaggattgtgtaaagacaatgccaggttggactgtcagaatgagccaacagcacgtgatatgcttccccctgcagagagcctatgaacggacatgcagtcagggagctttcacatcaccaagattcctatcccagaaaagcagatgttcatagctctgggaatggaatgcgacccttgtggagagcctacaaacggacgcatggggggcgcctgtccatatggataagatagtgctataaacgccctcatcttgccacggctcttctaggcctctttagggttaaggcatactcccttctgagaatttctggtctaactggctgtctagcttcacgtcctgtttctatggattgtttgtaaccagcttttgctgcaactattactgctgattaatatcttgctaatcataggttatggaaagcctgtgtttctgttttaaggctgttagaaattactgatgcacatgctatattgtaaattcttatctctgtatactgtacttctgcatacagatgttatgttaaagaattacttcatccccatgtgaccatctcacctcataatcaaatgaccctaaatccctcactaacctacccccgccctcactaaacttaataataaatgctggtatatccagtgcattggcggcatcgcaggaccagaaggcggtcaccccccggacccagctttcactgtcttgtgtgtgtctattatttctcgacctgctgatccgcctgggaacaaataaaagagccccgttgcattgtgggcttctggccagatcccacaataccgtctctactaaaaaatacaaaaaattagctgggcatggtggtggacgcctgtaatcccagatactcaggaggctgaggcaggaaaatcacttgaacccgagaggcagagcttgcagtgagccgagattgtgccactgcactccagcctgggtgatagagcaagactctgtctcaaaaaaaaaaaaaaagagagagagaaagctacaggccaatatcacttatgaacttggatgcaaaaatgctcaaaatattaataaaccaaatccagcagtgtatagaaagaatcacagcatagtgactcacgcctgtaaccccagcactttgggaggccgaggtgggtggatcacgaggtcaggagatccaaacacggtgaaaccccgtctctactaaaaatacaaaaaattagctggccatggtgacgggtgcctgtagtcccagctactcgggaggctgaggcaggagaatcgcttgaatctgggaggtggcggttgcagtgagccgagatcgcaccactgcactccagcctgggtgacagagcaagactccatctcaaaaaacaaacaaacaaaaaggagtcacggcatgaccaagtagggtatgcaagaacggctcaatgttcaaaaatcaaccatgtaatctatcatattaacaagctaaaaaatcaactcctacaggaaggaacaacaaaacccatatccattcattataaacactctcagcaaacttagcaaagaggatatcctcaacttatagggcatctacaaacaccctacagctgtaccatttttctatcatctctgtaggggggggtggcagatggaaggcccaaactgtgttgaacttttcatcttcaaacaaatgtgtaaacttttttttttttttttcaagacagagccttgctctgtcacctaagctggagtgcagtggcacaatcacagctcactgcagccttgacctcctaggctcaagtgatcctcccgtctcagccttccaagtagctgggactgcagatacacaccactgggccgggctaatttttaaaaattttttatagagttgtggtctcaccatgttaacccggctggtcttgaactcctgggctctagcaagctggccacctcggcctcgcaaagtgctatgaatttcttaaactgagtatttttacatttgtatgtctctctctctctcttttttcttttgtgagacagggtctcgctgtgtcacccaggccggagtgcagtggcatgatcttggctcactgcaacctccgcctcccgggttcaagtgattctcatgcctcagcctggccacctcggccttgcaaagtgctacaaatttcttaaactgagtactttttcatttatatgtctctctctctctctctttttcttttgtgagacagggtctcgctgtgtcacccaggctggagtgcagtggcatgatcttggctcactgcaacctccgcctcccaggttcaagtgattctcatgcctcagcctcccaggcagctaggattacaggtgcccaccctgacacccggctaatttttgtatttttagtagggatggagctccaccatgttggccaggctggtcttgaactcctgacctcaagtgatccaccttcctcggcctccaaagtgctgggattacaggcataagccaccacacccggcctgtatgtctctcctgtcactcttgtatgttatatttttttaatattagcaacaatctgagtgctttaaaaaaaaaaacctacagctaacctcataattaagggtgcaagagtgagtaccttaccaccaagatcatgaacaaggcaaggacatctgtctacccgcccctgccccgtcatcagtagacacctactcatccccagctcagcgaagtctttcccagttgggtcaaatcccagactatgcactctccataggtcccatcagcaactgtgtgcttatttggggtgtgtatgtttaattactcccgctctcactcacatagctggggagggtgggctccgtctggttgtgctcaccacgtgcatgcacatggtagggtgcagtcaataccgagtgaatctcaggctcagaggcccccatcacatcagcctggctctgaagccccttgtgaccaagcccctgaggttccatgccaggtcctatcctggggcaaccctgggccaccttcctgccttggcttcttgctaaggacgttggttcctttacagaaatgagtcccagccccctgaatattcgtccccacagccagctgccctcttctcactggcagtcccttcgcacgatgcccatctacctactcccatcccggactatgcaggtcccccaaagaggtcccctgctgatctagcgagccccgtcgtccccagcctgtctctccctccagcttactgccttctgccaggcccttcccccagagcgtctaacccctgacccctggcacctgtgctgccaccaccagagtgcagactccccagaatctgcattcagaaagatgacaccctggaaagacgagaagtaaagctgaaaataaataagagatggaaacgtatagtgggataagtggtaagttctccacccaaaaaaataaagatcaaatagacagcatgggagaagacctgcaagttggatacaagaggaaaagggacaagcttgacaaaagacaaaaaaaaaaaaaagcaaatgcagtgctattttgcatttgaacacacacacatctgcagatgtgggccccctgcacctgtcccgcgtgtgggccttacaggtgactcaccacctgtgctcacaacagtcctgtgacctcagccacatccagaaacaatggtggccacagggcatggatccccagaggcactcatctccgtcagaggccagatcctatctctttctttctagatgtttgagcagggccatctcakaggcccttttgggggtggagggtaaaaggtgaatatgaaatatatccattttcagtggctatgacctggtctggggtttctggaagagcccaacagtctggacccctctctcctggcactcacccttgtctgcactgtggttgtgtccacacctgtcttgaccgacatgctgactaagcgcggtcctcactgggccggggtttgtttttttacgttttttttttgtttgttgttttttttttttttttgagacggagtcttgctctgtcaccaggctggagtgcagtggtgcaatctcggctcactgcaatctctgcctcccgggttcatgcgattttctgcctcagcctcccgagtagctgggactacaggcgcccgccaccacacctggctaatttttgtatttttagtagagatggagtttcactctgttggccaggctggtcttgaactcctgacctcaagtgatctgcccacctcggcctcccaaagtgctgggattacaggcgtgagccaccacgcccggcctggagcggggtcttgcctcctcctcctgctcctccacgggggcaccctgattacaacaggctctagcaggctctcagtgtctcttttcccacagcatcttgtggaaggggagctctgtgggagctggggctgttcaggacgaggaggatttctgttggtgcctcaaactcctgaagggctgtcacagaggagggggagcaggcttgacctctgcagcttcagaagacaacactcggacagcacagtcagcccagtgaatgaacagatacgctaatgagttaaggggccaaaaactgtagtaagatctctgttcccgagggcatccaagcacaaacaggcggattgcccgggagtcttccgggggagagtctcgcactgggagaccctcctggacttcttccggcataagcttctcggagtctatctgcctctcacgcactggactagactctaaaagccactgcctgacccttcacagattctcattaaatgaacctcaaagttcatgaggctgaaatgtggctgtactctgcatccacctctgcaacttctgtggattcttaattcatgttctttctttatattctttagagtcagggtctcaccctgttgcccagactagagtaaagtggtgtgatcatggctcactgcagcctcaacttcctgggttgtcccaaaaagctggggccatgggtgcacaccaccatacctggctcatttttaaaattattctgtagagacaggatctccctatgttgcccaggctgctcttgaactcctgggatcaggtgatcctcccaccatggccttccaaagtgtcaggattacaggcataagccattgtgcccagccttaattaatcaattaattttgaaatacagtcttgcgctgttgcccaggctggagaacagtgctgcaatctcggctcactgcagcctcgacctcccaggcacctcagtttcccaagtagctgggaccataggcgtgtgccaccatgcccagctaatttttgtattctgggtagagacagggtcttgccatgttgcccaggctggtctcgaactcctgggctcaaatgatttacccgcctctgcttctggcatgagccaccacgcctggcctcttaattcattttttcaatggcaagagtaatgaggtaaatcacagtaaaaagctcagtgtacagagggtggtgggcttccacatgaaaggagctgggatgattctcagaaaaaaggatgccctctgcctactgccaccttcactcagtgcttcctggacccacagagctcagcatgcctgatggaggcagagaagcccagcacccagaggactccaacctcctcccgccctgtggcctgtagtgcaccagcatcacgcacagctaatacgtgtctcaaaccagagaaaggcaatgaccccactacagaaatcacgaaaacgtgagcatcagagggcctgctgctgtctctccacggcccccgctgctgtctctccatggcccccaccgcattcctcacctgccctcccagtgtgttcagggtgtgagtgggacgagaacatgcagtcctgtaccagctttcaataccctctgaacggttataaccacacgattttacagcctatttttctacttttttttattttttttgagatggagtcttgttctgtcacccaggcgggactacagtggtgtgaccttggctcaccacagcctccacctcccaggttcaagggattctcatgcctcagcctcccaaatagctgggaccacaggcacgcaccatgcccggctaatttttggatttttagtagagaggggctttctccatgttggccaggctggtctckaactcctggcctcgagtgatccaagtgcctcagcctcccaaagtgctggaatgacaggcgtgagccactgcagcctatttttaaaactagatcctaagtacctgtgctgttcaagttttcaggaccacccctctcgaggatgtgtaacaatcaacagtttcttcagatgacagtgaatgaaaccacactaaaaaaaaaaaaaaaaaggttttctgaaggctaagaaagcagcaaagcagggctgcacgcagtggctctctcctgtaatcccagcactttgggaagccgaggcaggtggatcacaaagtcaagagatcgagaccagtctggccaacacggtgaaaccctgtctctactaaaaatacaaaaattagctgggtgtggtggtgtgtgcctgtagtcccagctactggggaggctgaggcaggagaatcgcttgaacccgggagtcgcagtttgcagtgagctgagatcgcaccactgcactccagcctggtgacggaacaagactccatctaaaaaaaaagaggcagggcgcagtggctcacgcctgtaatcccagaaccttgggaggccgaggcgggtggatcacctgaggtcaggagttcgagaccagcctgaccaataacggagaaaccckgtctctactaaaaatacaaaataagccgggcatggtggcacatgcctgtaatcccagctactcgggaggctgaggcaggagaatcgcttgaacctgggaggcggaggttgcagtgagccgagatggcgccactgcactccagcctgggccacaagagggaaactccctctcaaaaaaaaaaaagaaagaaaaagaaagtagcaaaggggaaaagttaacatgacaaacaacttgagagggaagttgccaattaagatgaagactaacgaggagagtgaagctgcaggggagtcagtcacatcgccracataggcagacgccagaggccagggatgctgccgccgtccacgaattctgtacctaagaactagataagggcgttactgagccaacctaagcacttctgcttatttttcagccaagaagcattacatatatacaaccaatgccagtgactacatcattttataaaacctatgacttttcatggataatttaataagatttcagtttaattacaaggaaaatattttaggattataactaagtattaataatatcttttagggccagctatggtggctcatgcctgtaatcccagcactttgggaggctgaggcgggagaactgcccaggagtttaagaccagcctgggcaacatagcaagaccctatctctataaaaaatgtttaaaaaggctgggcgcagtagctcatgcctgtaatcctggcactttgggaggctgaggtgggcagatcacttgagctcaggagtttgaggacagcctggccaacatggcaaaaccctgtctctactaaaaataaaaaaattagcctggcatggtggtgtacacttgyaatcccagtttcttgagaggctgagatggaaggaccatttgaacctggcaggtggaagttgcagtgagccaagatcgcgtcaccgcactctagcctgggcaacagagcgagactccgtctcaaaaaaaaaaaaaaaagtaaaaaaaaaaaccaaactaaaaaactagccaggcatggtagtgtgtgcctgtagtctcagctacttaggaggctgaggtgagaggattgcttgagcccaagagtttgaggctgcagtgagctatgatgttgccactgcatcccagcctgggcaacataccaagacccttctytacaaaaaaaatgtaaaaaaaaaaaaaaaaaaaaaagaattagcaggacatggtggtgtgcacttacagtcccagctactcaggaggctgaggcaagaggatcgcttgagcccaggagatggaggttgcagtgagctgtgatggcaccactgcactccagcctggggaacagagtgagactctgtctcaaaaaaaaaaattaacacagaattatcatataaaattaccatatgaggggccaggtgcagtgactcacgcctgtaatcccagctamtcaaggaggctgaggcagaattgcttgaacccaggaggcagaggttgcagtgagctgagattgtaccactgtattccagacttggtgacacagtgagactccgtcttaaaaaataataataaaataaaattgccatatgatacagcaattccacttctgtgtatacacccaaaataactgaaagcaaggttgttgttcttttcctgagacagggtctcactgtgttgtccaggctggggtgcagtggtgccatcaaacctcactgcagccttgaactcctgggctcaagcagcctcctgagtagctgagactataggtggttgccaccatgcccagctaattttttgtagagatggcatcttgctatgttgtcagggtggtcttgaattcctggcctcaagtgatccttccaccttggccccccaaagtgctgggatgacaggcatgagccactgcactcaacttagagcagggtcttgaagagatgcttgcacacccatgtccacactgatgtcagcatcattcacaatagccaaaaggtggaaggaacccaagtgttcgcgacagatgaacagacaagcaaactgtggtcaacccatgtagtagaatattactcagccttcaaaagaaaggaaattctgacacatgctacaacatggatgaaccctgaagacattatgctcagtgaaataagccagaaacaaaaggacaaatacttggccggtgtggcggctcacacctgtaatcccagcactttgggaagccgaggcgggcagatcacgaggtcaggagatcaagaccatcctggctaacacggtgaaaccccgtctctactaaaaatacaaaaaattagccgggcatgctgacgggcgcctgtagtctcagctactctggaggctgaggcaggagaatggcatgaacccgggaggcagagcttacagtgaggtgagatcgtgccactgcactccagcctgggcaacagagcgagactccatctcaaaaaaaaaaaaaaaaaaaaaaagacaaatatttcaagattctacttgtatgaggttcccagggcagttaaattcctagagacagaaagtagaatggtggttgtgggggcaggggagggggatgggagtttgtgttcaatggggacagagctttagttttacaagatgaacatagttctggggctggagggtggtgattgctgcagagtgatgtgaacgtgcttaacaccaccaaactgcatgcttaaaaatggttacaatggtaattttttttttttttttttgagacggagttttgctcttgttgcctaggcttgagtgcagttgcacaatctcagctcactgcaacctctgcttcccgggttcaagcgattctcctgcctcagcctcctaagtagctgggattacaggctcccaccaccatgcctggctaatttttgtatttttagtagagacggggcttcaccatgttggccaggctggtctcggactcctgacctcagggaatccacctgccttggcctctcaaagtgctgggattacaggcgtaagccactatgcccagccattttttttttttttttttttttggagacagggttccactctatcattcagacttgagtgcagtggcgtgatcttggctcactgcaacctccccactcaagtgatcctcccacctcagcctcctgagtagctgggttacaggtgtgcaccaccacgcctggctaatttttgtatttttagtagagatggggtttcaccatgttgaccaggatggtcttgaactcctgggctcaagtgatctacctgcctcggcctcccaaagtgatgggaatacaggcatgagccaccacgcccagccaagttttaattttaaaaggcggtttggacagccagacatggtggttcatgcctgtgatcccagcaatttgggaagccaaggcagggggattgcttgagccaaggggttcaagaccagcctggtccacacagtgagacctcatgtctacaaataatttttaaaattagctgggcatgatggcacacacctgtggtcccagttactctggaggctgaagtgggaaaatggcttgaacccaggaggtcaaggctgcagtaagctatgattgtgccgttgtactccagcctgggtgacagggtgagaccacatcccaaaaaacaaaacaacaacaacagcaacagaaacaacagcttggacatacaagaatgtctggcccagtgactgacacagctccggcctgaagcccacgtgacttttgctaccttctgggcaggagagaagcattcagggaagggtccgatagaaccgctgggctgagcactgcggtcatgatcccacctgcttccaaaacacatcatgggcaacactgaagccataaagtaatttttcattaaaaagaaataggacatgatttccaaatgcaaatctcccagtgtttcaacaaaaagccccctgtgatttgaagcagagcacgcagaggcatctcagatgaacagacgtataacccgcctgcggcacaccaaccgtgggctgctgcctccagcaagggaacccacagagcaaagtttcacctagaagcatcatccgccaggaaactgtagcggtggaggtgcttttccacggcggctgtgtcagatgccctcataaatggcactgaaaattattaggttaggtttaaacgcaaacactgtggttaggctgacagagttgtgtcttagctccgggtggggctgttaaatatttctttgctcacacacaacatgcagggcatgaagccaggggcagactctgcagccccagggagcaagtccatgccggctgcccacgcaaggccactggtccaaatactcatgctgactgtgggcaaaacactagagaaagaaaaggcagctrgcacagacagctatggccttagctcaytcgtgttcagctgtgtgtcaccgtgacgtgaccacagccatcctgctctggaagacactgccacatggccagatctatattaagccccccagaagcgcattttccacattgttacagcagaactgacatcgatcacacaaaaaggtcacgtaatacgtggctaattttatgtgtcaactggactgggccgtggggtacccagatatttggttaagcatactctgactgcgtctgtgagcatgtttctggaggagagtaacatccaaatgggtgaactgagatatcggatgccctcccagtatgagagggcctcagccagtccactgaaggcccaagtacaacagaaaagtggagtaaggccaggtgtggtggctcatgcctataatcacagcactttgggaggccaaggcaggcggatcagttgaggtcaggagttcgagactagcctggccaacatggtaaaaccctgtctctactaaaaatacaaaaattagtcaggcctggtggcacatgcctgtaattccagctacatgggaggttgaggcaggagaatagtttgaacctgggaggcggaggttgcagtgagctaagatcacaccactgtactccagcctgggcaacactgtgagactccatcacaaaaaaaaaaaaaaaaaaaagtcagacatggtggcgcacacctgtaacccagctactcaggaggctgaggcaggagaattgcttgaacccaggaagcagaggttgcagtgagctgagatcacgccactgcactctagcctggccaacagagcaagactctgcctcaaaaaaaaaaaaaaaaggtagagtaagagaatcaactctctctgcctgcctgtctttgagctgggacattggtcttcgyctttggactccgtctcagactggagtcataccattggctctccagggtctgaatttctcagcctccgtaattgtgtgagccaatttcttatcatcaatctctttgtatacacattgcaaaagaaaaataaaatctcaggaccccgaattcaccaagctaaagggaaagttaagcttaacaaccaagttacgcaaaagaaaagctgccttcttttctttcccagataaagtaatttacgtgcttatttatcgcaggtaaaatgcagatttactgtgcggagaaggcgtatgtgactctgccccactcccttcttttcacatgtaaaatgtagattcactgaatggtactaaaagcctcacaaaaatgtgaccactggcctcattgcctactccacctccttttcttcccctcttcccctcctgcctactttttcctctttaaatactgaagtttccaaaaccctctttagaaaaagcacacaggccacagatcctacaatgacttgtgtttctttcttaaccttggcaaaatacacctctaaatcgactgagatctgtttctgtttccatgcctgctaacacaacatccattctgcagcccatggatcaagcagtaattttgacttttaggtcttattattaaaggaatacattttgtaaggctaaagctgccatagtgattcctctgtaggatctgggcaaagtaaactgaaaacctggaaaggattcacyawtctaatgcctttaagaacattcgggattcacaggaagagatcaaaatagcaacattaatagaagtttgaagaggttggttccagtcctcatggatgactctgaggagttcaagactccggtgcaggaagtaacagcagatgtggtggaaacagcaagagaagtagaatcagaagtggagcctgaagatgtggccaaataattgcaatctcatgttcaaagctgaacagatgaagagttgcttcttacgaaggaacgaaagagcagtttcttgaggaggaatctactctgggtaaagatgctatgaacgctgctgagatgaccagaaaagatttagaatattccatagacttacatgataatgcagtggcaaggtttgagaagattgactacaattttaaaagatgttctactataagtaaaatgttatcaaacagcatcacgtgctacaggaaaaccttttgtaaaagtaagagtcaataaatgcagcacacttcattgttgtcttaagaaattgccagccaggcgcggtggctcacgcttgtaatcccagcactttgggaggctgaggtgcgcggatcacaaggtcaggagatcgagaccatcctggctaacacggtaaaaccccgtctctactaaaaatacaaaaaaaattagccaggcgtggtggcgggcgcctgtagtcccagctactcaggaggctgaggcaggagaatggcgtgaacccgggaggcggagcttgcagtgagccaagatcgtgccactgcactccagcctgggcgacagagcgactctgcctcaaaaaaaaaaaaaagaaaaaagaaaagaaattgccatagccactccagccttcagcaaccaccgccctgatcaatcagcagctatcaacatcaagacaagaccctccaccagcaaaaagattgccactcgctgaaggctcagataattgttagcattttttagcaatatttttaaattaacgtatgtacattgtttcttagacataatgctattgcacacttaatagactacagtatagtgtaaacataaaacttttttttttttttgaggcagagtttcgctgttgtcatccaggctggagtgcagtggcacaatctcggctcactgcaacctctactctggggttcaggtgatcctcctgccttagcctcctgagtagccaggattacaggcgcccaccaccacatctggctaattttttgtatttttagtagagatggggtttcatcatgttggccaggctggtcttgaactcctgacctcaggtgatccacccgccttggcctcccaaagtgcagggactgaggcgtgagccaccacacctggccaaatataacttttatatgcactgggaaacgcaaaaactttgttgactctctttattgcgatattcacttgattgtggtggtccagaactgaacctgcaacatctctgaagtatgcctgtagagataaatgagacagcacaaagtcccaaaagagatccacatgtatgtggctgttttcaaaaggtggcaaagtaattcaataaggaataacaatcttttcaacaaatggtgctgaaacaactggatatctgcatgaaaaagaatgaacctcaaccctacgcctcacacagaaattaactcacaatggatcatggccttacacataaacactaaaactaaaatattcagaggaaaacaggaaaaaatctccatgacttgggagaaggcaaagatttgttgggataccaaaagcacaaatatgagagaaaaatgtggtaaattggactttatcaaaatttaaaacttaggattctcaaattttaccattaaagaaagtaaaggctgggcacggtggctcacacctgtaatcccagcactttgggaggccgagaagggtggatcacctgaggtaaggagttcaagaccagcctgtccaacatggcgaaaccccatctccactaaaattacaaaaaattagccgggcatgggggcaagtgcctgtaattccagctactcaggaggctgaggcaagagaatcgcttgaacccaagaggtggaggttgcagtgagccaagatcacaccattgcgctccagcctgggtgacaagaccaaaactctgtctcagagaaaaaaaaagaaaaagaaaaataaaaaaagaaagtaaaagacaggccataggccgggagaaaatattctcaatatgtatatctaacaaagtgcctatatccagaatatataaagagctcttacaacggaaaataaacccaattaaaaaataagcaaaaaatttgaacagacgtttcacaaaagaagagatacaaatagtcagaaagcacataggaaagtgctcatcatcattagtcatcaaagaaatgcaaattaaaatgagataactggccgggcgtggtggctcatgcccgtaatcccagcactttgggaggccgaggtgggtggatcacctgaggtcagaagttcaagaccagcctggccaacatggtgaaaccccatctctactaaaaatacaaaaattagctgggtgtggtggtgggtgcctgtgatcccagctactcgggaggctgaggcaggagaatcacttgaacccaggaggcagaggttgcagtgagccaagatcacgccactgcactccagcctgggcgacagagggagactctgtctcaaaaaaaaaaaaaaaaaaaaaaagctaaaacctgaaaacaaccccaatgtacatcagcaagtgagtgtaaaaagggtgaagtgctgattcatgggtgaacgccacaggtcgcacactgaaaaaggagccagacgtaaaagactgcatgttctgtggttccatttatatgacatttaaaagaggccaaaatcgtgatgaaaatcatagactgcagaggagcacgcagaaactcggggcgatggaaatgctctactgtttgattgcagaggcaggtacaaggtgaatatgtttggccacgttcctcaaactgcatacttaaaatgggtacgttttattgcatgtaaatcatactcaatacatttgatttaaagttaaaaagaaaatgtttgtggttttatgaagctgatctccagaggctaacacttctctctctaatatgaatgcaatggcccagctctcaccaatttccacagtacagaagaaaacaccagtgcagagttccgcacagacacggagggactgggaggaagagggaagggatactgagaccaagtccggcctctgctgagtggcctgggccaagtcattttatgtctgactttcagtccatctacaaaagaagaacaaactaggcctttctgctaaccagagctaccgagagcacaaaaatgagaaaacacagctaagtggttgataaaatagtaaagcactttctttagamtctgccccggccttacttatctctctgtcttcatcargctcaaatatttgttacacaaatatgtgttatttttattattactcatgctttctaccaagagccagttatcaagtcaaaaaaaaaaaaactgtctatttgcaaattgattttaaaataacaataccaatagctaacatgttgttaaaagtgatgttctaagggctttgcacatattactttgtttaatcctcacatgaactgggatgaaactgggaaaagtagctacagacttgcacaagtctacatagctagcagtgtttagagctggcctcagaactcaggctgttgttggagagccccccttccttgccactctgctctgctggcctctacagtatatgtttaggcagaattggtaggtttcactagacagtcaaatttctatttcctttactgctgagggaagtagcttcttcgtgtccaaataaccaagctcttgagcactaaatcaagtgacatgaccttcaataagaagcgcaagaatgtttcaagtttatttatttatgctactgacacaaagaccagaaactacctacttcttttccagctttacagacactatataaggcaaataattcactgcagttcccatcgctgtagtcaacaaaaatgtggaaagtttctgttcctggtgtcaatatttgctctctgcatgtcctgggctgcctggaacttacacacagtggtactacattaaaacctccatcgtgagacacattttcacgcggtacctccaggactatggtttatttgcttatacaattacttcatttgtgttcagttaactatatctgacagtatatccaaataaaaatatgtaattaacggtcacattgatgagaatggaatgttgatttatatcccaggagacctgaatgaaaactgagcccaaacttagcctttgaagtaaagtaacttccctgcagagccggtcctagagcacagaggctatcagctcaccctgttctcttccttcccgtctctaagccctctgttggcccttcccaggtagacaggaaatccacgcacgtataccagtccaatattcccaaactgggtttcaagttcttagaagacagggatcatatctcatgtaccttctgtattcctcataaggctcaaatatttgttgcataggtatttgactctagaatccaaacrataactcacttgactcaactgacttaagagttaaatcaattcgtggctgggcacagtggctcacgcctgtaatcccagcactttgggaagccaagctgggtggatcacctgaggtcaggagaccagcctggccaacatggcaaaaccctgtctctactaaatacaaaaagtagctgggtgtggtggctggcacctatcatcccagctacttgagaggctgaggcagagacaattgcttgaacccaggaggtggaggttgcagtgagtcaagattgccccactgcactccagcctggccaacagtgagactccgtctcaaaaaaaaaaaaaaaaaagagttaagttaactcaaagaaattatttcagaagaaaatgataataaatctcactatgatcagtttaagaacctgcttggggctttacatgcaaaatatatccaggctcagccaggtgcagtggctgatgcctgtaatcccaacactttaggtggccaaggcaggataatattttgagaccaggagttcaagatcagcttgcgcaacataccaagaagccatctgtacaaaaatttaaaaattagccaggtatggtagtatacacctgtagtcccagctactcaggaggctgaggtgggaggatctcttaagcccaggaggctgaggctgcwgtgaactatgatcacaccactgtactccagccctccagcctggatgacagagtgagatctcatctcaaaatttaaaaataaataaataaataatttaaaaaagtaaatagttatccaggctctaacttgtcaagtcccctctgccctacctacaccccaccctgccccaatcaccatcagctctcacctgcgttattgcaacaggctccaaaccagtctccctgcttctgctctcaggcccacacaatccattttcaaccccaaagccacggttattctattaaaagttggatcagtggcttcctatctcgagtccttctgatggcccgtgaccaggactccactgatctcctcttctatcacagtccccctcggcgaccctctccagcctcaacagtctccttgccgttcatccaccgcacccagcaggctcctgctgctgggcctctgcaccaccatccctcagctggggaatcccagggcagtcccacgcttccttcagatctctgcttgacgctcacctcctcagcaagccttccctaaccaccctgagaaagtagatcccagtctctaccctgcactccccataccctggttttcttcatagcagcatttatcccatccctacctcaaatcttttatttattatttttagagtagtgtctcactgtgtcacccaggctggagtgcagtggtgcaatcgcagaatccctgaactgctgggctcaagccatcctcctgcctcagcctcccaaaatgtcaggattacaggcgtgagccaccatgcctggcctcaaatagctcatatacaccrgttaatccactcactgtcttcctgcactgacttaaaagggaggtcctcgtcctgcctcacagcgggtattctcaaggcttacagtagcatctggcactcagtacttgctcaagaaagaggtgatgttctaacaaaaaccagacaaactctgattgcctaatttctgaaacttggggacaggtgaaggatgatgtataatactgctctctctactggtcggtatgttttaaaacccccttrgaaaacracgaaagaaagcgctcggccgggcgtggcggctcaggcctgtaatcataattgcttgaactcaggaaacagaggctgcaatgagatcatatcactgcactccagcctgagtgacagagtgagactctgcctgaaaggaaaaaaaaaaaaagtgctcagaatctctgataaatgaccacaacgacgagacagcatacagagaacaatgacaataaccaagaggaaatcagagcaaggaaaccctccctgttaacagggcctgtgcacagaggcaggcgagggccgccattccatcagagcagaaagcccatctgagactgttcccatttgggtcaattcaatgccacacatacatatccatgaaagagtgaaatcattccgtgaggtgaagtttattaagaaactcaacagtctctgtccctgcttccctttctcacctccgcccttctccatgattctttttttttttttttctttgagacaggatcttgctctgtcacccaggctagagtggagtgtgatggctcgatctcagctcactaaaatctccacctcctgggctcaagtgaagtgatcctcccacctcagcctcccaaggagctgagacagacacaggccaccatgtctggctaatttttgtattttcagtagagacagggtttcgccatgttgcccaggctggtcttgaactcctggactcaagcaatcctcctgcctcggcctcctgaagtgctgggattacaggtgcgaaccaccacgccctacccgctccataattctttttagctaattcttttaatgtctgccttcagagtgaaccttggttgttcagcttggggcattagcgactgacttcccaaggcgacaggcgaaaatgcagcgctctcctccccacaccttctctgcccaggtgcatcataatttcaattagagcagcagtcagtgtttacataaattactatcattgcggcgaggctatccacagctgcgccttgtagtacaccataattatttttcgtttcccgcacgatggtttattttccctggaactaataacagccttgtgttttcatttgctttgtttagtacttatcactaatcccgccccaactctgccaactgtatcaactcctctccagatgctgcagcatgtcaggtgtcctgctaatttcatcttctcccaaagaatctcctcttggagcctctgaccagctggggtcaggacatgtctgctcttcacrccagcacctggctgggatttcccttcagcaggttcttctcacctctcacctgggggaaatcctgttcccaccagccagtctctctcagtctagacttactgcctcatctggggagactacatctgccaatcacctccttaaagcatgaggaacaaatctgggagcaagtctgaagktgtctttaccctaccctcccttgcctgagtgtagacttccaggctgcaaatgcatccttcagaatttctcaagcaaggccctcccgtctcctgccacccagtgctgctttgaaaaagcccaagcccttctgcttcttttcattttaattgtagttagttcttctgcctttttccacatgttctaaccttctgcctcttgacctgtgatgacctatttgtgatttgtttttactttctcctcttgttctgagatttcacaacagtatgtcctggagagggtacgcaaggatctttttttttttttttttttttttgagacggagtctcacccttgttgcccgggctggagtgcaatggcatgatctccacttaccgttacctccgcctcccaggttcaagcaattctcctgtctcagcctcctgggcagctgggattacaggcacctgccaccatacctggctaatttttgtattagccagggtttcactatgttggccaggctggtctcaaactcctggcctcaagtgatccgtccacctcggccacccaaagtgctgggattacaggcgtgagccacagcgcctggcctctgaactctcactatccaaattctggggtcaacagctgcagacatgctttcaaataaatccttcccctcccaagctctcactagtctttatctgaaactcagcctctctcactatccaagtttgctgcccagacttttaattttttaaattttatttttgagacggagtctcattctattgcccaggctggagtgcagtggcacgatctgggctcacagcaacccccgcctcctgggttcaagcaattctcctgcctcagcctcctgagtatgggattacaggcacccaccaccatgcttggctaatttttgtatttttagtagagatggggtttcatcatgatggccaggctggtctcgaactcctgacctcagtgattcacctacctcctaaattgctgggattacaggcatgagccaccacacccagccttcccaagcttttaatatccaagctgagaagtgaagaggctatgaaagtgaaggatacctgcattttcacccgtggtactggccactgggtgagcctctttaacccagaaagtttgggttctaggaaattattttgtgaatttcatcctgttttccctatttttttcttctggaaactttttaaaatgtattttattttattttttagagatggggtcttgctctgtcacccaggctggatggcagtggcatgatcacagctcactgcagcctcaaactcctgggctcaagtgatcctcccacctcagcctcccaagtagctgggactacaggtgcacaccaccacacctggctaatttttaaattttgttgtagagatgggggtcttgctatgttgcccaggctggtcttgaactcctggcctcaaacgatcctctcacctcagctttgaagctsttactattcagctgctgacttcctgatctgatcctttccgtttcttttttctctcatttgccacctcgttgcttttctgttctactttctgagggagttcctcaactttatctttcacccactaactgattttcttatttctgcttttattttwtttttttacatccgagagttctctttttggatattcgaatactccttttggtggcttttttttagagcttcctgttcttgcctcatgttcgcgatattttcgctcacctccgcgtggacattaatgacagcctgctttctaaggctccttcctgcacgctctctggtttcccagtgtgtattctggtctcaatctcctgtagcagaggttttcttcagatgcccttggttatctgctcatatttaagggatggggatttttaaagcttgatgccttgaacactgggagggggttattaatgacgggcttcgttagcaagggatccagctgggtctgctgactggggacctcctgatgtcattaattttaggtcttttctcttgggctactcagattccccaaagacacatccatcctcctgtctacagggaaaagccccagctggtcatgttctgggagccaaagggtccctgttcgcttcctcctcctgtgccctgttcagcactgcgcccccaccccatactcaaccgcgcccccaccccgtactcaactgtgcccccaccccatactcaactgtgcccccaccccgtactcaactgtgcccccaccccatactcaactgtgcccccaccccgtactcaactgtacctgtctcccattcttctctgaaatatctttaaagtttctaaacagttacagaaaccaccaccttaacagcaggaagtaataagttggagagtcaattatctccaggcacatctgtgggccagggctggagaaccacagtcccgcctgcagccacagacccactaagcaagtgtgaaactaacagctactctccgaaaagaaagacaacttaagaatcgaaactcaagatgtacggtttttttaaatgacaaacaagccgcatgtgtttcagtatcatcaataacccgtcttttcccactgatggctccttcagcccctgacccacactagaagagaatcacctgccagcctcaatgactgtgcgtagtcaaggaactgcacgcccaaggtcagccaaccaacgggcctctcttcagctctggatcccttcccactggggttcctggggattccctccttgtacaggctgtctcttctccaccaggtcacatctcctccaggatggccaccaataccgccaactctgcaggtctaaaacccacgtgtgtttgtgtggcccttcctctcccacctggccgcagcgctcctcatcgcaggtgagaagtcccggctgccctcgctgttacaggtcgccacatctcacaaagcgccaccgcccagtggatttggcaacatctttcagctccatgcccgcccccactctctcactgccccagacccacgccccacaaggctactcaactcagctccactgcccagaggcaaaacccacctcccatattctcaccacgaccacttttctgaaacacatctaatcgcgtcgcacccaaaccaccaccaaagggataaaagtttaaactccctcacacagcattcaggcccctgcacaatcagaaacccatctttccagtcttttttttactctgttgcccaggctggagtgcagaggcccagtgtcggctcactgcaacttccgcctccaggttcaagctattctcttgactcatcctcctaagtagctgggacttcaggtgtgcaccaccacgcccagctaaattttgtatttttagtagagatggggtttcaccatgttggccaggctggtctcggactcctgacctcaggtgatccgcccgcctctgcctcccaaagtgctgggattacagtcacgagccacctcgcccggccttccagtcttagcttccaacccaatcctcaaaccccacttcatcaagaacacggcgacccaccatctcccccaaacatcactttcacttccacatctctgcatgccctttgcctccaaacgccccaattcataggtcctctccactgtggaaaatgtcggaaaatgtcgccacattctgttaacgcctgcaccacagtctcaactccacacagttgtagccaggctggccgtgagctcccagggcaaggcccacgctattaccggcatctaccccagcttagcatcttgcactcgattggaggtttgataataaagctggagtcagctgagtgacagcagacagttactgctggccccaaagcgtcagcccaaagtcccataaactcctttgcagggaaatcaaacatctatgccattccaggcaggtgctctttcagatctcaagcgttgcaccttcgtgtagcaatctcctcattacccctgttttctctccatcctcactcagacaccagccctgactcccaacaccagatgctcacggtgaggggctaacccgggtccccgcgtgggggtaagtgggggacccgctgagctgtccccaaccacccacagccgggaacagcaccgtagggcctggtgtcctggaagatgtactgcgtccagcaccgcgcctgcaactcacattcctattcaccccggggcttccgagtccccacagccccgcttatgaactaaataatttaataatgctggaaacactatggcttgttgtgctgcctgccagacggagcctctgcccgagccaaggctttgccggcggtgtctcggtggccgggagcccgcagaggaggtctaagtcccactgttcccggactaaatgcacggtttcctctcccagaggggcagggctgcggcttctggagtgagaggtcatttaagggataccctgagcgacctgccggtgctgmtggcgtctgcaggctccagggctgcggtcggcggggccggggagccccgttcaggtgacagcaggcacacgggggccctcgggagctggggatcctggaactccaagcccgggaattggtcctacccctgccgggcggcagaggctgatgccgggcagggggactcctgggggccggcggggccgctgcagcctctgctgtcgctgaatcagaaccacagatttctcgtccagaccccgaggagccgcagaacgcgctgatcagggccccagggctgggtccccctggccgaggacgacgagcggggctcagagagggcgcgcgcagggccaaggtcacactgcgcgccggcgcgggaactcgaacccaggcccaagccgcgcccgccaggccaggttaaggagagccgacccgcgcccctcagcgcggcccgggacccccgcccgggccctgggagcccagcactggccgagagagagggagaccgcgccccgagcccgccgcccgccgcgcccctcacctcgcgaccctcacctcgcgcccctcacctcgcgcccgcagccgccgccgccgccccgcgactagcggaccccccagaggcagccctcgccggccccgcccccggcgcaggagcccctcctaccggtcgtcttctcgcgagacgtcgcggccgccggaggggccacggaggccgaggggcgcccgccctcagcgcgcctgcgcccggccagcccgcccgcccccgccctcgcgagccagtgccatgtggcgccgtatttacggccagagatcgactccgcccaccggccgccacgagccacgcccctttctcagcagccaatccgcggcgttgactccgccccggcggaccgggcgcgcggcggctcggggacgcgcagctgtctcgccgttcgacccgggagctccacgttgcagccaaacacgatcccgttaaccaacctttatgcagtgcctgttgtctatccgaccctttctcgagcatcggctcattggcaaaggatcgtgatgctcaccggctggggcttgagactcgctgtgtgaccttgggcaagtgacttaacctctctgaggttgtcgccaatccgtaaaatataataggttagtgaccctacctttcagggagtatgtgagacaaacgagatgacacgggtaaagagcttagcaagatgcctaatgcatagtgagcatgcagtaattgttcttggcatcaatgtagttttgtgtgtttgtttgtttatttttttagagacaggatctcaccgtgtcgtccaggatggggtgcagcggtgcagtcacagctcactgcagcctcgacctcctgggttcaagccatcctcccacctcagcctcccaagtagatggaactacagacaggtgccaccacacccggctaatttttaatttttaatagaaacgggggtctcactatgttgcccagggtggtcttgaacccctagactcaagcaatcctcctgcctcagcctcccaragctctgggattacaggcgtgagccaccgcgccaggcccagtcattttttttttwaattatggtaaaatatatagaacataaaatttaccatcttaacctttgttgttgttgttgttgttgttgttgtcgttgttgttgttgttgagacagagtctcgctctgtcgcccaggctggaatacagtggcccgatctcggctcactgcaagctccgcctcccgggttcacgccattctcctgcctcagcctcccgggtagctgggacttacaggcgcccgccaccacgcccggctaattttttgtatttttagtagagacggggtttcaccgtgttagccaggatggtctcgaactcctgacctcgtgatccgcccgcctcggcctcccaaagtgctgggattacaggcgtgagccgccgcgcccggcccatcttaaccatttttaagcactccctgcagtggcattaagcactttcacatccccaccatccaccccaagaactttttcaatccgtgatatttttagttggccccctccgatggactcccgaggcagccttccaaccaaggtcatctcttcactcttccactccctgcagccagtcccaaaggagttccgaacccaccgggccctggaaatgtggaagtgagggagacgggcaaggcccctgccctcctgtattctagtgggggggaaaagcaacaaacaaccaccacaaaatatatgtgtatattatatacacactcacagtagataatatgtttatacgtatgtgtaatgcatacatgttacctatgtgtatgtatgtagtatatatgtttatatattgtacacatacatatagacctgtattatgcatgtataatatgtctatgttgtatacatacatatatgcaattgcacgtatgtaaataaggtgacagcctctggcaatgtcaccctgtgatgcctgtctcagcttagaaatttctcactatcagccgtgtgcagtggctcacacctgtaatcccagcactgtgggaggccgaagtgggtggatcacttgaggtcaggagttcaagaccagcctggccaacgtggtgaaacctgtctctactaaaaataaaaatacaaaaattagccaggcttggtggcgggcgcctgcaatcccagccactcaggaggctgaggtgggagaatcgcttaagcctgagaggtcagctgggcttgttggctcacgcctgtgatcccagtgctttgggaggygtaggcgggcagatcacgagatcaggaattcgagaccagcctggccaacacatgatgaaaccctgtctctactaaaaatacaaaaaattagccgggtgtggtggcaggcacctgtaatcccagttaggaggctgaggcaggagaatcgcttgaacgcaggggytggaggttgcagtgagccgagaccgcgccagtgaactstagcctgggcaacaaagtgagactccgtctcagacaaacaaacaaaaaacctgagaggtggaggctggaagcggagatcatgccactgcaccccagcctgggtgacagagtsagactctgtctcaaaaataataaataaataaataaataartaaaatggttacttttgtgttatgtcaacttcacctcttacatcagcaacattttgaatacactaaagacccctgaattgttcattttaaaatggttactttctgcccggagcggtggctcacgcctgtagtcccagcactttgggaggccgaggcgggctgatcacgaggtcaggagatggagaccatcctggctaacgcagagaaaccccatctctactaaaaatacaaaaaattagctgggcatagtggcaggcgcctgtagtcccagctactcaggaggctgaggcaggagaatccgtgaacctgggagggagagcttgcagtgagcccagatcgtgtcactgcactccagcctgggcgacagagcgagactccgtctcaaaaaaataataataaaaaaataaaaataaataaaatggttacttttatgttatgttaatttcacctcttacgtcagcagcattgcgaatgcactaaatgctcctgaattgttcactttcaaatggttacttttactttatggcaacttcgcctcttacatcagcaacatgcagatacattttacttacccactctgcagtggctataccttatctcctggtttacagataaggaagcaggggaccagagaaggtaaccaactagccagagacacagagctgtgtaagtgacagagccaggacctgaatccaaattgtggaccccaaagatggagccacgctacagccttgagacttcctgggccagggcctcagctcggccctggagacacctcactgtgatgatttttatctcctcctcttctaggctccaggctccttcwggctggctgcccatccccctccccagcagctccattggctgccacccatcttcagggaccctgggcccctctgcaaagtctgtggtctccccggagctgaccacagcctggcccaacctctgggttttactttgaggtatttcagtgtctctaccagcaacaactatttctggtttcatagccagggttgcaacaaaggaaaagcggtaactgtggcttctgggcaagaggccagccaggaaacattagctgctactgatagtaacagctatggaattccgggaggtttttttgtttttggtttgtttktttttttttctttttctttttttctttttttagagacaaggtcttgctctgtcacccaagctggagtgtgcaatggtgccatcatggcttactatagcctcagcctcctgggctcaactycctgagtagctgggactacaggtgcacaccaccatgccttgctaatttctttagtttttttgtagagatggaggtctcgctacgttggccacgctgctgcggggagatcctgatgacctctggccctgggatccatataagcatcattaacaggatatgaaaacaaaacaaaacaaggtctgtgaattgaaaattcaattaaccatgtagatgatatgaaaatccaagaggggccaggcacagtggctcacacctataatcctagaactttgggaggctgaggcgggcagatcacctgaggtcaggagttgaagaccagcctggccaacatggtgaaaccccatctctactaaaaatacaaaaattagccaggtgtggtggcaggcatctgtaatcccagctacttgggaggctgaggcaggagaatcacttgcacccggaaggtgaaggttgcagtgagccgagatcatgccactgcactccagcctgrgcaacagagtgagactctgtctcaaaaaaagaaaagaaaagcaaatccaagagggccaggcacgrtggctcacacctatgatcccagctctttgggaggccaaggcaggaggatcatttgcactcaggagttccagaccagcctgggtaacaaggtgaggccctgtctgtacaaaaacaataaaataaaataataaaataaatccaagagaatggactgaggagccctcctaattcactgtgagctcactcctccccaccccatccctgtctttctttcttttttttttttttttttttttgagacggagtctcactctggcacccaggctggagagcagtggcaccatctcggctcactgcaagctccacctcccaggttaacaccattctcctgcctcagcctcccgagtagctgagactacaggcgcccgccaccacacccagctaakttttttgtttttttagtagagatagggtttcaccatgttagccaagatggtcttgatctcctgatctcatgatccacccgccttggcctcccaaagtgctgggattacaggcacgagccaccgtgccaggccccctgtctttcttcactgcattcttttgggcagtgtcaggtaagagggaggtggtaggaacccagggctgggtgctgaggctgttactcagccactgcatgaccttggacttccatttctttctctgcataatgcttgaaataattgcccctctcactgccatggccatgcatggaacagagatgtgcaaactgctagcacctaccaggtttgcacccagagaggggctgcaggtgccgctgtggccccaatggaggtgatggtgacttaggtttatgcagtggtacaggaagaggaccaagctgatagatagtggggagacggcagctagaatggatagggcaggtgtggggatcagctgaaggaggaagggagaggagttggggtgataccccgattgctgggcagccagtggagtggatggtggtaccacatgagagataggagaccacagaggagaacggttttggggagcaaactttgtgaacttggtgttgtatgtgctgagtagagacacccacaggacatcacacttgtcaggagaccactggatgtttgtgtcttgaacccagaggagactgggagtggtggctcacgcctgtaatcctaacactttgggaggctgaggcaggcagatcacctgaggtcaggagttcgagaccagcctggacaacatagtgaaaccccgtctgtactacaaatacaaaaaattagctgggcatggtggcaagtgcctgtaatcccagctactcaggaggctgaggcaggaaaattgcttgaacctgagaggcagaggttgcagtgagccaagattgcaccattgcactccagcctgggcaacagtgtgagactccatctcaaaaaaaaaaaaataataataataaataggccaggtgcagtggttcacacctgtaatcccagcaatttgggaggccaaggcgggcggatcacaaggtcccgagatcgagaccatcctggttaacacggtgaaaccccatctctactaaaagtacaaaaaagtagccgggtgtggtggcggacgcctgtaatcccagctatggggaggctgaggcaggagaatggcgtgaacccaggaggcagagcttgcagtgagccgagattgcgccactgcactccagtgtgggcgacagagcgaaaaaaaattatatatattagctggacatgttagtgcatgcctgtaatcccagctactcagaagactgaggtggaaggatcccatgagtccaagagttggaggctgcagtgagctctatgactgcaccactgcactccagcctggactacagggagagaccatgtttcttaaaaaaaaaaaaaamamamaaaaaaaaacaaaacaacagtgcagtggctcatgcctgtaatcccagcactttgggaggccgaggtgggtggatcacctgaggtcaggagtttgagaccagcctggccaacatggtaaaaccctatctataccaaaaatacaaaaattagctgggcgtggtggcgcacgcctgtaattccagctactctggaggctgaggcaagagaatagcttgaagccaggaagcagaggtcacagtgagctgagatcatgccattgcactccagcctgggtgacaagagtgaaactctgtctcaaaaaaaaaaaaaaaaaaaaaaaaaaagccagatgtggtggtgcatgcctgtagacccagctacttgggaggctgaggtgagagattgcttgagcccaagagttcaaggctggggtgagctatgaccatgccactgccctccagcctgggcgatagagtgagaccttatctctacaaaaataaaaatgaaaaaatgagccagatgtggtagcacacctgtagccccagccactcaggaggctgatgtgggaggattgctcgagcccaggaggtcaaggatgtagtgagccataattgcactactgcactccagcccgggtgacagaatgagaccctgtctcaacaacaacaaacaacaaccaaagactgaaagcctcccgcctcagcctcccatgggattacaggtgtgagccacactcccagccatcactcctattttagggatgaggttacatccctgcagaagcccagagcagaaaggaccttctcccgcaggacggatagggttacggtcagttggagtttgcggggtcttccaggcacgggcaggggacagaaagggatggygtagacaaaggcatcagcacagcagagctgggaaacatgaaggcagctggcagagtgccctgagcatctctgaaaggtcctgtgatctgcctggctctgcaaggagcggtgggacgggaacctgggaggagaccggggaaggtgaggcagcatgagaggggccacacatcctgatttttcggaagctgtgagctggtgtttgagccagaacattggatccctctctgggcctcagctttgccatccgtgacaaggggagggtggctgagacttctgcgtgctcgcccaatacccattctcctatccttcctcattaacagaaccctggttgtattgatagtcgcaacagaggatgcttttttttgttttgttttgtttgtttgttttttgcgacagagtctcgctgtgtggccaggctggagtgcagtggcacaatctcggctcactgcaacctccgcctccagggttcaagtgattctcctgcctcagcctcccgagtagctgggattacaggcacccacccccacgcccagataatttttatatttttagtagagatggggtttcaccatgttggccgggctggtctcaaacctcgaactcctgacctcaagtgatcctcctgccttagcctcccaaagtgctggggttacaggcgtgagccactataccagccaacatgaacctcttgaagtcatctcccatcccatctatcatctatgtatctatctatccatccatccatctatcaatctgtcgatccagccatctatccatctatgtatctatctatctatccatcaatctgtcgatctagccagctattgatctatgtatctatctatccatctatcaacctgtcgatctagccagctatcgatctatgtatatctatctatccatctatccatctatcaacctgtcgatctagccatctatcgatctatccatccatccatccatcctattggttctgtttccctggagaatgctgaccaatgcagagggcaagacagagaaacccagaggagcctgggtccctgacgaccttggggaggacattacgcagctccacccccagacttgttgctgcatgagagaaaaataagccctatcttatttaagccactgtcgtggggattttctgttattggcaaccaaactcagcccctaaggggaggccacgtgtcccgcagtccaggccccccaaatcacacctacaatggttactttatcccaggactgtctggactattatggagttaatttttttctttacagaaactcattttttggccaggtatggtggctcatacctgtaatctcagcactttgggcggccgaggcaggtggatcacttggggtcaggagttcaagacccacctggacaacatggtgaaactccgtctctaccaaaaatacaaaaaattagccaggcgtggtggtgagtgcctgtaatcccagctactctggaggctgaggcaggagaatcgcttgaacctgagaggtagaggctgcagtgagccaagattgcactccagcctgggcaacagaaggagactcttgtcttaaaaaaaaaaaaaaaaaaaaatcaaaaaagggtagcggactgctgaaggctggtttgcgtcgacatggcggttaccgtgagtctcttgctgggygggtgtgtttgcgctgctgtccctcgctgcaggttggcgccctgtgggatagcgggcccaggccctatcggctgggagcaggaccccgattcctgccggaggaatgggagctgcagaaggtggagaggtaccggcttctccccaggcctcagcttgaagcagagccttgagtcccggtgccccagaccgcacccccttggcgcccggcatcctgccactgttactccttcttacccattgttaggggcacagtgtcaggtgttcagatcccctgagaccactgctcccttcactagtgacgtacttcatcatcggtttagagagttcggcatgcttagggcagttattgttctaggtgttagctttctgggtgtatagagcagctctaagctggcaacatggccaggttgcccttgccatcaaagagaagagggcttggccgggcgcggtggctcacacctggaatcccagcactttgggaggccgaggcaggcagatcacgaggtcaggagattgagaccatcctggctaacaagataaaaccccatctctactaaaaaaaaatacaaaaaattagccaggcgtggtggcgggtgcctatagtcccagctactcgggaggctgaggcaggagaatggcgtgaacccgggaggcggagcctgcagtgagctgagatcacaccactgcactccagcctgggtgacagagcgagactccatctaaaaaaaaaaaaagaagaagaaaatgatagagtcactcacaggacaaatacaccaaggagatggaagggaakaaataaagaagtccaggacccggaggagagctttgtgcctgctgctgcacccctaggtcatcagagagagctgcagaagtactccagtgattctgagagcaccagaagaaccggcgatgctgcgttgccaagtgagcagaagctggaggagttgaaggcagaggagccaggtcacttcagcagcaaagtagtgcagaggggccgagagttctttgacagcagcgggaacttcccgtgcagaatctgagtcggggcttggcacgtggagatgcctcgtgaaacacagctgggcaagtattaatatatatggagcggcctggatttctgcgtatagataagcccccttggaatagaaataagtgatgagcctggactgtgggaggaaagagctgcgtggatagattcaaacttcctgcaaaagtgctcccagtctgagctctgtagatcttcagcactcacttcttcttgcatgggctctctgtatgttgaaaaccagcctgtgttgcatgtgttgttacaattctctgtgatatttgcaatatatgttgtttttttgttttgttttgttttttgagacagagtctctctctgttgccaggctggagtgcagtggcacaatcccagctcactgcaacctctgactccccagttcaagtgattctcctgcctcagcctcccgagtagctaggattacaggcatacaccaccatgtccagctaattttttgtatttttagtagagccagggtttcaccatgttagccaggacagtctcgatctcctgacctcgtgatctgcmcgtctcggcctcccaaagtkytgggattacaggcgtgagccacagtgccgggccgatacttgcaatatatgtttgagaggaagtgaaaagtttgccttctgacctcatttccttcttgatcagtgaacactaasagttttgggacaacttagtcgattggttttccttacaagcaaaataaaggaaaatgtagcagtcaaaataaataaataaataaataaacaggaaaaaaagaagaaactcattttttaagtttagcctcatttaaattattgatgaacttcagtgtctgatggcttcattatatctttttaatacacattacaatgaatgtatagtctttaaaattaaaaagattttaaaaggtttgtccattaactttttttttttttttttttggagagagggtcttgctctgtcaccctggctggagtgcagtgatgcaatctcagcgcactgcaacctccacctcccgggctcaagtgatcctcccacctcagcctcctgagtagctggactatgcctggctaatttttaaatttttggtagagacaggcgttttaccatgttacccaggctggtctcaaactcctggcctcaaaccatcttcctgctttggcctcccaaagtgctgggatcacaggcgtgagccaccgcgcccagcccccgttttcttagtctataggtggagaaaacagttcacctccccgccacgtggcrtaagtgtgtttttgttctgtgttgagacagggtcttgctctgttaccgaggctggagtgcagtggcaygatcaggccttgtattcctgggctcaagagatcctcccatctcagcttcccaagtagctgggacttacaggcatgtgccacaatgcccagctaattaaaaaaaatctttctttgtacagatgaaatctctctatgtcatctgggctgatctcaaactcctgggctcaggtgatcctcctgccttggcctcggaatgtgtggggactacaggcgtgagccaccgcacttggccttaacaaatgtcaacgattgagcccctgtaactttccatgccgttcagatctggagagtgggagaagctgttttctgagacagcagctggagctgccgttgtgagcgaatcctctatctcctgaatccagggatgagcttcaggtgccaacaggtggcccaggtgttctaagcagtcctgtttcctgcacttagcattcttcccgagaagctctccatgtgaattcagcagccaggctccagtgggaagacgagaggacttgggtggtaggttaacgatggccacagctccactgggaagctgagtctcattctcctccccttgaacctggccaggctgaggactggcttggtcagcaaagggtggcagatgcaaggccatgtctccaagaggcctggcggcttccacctggccctcttggagcccccaggctgccatgctttgaggaggctcaagccacacagaggagacacctgtacgttctcacatcgacagccccagtggaactccaagccatctccagcatccacggagagtcatgtgaacggaccaccgtggacatgtggcccggatgactgcagccccctgacatcagattgcagccgggtgggaatctgcccagcaggtccctgtcagcccgcagaactgtgcaagacaattatcaatggtagttctaagccacttggctttggagtgatttgttctgcaaccgtctttgatcactaggggacagctgtgcacaactggggcccatggcttctcagaagttaaaggtgggggccaggcacagtggctcacatctgtaatcctggcacttggggaggctgaggcagactgatcgcttgaggtcaggagttcaagaccagcctggccaacgcggtgaaaccgcatctttactgaaaatacaaaaatcagccaggtgtggtggcaggcacctgtaatcccagctagtcgggaggctgaggcaggagaattgcttgaaccagggaggtggaggttgcagtgagccaagatagcaccactgcactccagtctgggtgatggaatgagaccctgtctcaaaaaaaaaaaaaaaaaagaagttaaaggtagggtgcagaggacatggggagccctgattttacccttcatcacaggaagggaagtcacttggctgcagggcctggagagagcatgaaatcctccgttgggctttgtcttggggccaaacatctcccaactgctcaccctggtgatggtccgtcgctcctagttcaggaggccaggattcaaatcccacctgccccactcagcggggggtgcccctcactccatcacccatccctgggtcctggctcccctctgtggcccccctccaggtgggggtcaggtgacgtgttgacagcgtttgtccctagtagagggtgttggcatggaggactaggagggagtgtgatctgactctgggtccaaatgctcagctccgggcctcaccatgcgacctcttgtagggtgcttcttctgtgaaacaggcacgatgaagcctctgcccagatccttgtccctctggctctctcctcccccgggtctagtgtccagcccctccgcaggctctcgctgacaccacatgtgctcacaacgcgcctgcttctccatttggtcggcccccctgccaggatgtgggcgtgtaggcagggctgygctccagccccacggaacacagggccactttgtggaatgaagggctgagtacatgaatgaaagagcccgtgcaaagccgcaacctggcggccactgcactgtgaaagggtctcctcctgcctgcccctgggatgggctttctgtgaaagggtctcctcctggaactcctgggatggactttctgtgacagggtctcctcctggaacccctgggatgggctttctgtggggaaaagaaagagagatcagattgttactgtgtctgtgtagaaagaagtagacatgggagactccattttgttctgtactaagaaaaattcttctgccttgggatgctgttaatctataaccttacccccaaccctttgctctctgaaacatgtgctgtgtccactcagggttaaatggattaagggcagtgcaggatgtgctttgttaaacagatgcttgaaggcagcatgctcgttaagagtcatcaccactccctaatctcaagtacccagggacacaaacactgctgaaggccgcagggacctctgcctaggaaagccaggtattgtccaaggtttctccccatgtgatagtctgagatatggcctcctgggaagggaaagacctgaccgtcccccagcccgacacccgtaaagggtctgtgctgaggaggattagtataagaggaaggaatgcctcttgcagttgagacaagaggaaggcatctgtctcctgcccgtccctgggcaatggaatgtctccgtataaaacccgattgtatgttccatctactgagatagggaaaaatcgccttagggctggaggtgggacatgtgggcagcaatactgctctgtaagccactgagatgtttatgtgtatgcatatctaaagcacagcacttaattctttaccttgtctatgatgcagagacctttgttcacctgtttatctgctgaccttctctccactattatcttatgaccctgccacatccccctctgagaaacacccaaaaatgatcaataaatactaatggaactcagaggccggtgtggaccctccatatgctgaacgctggttccctgggtccccttatttctttctctatactttgtctctgtgtctttttcttttccaagtctctcgttccacctaacgagaaacacccacaggtgtggaggggcaacccaccccttcactttctgtgaaagggtctcctcctggaacccctgggatgggctttctgtgaaagggtctcctcctgccacccctgggacgggctttctgtgaaagggtctccccctgcctgcccctgggatgggctttctgtgaaacggtctcctcctcctggaacccctgggatgggctttctgtgaaagggtctcctcctgccacccctgggatgggctttctgtgaaagggtctcctcctggaacccctggcatgggctttctgtgaaaggatctcctcctggaacccctgggatgggctttctgtgaaagggtctcctcctgccacccctgggatgggctttctgtgaaagggtctccccctgcctgcccctgggatgggctttctgtgaaatggtctcctcctcctggaacccctgggatgggctttctgtgaaagggtctcctcctcctggaacccctgagatgggctttctgtgaaatggtctcctcctcctggaacccctgggatgggctgtgaaagggtctcctcctggagcccctgggatgggctttctgtgaaagggtctcttgctgccacccctgggatgggctttctgtgaaagggtctcctcctgccacccctgggctttctgcacagtctccttgtcctcagggagacccctgtgagaagacggggccgagactgcccggccaccatgtcctcaccaggggactccagccccacaggaggacgcagggatggcaggggcaggtggagacctgagacgcatgctggccaaacaccctgtcgaagatgaaggtccgctcccgggaccggcgtgttcgcgccacgtcctcggggtcctcgctggggtccatgagcatcaccatctgcaagcaacgagccgaccaggctggtcaggatagggcagggtctgcaccctggatggaccccaggcctggcacccaccctggacccctccaagaggcttggtccgggtctggaaagggctgtgggcctctgtggttgagccaggagcagagttgggggcctgcacccaccccccggcccggcaccctctccacttgcttctgaggagcagcatttaccgctattgcaccctcaaagcacagcaggaagcycccccaggcctgctgggctctgcagcccagcacccacactgggaaacgctgccttggtcaaaacacatcgaggacagcggcccagcacccaccagcctccctcagggcccaggttcctttgatgaacccacagggcggggatgggaaggagatgggaagtgctgagctggcgcctggctgctgtgcgcagggtttctgcgagtgaccctgagtgtttccgctcctggccctgtctcctgtggctcactggggctgaaccatacacaggaaacgggagaacaaaggacygagccgggtacagtgaataacacctgtaatcccagcagtctgggaggccaaggcgggtggatcacctgaggtcgggagttcgagaccagcctggccaacatggcgaaaccccatctctactaaaaatacaaaaaattagccgggtgtggtagcgggcacctataatcccagctactcaggatgctgaggcaggagaatcgcttgaacccaggaggtggaacttgcagtgagctgagattgttccattgcactccagcctgggcgacagagcgagactccatctcaaaaaaaaaaaaaaaaaaaaaaattaaattagccgagcatggtggtgcatgcctgtggtcccagctacatcagaggctgaggcaggaggactgcttgagcccagcagttcaaggctgcagtgagctgtaatcgcatcgcagcactccagcctggacgatccagccaagatcaccagccctgctgtttgtctctctgagcgccgggtcgcccccaggaccatctcgtataaatacctaattatgatgcaaagtgtatgcgggtccctggggacagataggttcaaaggagcctttcccagagaattgggagggggacacaggacaattagaaaccacattcgccctcagctggttaatccagcaagcagttccctggccgggaggatcttggggaccccagtggccragaggagccacggggtctagggaggcaccaatgggtgggaccaagcaccccaccatcggacagcccaccccaccccackytggctcacaaatttgtaaactgagatcccaggagaccagggccagccactggttctcgggagtcagtggcagggctggggctgggtccctggggcttcctggcttctagccagcacttttccactacctaagtgaactaactcccttttctttatgtttttctccttccaaagatgaagacaatcaaaagacaggatgacttggggcagctcctgtacacacagccccactgcgtgtgccagccatcggccaggcctgggctgcaggaggaatctgacaggaagcaggagggcactggtagttaagaaagcaggctttgttgggcacggaggctcatgcctgtaatcctagcacttggggaggccaaggcaggaggaacatttgaggtcacgaattcaagaccagcccggccaacacagggaaaccccgtctctactaaaaatacaaaaattagcagggcgtggtggcagatgcctgttaatcccagctactcaagaggctgaggcaggagaatcgcttgaaccgtgaggcagaggtttcagtgagccaagatcacgccactgcactccagcctgggcaacaagagcaaaactctgttctttcttgtgagttccattccctccctccctccctccctcccttcctgatggagtttcactcttgttgtccaggctggagtgcaatggcacaatctcagctcactgcaacctccgcctcctgggatcaagtgattctcctgcctgagcctcccaagtagctgggactacaggcgtgcaccaccacacctggctaattttgtatttttagtagagacgaggtttctccatgttggtcaggctggtctcgaactcctaaccccagtgactcaccagcctcagcctcccaaagtgctcggattacaggtgtgagtcactgcacctggccaacttccattctttttatccatgatgcaggtgcatcatgcaaaggataaggacctctgcaaagatcctatgaagccaccgtcctctcccaccctacttgtccccactctctcagctgattccttgggtctcgaccccctctgccatgtcctttcctgcagagcctgtctcccctcgaattaaacgcctgtctggttttttcgtttgcttttccgtgaactcagcactgattcacctgccccctctgcagtccactccccctggggatgtctgtgcacctgatcttctgtccatttcatcttctttttttttgttgttcttttttttttttttttttttgagacggagtctcgctctgtcacccaggctggagtgcagcggcgcaatctcggctcactgcaagctccatctcccgggttcatgccattctcctgcctcarcctcctgagtagctgagactacaggcacctgccaccatgcccacccaatcttttttatttttagtagagacggggtttcaccgtgttagccaggatggtctcgatctcctgacctcgtgatccacccacctcagcctcccaaagtgctgggattacaggcatgagccaccgcgcctggtccatttcatcttctttttttwttttattttattttatttttttttttgagacggagtctcgctgtcgcccaggctggagtgcagtggcgcaatctcggctcactgcaggctccgccccctggggttcacgccattctcctgcctcagcctcccgagtagctgggactacaggcgcccrccacctcgcccggctaattttttgtatttttagtagagacggggtttcaccgtgttagccaggatggtctcgatctcctgacctcgtgatccgcccgcctcggcctcccaaagtgctgggattacaggcgtgagccaccgcgcccggccgtccatttcatcttcttgcagacgatgccctgagcctcctgacctgggaccaggactggtgcccccctgcccagcggggagctccctctgacacacccagggtcccctgcccctgagtgcacatgactcccaggggccatgtctccttccttatgaagctgcctctctaatgacgaacgggaaaacctgatccacttggcgacactgagttccaccccacactgggcatttcttcttatgagtgaccaccgaggccatagacatccctaacctgtggcaacagcttggcttctgagcctgcttcaaagtggcagagatccccgtgctggacagcatgctggcgcccttccctgctgagctgcagccacccaggccctttccagccacacaatttcagagccaggcctgctgaaggctctgccctcctcccagccccctccctgctctgtggccctgccacatgctcctgctggggggctccagcctgctcccctgccctgactttgcccacccccacgggctctgctgtattctcctggtggcactcatctctccctttgtgtgccccgaaccctgactagaaactgggcccagtggggtgggcatggtgtcagtcttagccacacctccaggacagagccccatctgtgagcttgtgacagcagggagccccctgagccccagcctcacctggtcccccactttgtgggcgatgaccgcggctccctcctycagttctgcgtcattgagcgggtggattcgaagtgccacctgcaggcagtcaccagggcggctgctctgggatctgctcagtctctgtgaagaggtgaaggcagcagctcagccccgtgcccctcagggtgggctctgacttcactcccacggggctgcccgtgcccccaacaagacatggcctccctcactgaggagatggggaggttgaggcacacagcagggagcgcctgcccaaggccttgcctcccagtcctgccacctccagaagagatgctgagctccttcatgggaaacttccccaaggggaaactrggggccttgccatccccactccctattctgagggccagatcccggcctcaaacccacccagctgsatagtaactgtggccccaggacgcttgtttccccctctataaaagggacacattttttggtagaaacagcagctgtggctgagggacagtcatgactggcatctctttttacccagctacagccctggggcaagtccccagctcagctcaccgctgtccagttggcggaggctctgagtcccccagcagatggcctggattgggcccagggagggggctggggagcccagagcccgcacacccaggtgccagcagcatggggattaggggtggagagggtgtctggaggctcaaggcgggggtgcggaggcrgtggggaagagcggggcagctagctcccagcgagggaaagttggggagtagaccgggctgataacagagcagaggggtcgccggggttgcaggcttgggaggcggcgtcgggcactcgcagactgggggggcgggaacacgagggagggcgctcaccattagtggctggtctttgggctccatctctcaacgccgggctgccccgggccggggagggacctgcagcctggcaggagggtatgggcagcgggatgcgctcccbatcacagcagagatgagacctgcctgcgctcagccccgctctgctctgcctaggtgacatcagctgggccttggggagccgggctggcaccactcatgtggttggggcctcaaggagcagggtggccctctcgatcaccttggcacacagggacagcgccagacgctacagcagcctctatctccaccctcactatggcaacccccggtttccatgtgcctcacccggtgcacatgagccagcctgacacccaccaggacacaggtggaggggctgcccctcttctttgcagggtgggtccctctaccaccttgagcccaggagaggcgctgcccacctcagggcccctcacacagaaaccaggatggccctggagcttttcccttgaagcagacaaatggcagcagctgaaacttcacacagcaacttgagcaacttcgactgcaactgccgtttccaacggcgactatgtttctttttttttttcttgtcacccaggccggagtgcagtggtacaatcttggctcactgcaacctctgcttcctgggttcaagcaattctcctgcctcagcctcccgagtagctgggattacaggcacctgccacaattttgtggctcatttttgtatttttagtagagatggggtttcaccatgttggccaggctggtctcgaactcctgacctcaggtgatctgcccgccttggcctcccaaagtgctgggattacaggcgtgagccacccgcgcccggcccgcgaccacgtctcctcccctttcccagtaagcgctygattggctctcaggtgtattcaacacctaaaggctgtgctccttttccactgcaagcccggggaaaggcaccgcaccgtgaacctgctccccaaggtcacctgacccgtccaggmtgagctaaccagagtgcaggacgacactgcccagagccagggtcggtgccaagcacagaaacccgctcctgcactgacagagatcacgccaaagccaggccgggcgtggcacacgcctgtaatcccagctactcgggaggctgaggcagaattgcttgaacccgggaggtggaggttgcagtgagccgagatcacgccattgcactccagcctgggcaacagagcaagaccttgtcttgacagaaaaaaaaaaaaaaaaaaaaagtaaagaaatcacattaaaatcggatccaagctgttcaagcctggccaagtccaacttcatgatgccaaccacggagctgaaagggcccgggggtccattcccgccagagtgggcgactcaagccctcccaagagccaccatgcctttcccataagccgactgcctggcagctcagctgtgcaaggccagggcatgtttttggccacatccatctctttcttggcatccgggtcaacactgtgcagcaggaaaccccagccaggtggattcggctacccctccaacaaccacatccctgtcctctaggaggatgaggctccagcgtctgaccacggcacttgccgggaacacgtttacaagtccccgcgttcttgcctgcctcagcctcctgaaacacaaccaaggccatgcctgcagcaggggtcccaaacaccccccccccccgatgtcctgagcccgccagccgtggggaccctgatacccaggaagtccctccacagcaggccggctctgggagatccatgtctaccgtagcaaagttaaaaccaacgcaagggcttcagaaatcctttacgaattatatgaaacaatgacaactagtacatttaaaacagtggaaagttaattttttttagaatatctgttaaaaatctgtcatatggtagaactgtgtgcctttcttctttygatgaaatcagaaaaactttctcggcacactagaatttaagcagcaagagtataaacaagaattactaataaaatgtgcactggagggacacaggatgaacggcaggactgcgacaattctagaactgtagaatcgcagatgagagaaatgtagggctccyaaaaaagcaaacgcaccaaggcgccctcctcacacctgggagacccagtgtgacctgaggctctaggccactcctccagggtggcaggagccygggtcctctgccctgtgaattacagcccctcccagtctccaaacgttgccttaggtttgtaaatggcccttggctgtgagttctgagggctgcctcaggtttgaggagttgaaaagaggtggatgaaactgcagggtcacaggtgccagtgggaagtgacaccctgtcaacaggaggggctgaaattaccccaatttgtgggctcccttcccaacaggaaacaagttcagaactggccgggcacggtggctcactcctgtaattccagcactgtggaaggccaaggcgggtaaaccacatcaggagtttgagatcaggctggccaacatggtgaaactctgtctctactaaaagtacaaaaaattagctgggcgtggtggcacatgcgtcgtcctagctactcaggaggctgaggcaggagcatcgcttgaacccgggaggcggaggttgcagtgagccaagattgcgccactgtactccaacccgagtgatagtgcgagactccatctcaaaatgaaaaaacgggcagaactgaccattctcaatacaagtttcccaatgtgtctaactccaaggaaaagtcacagggttctcaccagggaaaatgaccagcatctttcacagaaaacaacgcaacagaagagactgtggcatgactagtgcatcgctggacacagggtggccgagtgtgcgtgacgaccggacgggacagcgccctgcagaggtctggcttggcaagcaggcccttgccactggggagggaggcaggcaccaagttcaaggtctctatctacattcaaagagaggagaaagaccggtttttcatacaagtttgcttttatttccatgttcaacctgcggagaaaaccggccacaacctgcacggtgggggtacaaggcatggcggygccctcccggtgggtctccgggacacgtccagcactgcccgcaatggggatgcaagtccttcaacggaaatgctgctcggctgtgtacaggcaccgtggaaacatcactgggcgcaggagaaggtgccgccagtggcgtcgctaagtcttcggagccaacgccggcggttccaacagaaaactccaaacaagamagaagtggaagcgggtgccttaaatcccccactgcagacaccaggggctgaaaggcacaaaaatgtgtcgcaatggcagaatccaggcgcagtcacagtccagagccagagagcacagggaggaggcgggagtcacgcggcttcctgcaggacggcctcggctccacagcacacacggctgcgctgcaacagaggaaccgcggctcacactcgggagtcctgtagctcagcgcgggaacagcaggcggagtccgtcccctggatagacaggcatggcggccctaaacggcaccacctcaaaaggctgagggaccccctgaacatcgccttggggctgacgttgagtcccgcaagaggagccaccccggccacagagagctgagcccgtgtgccacccctactcgctcatggtcccaccctggggggacagcaaccaggccaccctcaggcaccccattaggccttctgtcccacatgtgcccatgctgtgaggcgcggaggcccccaggactcaggagctcccgcactctgctccccagcccccgacttggaaggctcttgtctcagaactgctgaaaccacagtcacagccgtgcacgccagtgtttctttccagtggacacaccgcggccgtcactagcacaggtatcaggaaatggccaggcatggccaccctcctcttcctggcacttcccaacacctggccacagctcctccctcacccagcactgcctgaaaggcgccatctgcaatgtggtcagagggcgcagtcgaggccacgtcggcaccgactctacatttcacacgaggctcagctaaccctgggcacatgacactagggcttcacccttcacccctgccttaaaggaggtgcttcctcagtgacggggataactgaagcagcatgagcagccaacaggacccccatcgcgccccctgcagacgctcaccacagtgctccaggtcactcctgattcccgaggggaatgatttcttcagtgacgaagaactcaatggtctcctcttcccagtcgtccacgttgctgtccagctcgtcagtgtccacccctgaggggacaaagggcgcagatcacccatgggggcacatgcctagtggcaccgccgaggccagtgggaaggaacgcaggagtccgcgggcaccagggcccaggggcagcgtaagggccagctcctggggactgagggatctctaagttacctcctcgcaactccaggcgctcgtttttctgctccatatagagctcctgggccattttccggtacttccggaaatcttccatcatggtgcgccttctctccaccaattcctatgcatgaggttggggaaagcacagaactggtaagacaagtgcctccccatcgcgaagagcccacacccaggcggacggtgccagaaggacagcatacagaggcactcaagcaggaatggcyagtccattcattctcacttttcccccaacgctgccccccacccacaaggcagcagtgaggtcaccaactccaagtccccgtgccaaccccagttccccagtgcatccctcctgggggggaacagaaccagtgtcttcggagcagaggcaactctgagcacatacacagcagctccccgcagccccgcctttgccatgatggcggatgtcacagcacagccctcattttgggaatgaggctcacctttgaggctttggactgactcaaacgatccttctgttcaaagatcttagagtatttcttcagatcctttttaatttgctgaaacaaaagacccatcactcaggatttaacattcaaagcaacaagcacaaatgcaatcttcagagttgccaacatgacatgacacccaaagccattcacagaacacagcttcccaggagcgctcgcatgctcctttctccatgacacccagggtcattcacacaacacagcttcccagcagcactcgcgcctgctccttcctccatgacacccagggtcattcacacaacacagcttcccaggagcgctcgcgcctgctccttcctccatgacacccagggtcattcacacaacacagcatcccaggagcgctcgcctgttccttcctccatgacaccaagggtcattcacacaacacagcatcccaggaacgctcgcctgttccttcctccatgacaccgagggtcattcacacaacacagcatcccagcagtgctcgcgccttctccttcctcgacacccagggtcattcacacaacacggcttcccaggagcgctcgcgcctgctccttcctccttgacacccagggtcattcacagaacacggattcccagaagagctcacgcctgctccttcctccatgacacccagggtcattcacagaacacggattcccaggagagctcgcgcctgctccttcctccatgacacccagggtcattcacagaacacagcatcccaggagcgctcgcgcctgctccttcctccatgacacccagggtcattcacagaacacggattcccaggagcgctcgcgcctgctccttcctccatgacacccagggtcattcacacaacacggattcccaggagcgctcgcgcctgctccttcctccatgacacccagggtcattcacagaacacggattcccaggagagctcgcgcctgctccttcctccatgacacccagggtcattcacagaacacggattcccaggagcgctcgcgcctgctccttcctccatgacacccagggtcattcacagaacacggattcccaggagagctcgcgcctgctccttcctccatgacacccagggtcattcacagaacacagcatcccaggagcgctcgtgcctgctccttcctccttgacacccagggtcattcacacaacacagcatcccaggagcgctcgtgcctgctccttcctccatctttcactttgagacggactttctccctgggatttaaccctcctctttgctctgacctaagaccaacggcctattttaccacaataatgtaaatcccagacaagccgcttctaatcccagcaggactttttaatggccctggcatctttttatccacccctcgggttcatgcaaaacttccctaaagaagctgaaagcctcaagttactatcctaaagctgttctattccattcagttctcactgttcctgcgtctcttcaaagaatccttgcaaatgycacgtttttatcccccagtcaccaccctaacaataacagaaaaaactgacaccttttcaacgccacaattgcctccatgtgccctgcacccgggggtgggggcatgctgaccttgatctgttcctggctcaggagtgtgggaggccggggccgccacagcagctggcagaagcggtccttgttgttcttctgcaggaggcgtccctggaaagtccacagccagtacgcgttgtccacctaggccagggcagggacacaccaggacacagaggggtcagagagccacaaccgtgactatgtcacttgctgaacaaggtcctgggtatcggggacacgtgtgaagcaaacaaagctctgcctgtgctgagctgacagcagggtaggtgggcagtcaatgcaagacacctccattatgcaaccgacccggagtgcggggcacggagcagctggagcagcgctcatcacagcacaggcctgcacattctggctggcaataagaaccccatgctggatgtaagctaactgcctcactactgcgccgctgaaccccgtgctggatttaaactggactgaaccctgtgccaaacgtaagctaactgcatagcactactcactgctaagccctgggccgggtgtgagctgtgcggagccctgtgctggatgtaagctaactgcatcactacacgccgcctagttccgctctcctcatggcaggcctctctcatgaaggagggcgccttcactggcactcagcataaactccttgttgcaggccggcattttggaagctaagtgttcataactcaaggagagtggtcaacagcttaaaaagtcttttttttttttttttttttaatggggctagggtttcgctatgttgctcaggctagtctcaaactcctgggttcaagtgatttttctacctctgcctcctgaagtgctgggattacargtgtgagccactgtgcctggcctaaagtgatttcargtgtcaaggcaggccccaccgcagtgacatctgmacrtacctggacacaggctgtgatcaacrtatcctgattcgaatgcgaagatttctaactctagacacttgcagtaacatttgggaagttgatattcctacaaattctstatctcattaaacaaaattacccgcgtttggtttcacaggctctattggcatggactagttcaagtatcagtgcctccatcaatgtttttacaagtcactaaatactgaaagtccttgacaaacttaaccagcagttttggaatacgagttgtgggtaacgcggcagctggactcaaccactgaccccaaaacagatcttaatgtctgcggttatggaactctgttcagacttcaaaggaaacgactcctctctgcagacattctcactccttttcaggggtccctgggcccagggtaagaccccccacctccccgcaaccatgagcaggggctgctcctgcactcggcgccacctcttctacaacccagaatcctcctcctcctgccactaacaccagccaaggcttctgttcaacacagaggcttggtgccccttccctgaggtcccaggacagcaccagagtcagcagctagccagcactccctgcttctatccacagtcaaaactatgccccacaggcctgcaccttatggctccaccaggacacagaggtgacgacgtagcgcccagtaggatcccattcgacgtcggaagccatgtagtgctctgcgatgttcatgaccgtgcagtccgaagtgtccacaaacgctaaggcaccgttcatactgcaaagacagacaggaccgtcaggcttcatggagacgcatacctcctggcatcccactcctgagaggtgctgcggcatggggtccccagggagccagcctcggcgttaacatggaaacaagcacagcaacagcctctggtggccgctgtgagacttaccaaatcacagaygcagagtgtgcagtgagtattacataygactgccatcatattatttttactggaaatgttatctgaggctaagtaagcctccaaaaatacagtarcaagtgtggacaatgaagcaagggagagcagcaacaaaagggtattcttttaactcagagcagaaagctggaagcttctccatgatttcgacacactgctggaacacagctgagaccgacaccgtgacaccaaccacaaaggtaaggcagcctcacagctgtgtaacgartacccttcccactagaagayaagggactgacccccgkggggaggttactggatggctggaaggcacttgtttaaccacagagaaccacaacccgcagacrggtctgcctggtcacttcacgaaagcatctgggagcgcttatttcactctgtgcgggcttggcctgagtcctggagtaccgtgggtctgcagaggttcaatgaagtcctatccactgacacyggggcaaccctttcagcgcacaatactctctctaccaagaagccgggtgcaggcgcctgaggggtctctgccacagcagagcgctactcacagggcggacaggctcagagcgcagacacctacctcctcaggcccgccaacaccacgaactgtccttgggggctccagaagatggtgttcgcctgctgcttgtcgaacatctctgaaaggaaagagcgcgccygtcacgagctgcgagggcttccacagtgccggggcagccaaggctggaggacttggccgtgctcatgctgcccatgagggcagagctggtaatgctggaccacctcggaaaacaattttacaaagtccatcgccaagtaccccctaagtcatgatccatactttaaatgggaaaaaaaagaagatgcgacaggrgtatttcaaaacaatactatcttatttcctgaggtaactggacaaagaattccctttacagcaaatgttcactgctgcagggaccccaacagagagatgtcagagacgtgtgaccccaaaagaccaaagccactctcctagcgacaaggcgtctttggataagctgtatgcttgttgaaactgactacagtcatcatctttgcaggtactaactcttacttccggaatggatctcgggcagagccgctggaacagtgagaagtgaaggccagctggggctggctcaagtccccctcagagcatatgctccctgcatctcaaacagagctgacaacctgtggcctctctcccctcagcctgtggtacatccaaaaaagaggcatggggcaggctgacgtggggaggaggggaggagatgtgggagggcagtgcaccctggcaggggcaggggtctcagacttgcacaagcgaaaaccccaacagccacgggcatgggatggagcccatgcggtggccccagcgtccatgccaaacctcaggagaggcgtgtcacgcagcatgtttggaaggtacaaggtgcctctgcttgcctatgttttatgacctagaagacttacamaagtctctggacagtctgcaattgcccatatgtttctatcaaccagaattaatgaaacagccaatcttgtratccactgccaactgagggcaccacgcaccctgccaagctctagcaaagtgaaaactaaactcctcacagaatcatgctgcgaaaggtgcggccaggagattccaaccccttcctggtacagrgccaaacccatggctctgcaggagggcagctggcagccagagtcctgtgtgaggaacacagcccatcgccacctcctggctaccacacacacacaccccacgcctatgaagcaacaagcaatggctcattcaatccccgcgggcaccgggctctgtgctgagcagagaccccasgatgaagtgaggagctgagggcacaggcagcaggtgccgtgagacaggcgagggcccacgcaccactgtgaggagcgagccccaggtgggtgcagtgtggcacccctggaaccgggtgcacgggggcagagtacagctgtgtgcaacagctctgcgcaccctggtcaaaggcacctgacccagactggggactggcaggagtatgtccacaggaagtgaccccaagcccagggacagcagctacagccagaagagaaaaagcttcacttgagatgatggcagagaatggaagccttggaaatactcgcttaaacgtgagggctcaacggggctcagagagacaccctgcaaggaggcggcacctccaggccatcgctcacttccatcagccgagsccacaccccattcataggcgagtcccggcctgcccagcagtggtcctaggccagtcaaatgctcactgttggrcagcgactgggtcatcatctgtgctgacctactcagaagaggaaagggaccaggttacttactgatgagttcaatcttcccgttgtttttgacgtggtagaaagacacagatatccgcggagcctctccrtgcagcacagcaaacttacttccatttggttcccaggcaaaggctatgatggtttctaaaatgcacaaaacagacccctccctttttggtcaattcagaacatagtgctcttgatcagttaaaatgttcactattcaaccacagagaaatatcccccgacgtgtaaaagttcattaaaaggacgggagagcaagcaacagcaggaaaggtgcacattcctggagtttcagagacagctgcttccacttgtgtggagtgacctacgtgaaactgctccyttcctgaragcaggacacccacagcaggaccgcaggagcccgacattgtcagnagctgtggatgccgcttccctcgcacccagtgtgcacctacagtgggatcctgacctccggtctccctgcctggaagggcggccatgtttcccattttctcacctatttttaacccttccttcctccttttctccatggcaaaacaaaaagccaaacaagaacacaggctcaatctcttttctcttttttttagacagggtcttgctccgtcacccaggctggagtgcaggggcgcaatctcagttcactgcaacctctgctcytgggctcaagtgatcctcccgcttcagcgtctcaaacagctgggactatcggtgcgcaccaccacacctggctaatttttttwatttgttttttgtacagagagggtctcactatgttgcccargctctaaacacgttctgtgacctggagatgactattcatggtgagggctcacagtcctgactcagctgctcagacaacccctcgcatggaagtgttaaagccaagagtaaaacagcacgtaggccccattcgcctcaaagtgactaaaatacaacttgcctttcatctcgaccacatccacaggtacctgtttctccctcattcggaaaatttcaaaatttgtgacaacaccctgtttaaaaaaaagggggaaggggtgacattctggacagtgaaaatatgagaaaaggtttaaatcaaagatcaacgtcacaaygaaagattcagtgtgcatgcctggttcacacacgagcatgtgcagtgatgaaagccacagccctcaggatggaagacggttctaaggctggagaactgccggcaccacgtctactggaagccactggacatgcatgaagtaactctgacccagatcccacctccaggagccgccctgcccgccacacttgggcacaagcagtcccagggtccacactgcaggctgcaggccagggtcctgagggccctaaaggcacaccaatggggctgggtaaaccacttcagacagtggggtgtcctgtagccataaccttcaagaagtcctgccctactcgaggagtctgagggaaaactgccctgatgtccatcaacagaggaaggaggccaagaaacggggtccacccaacaagagattactgctgacactcagcaccgtggaccagctgtgggaacgctgtgctccgtgaaggaggtcaaacacagaaggtggcatagtatccgattccagctgtgtgttcagaatagggaaatcatagacattcgtgatgccaggagctgggcggagaggctgctaacaggtatgttgtttctttgtagggtgacaaaaacatttatttatttatttatttttgagacggagtctcactctgttgcccaggctggagtgcagtggtgcaatctcggctcactgcaagctccgcctcccgggttcacgccattctcctgcctcagcctcccgagtagctggractacaggcrccmgccaccacgcctggctaattttttgcatttttagtagagacggggtttctactaaaccctcgatctcctgaccttgtgatgcccygcctcagcctcccaaagtgctgggattacaggcgtgagccaccgtgcccggcctttttcctatcttttaaaaattatctgtggagatggggtctcactgtgtttcccaggctggtctgaaactcctagcctcaagctatcctccctcccaccccgggggagccaccgcacccagccgatgaaaacgttctgaaatgagtggtggtggctgcataactctgaacacacgaaaaaccactgaaccagttcaccactctaaaggggtgttttcaggcatgtgaactacatgtcaattaaagctttcttaacataaaagaaagaagaatacttcyattagagggaaaactcaggaatttctttttttttgtgagacgcagtctggctctgtcgccaggctggggtgcagtggcgcaatctcgctctgttcactgcaagctctgcctcctgggttcaagcgattctcctgcctcagcctcccgagtagctgggactacaggagcctcccaccacgcccagctaattattgtacttttagtagagatggggtttcacaccacgttggccagaatggtctcaatctcttgacctcatgatccgcccacctcggcctcccaaagtgctgggattacaggcatgggccactacacccagccaactcaggcaattttttgataaaataaatattaaatgatcaaccaccaaaaataaaaaaataaaaaaataaatcttgagtatactactccttgtgcttagaaagaaaataatattctcagccaggcacggtggctcacgcctgtaatcccagccctttgggtggccaaggcgggcagatcacctaaggtcaggagttcaagaccagcctggccaacatggtgaaaccctgtctctaataaaaatacaaaaattagccaagcgtggtggtggacgcctatagtcccagctacttgggaagctgaggcagaagaatcatttgaaaccaggaggcagagactgcagtgagccgaaatcgcactcctgcactacagcctggtgacagagtgagactccatctcaaaaaaaaaaaaaaaaaaaaaaaaaaaaaaatccattaacaccctccaaacaatacggtggccacttcagagctcaggataaggaatcgtcagttcctgtgggaatctacatacctgggtgcctttcggagtcctatctactttcacacacaagtagtctccgttcttctgccaatggagcttgcagtccaccacattgaacaggttcctcactcggatctcttgcctggtagggagctgcatcagggttaccctggctggaatatctttgtcttcaggcacccagaaggcgattatgttaccaccaggagaccaagaaaagtctctgyagaacaggaaaataaaatgttaaagcaaagaccaagtgatgacgaaactgaaaagcagaagagaataraacaactcatttgctatataraagctcaatgctgtcacagctgacgctgagcgctccctctgcacagccactgctctgggcatgccgcgcagcttcataggtcctcgccaggaccctgtggcactactgtgctcactgtgacaaggagtgaatgcagacagaatattagcaaccccaccatcacgcacagactcatatggactccagcctgggctccgtcagcccactcttaagacaccgcacactgctgctttgaggcaaataagttttaggctgacggatctggctacatgtcatctaaagattaattaaggtgcaaatggggaaaatggcaaatcaagtgtaaggaatgagcaagaacaagggcagctccctccactttatcaactactctacagaagagctgctgtaacgaacggctcctgagctcacctacatgaaaaacatctttatacacgctatgtgctgttttgcattttttgagaaccaacgtcctggtcttttcattttataagccataattttgcccaagaatgtaaaaacgaaagaagaaacrtcaatgtccttggattgttggaagttcactgccgtgatactgaycagtcccaagttttgcgataaataaaaacgtgcccattctttgctggtgaaaatgagccgaaggctccccaaaccctgcctcggatggaagagtaccaggaaaacctttcacctaagcagagtcccctcttttccttaaaaggctggaaaccccaccctcctcagtttctagatcaaagacgaggtagatggaaggaagccgactcaaggctctggccttgaaaattcatttctaggcacgggaaggggtcactgaagtggtgcctcaagggtggcgggcccaatgctgagcagccttgctgcccactgactcaagcctccatccttgtgtccagaacaaactcaccttaggccgggcgcggtggctcacacctgtaatccctgcactttgagaggctgaggcgggcaggcggatcacttgaggtcaggagttcgagaccagcctggccaacatggtgaaaccccgactcttctaaaatatacaaaaaattagctgggcgtagtggttgcgcgcctgtaattccagctactcaggagactgaagcaccagaatcgtttgaacctgggaggtgaaggctgcagtcagccgagatcacgccactgtactccagcctgggcaacagagtaagactctgtctcaaaaaagatttaaaaatggctgggtgtggtggctcacgccagtaatcccagcactttgggaggctgaggtgggcagatcacttgaggtcaggagttctgagaccagcatggccaacacagtgaaaccccatctctactaaaaatacaaaaattagctaggcatggtggcaggcacctgcagtcccagctacttgggagtctaaggcaaggagaatcacttgaacccaggaggtggaaattgcagtgagccaagatctcgccactctacaccagcctgcaagacagagtaagactctgcctcaaaaaaaaaaaaaaaaaaaaaaaaaaaaaaaaaattttaaaaaaagaacaaactcaccgttttctctccaactggttaagaactgagtgacaggctgggcatggtggctcacgcctgtaatctcagcactttgggaggctgaggcgggcagatcacaaggtcaggagtttgagaccagcccagccaacatggtgaaaccccatccctactaaaaatacaaaaattagccgggcttggtggcacatgcctgtagtcccagctactcgggaggttgaggcagaagaatcacttgaacccaggaggtggaggttgcagcgagccaagatcgtatcactgcactccagcctgacggagcgagactctgtctctaacaacaacaacaaaaagctgagtgctaaaggagagacagcaaataaaggaaaccaactgcaatggaccacgtctgtgtcccccagattcacagggtgaaattctaaccccctggggtgacggcatggggtggggccttttggggggtgggaggtcctgagggggaagcccttgggaatgagatgagagactttacagaasaggccacggaggccttcctccagggaaggctggaccgaggggctgtccactaggagggaggtgggccgtcaccagacagtctgcaggcaccctgacctcaagctcccaagctccagaactgggagaaagaaatctcagctgtcataagccacccagcctatggtattgtgtttttttttttttttttggtattgtgttaagcagcctgaacacactaagacaccaaactgataagaatactcactttatcccagagatcttcaaactcttcttgtccaaaagacccatagactgcccaaaaaaaaggaaggctgcagttgagtcaaatcatgtcagtgtctcagaaacacacctaactttttacaaaaggaaacaagagtctgatgtgagtttgcctagggggcagtgcacacagagcgtgacagtgaacccatccacccacccgccacccagaactgcagttctgaagcccactgcattaactcccatccaggacttcccacggctgcgccaggtgggcaggagtgactgaagagctctgcccagagcaggggcagttaaaaaggcacaggagacaggcctttcctatgcatctgtgaaacctcctcctcctcttctagcacaaataaggaaaggcaccacaccccggttacaagcaaggaccggacggggcgtttgccatcactgaggccacttacaggagtttcatagatgctaagcgtatccagggtcattctggcaaagaatttgccatcatggctccacctaagaaaaacaaaagtgccagggtattcccatgaaaagacaaaggctacagagctcgttacaatggtccacttacttaaaaataggccaatgggctgagctctcacagtgaaaacccctcttcttgtgccccgtaaggatgtcccagatgattatggcctgagggtcatcctgcgtgtccatcagggggctaaaggtcaccaggtacctagaagagaagggcaacactgtacactatcctcctctcacgagaggatcacagtctgtctgtgcgkccagaacacgccgtcagaactcgcggaaccagctctctccccaaaccccacactgcccggccccaagagacccaagcggaagcgggaagcagcggcgcttgttcattctggtgtcaatacgctgcaggcgctccggtttctccaagatcagcacagaagatctcaccgatcccacacaaggctgctaagtgatccagagggtggcgcagtgtggaactctatctttacccatgtttaataaagactaacaagttaaaaaaatacggctgggcgcagtggctcacacctgtaatcccagcactttgggaggccgaggtgggtggatcacccaaggtccggagtttaagacaagcttggccaaccatggccgacatggtgagaccctgtctctactaaaaatacaaaaattagccgggcgtggtggcaggcacttgtaatcccagctactcaggaggctgaggcaggagaatagcttgaacccgggaggtggaggttgcagtgaactggtatcgtgccactacattccagtctgggcgacgcatgaaactcagtttcaaaaaaaaaaaaaacaaaacaaacaaacaaacaaacaaacaaaaaaacaagtcccatccagttcgaaagccagcacaggtctgatagaaacttcagagcctgggggctcctcccagccatgatttacctgactgctggcttgtctggagctactgcacctgcttactcagttcacacaaagtgtgtaacagacggtcccttayaacaccagaggggaaggcagacacaacccatgagggcgaaaacagagcggccccagctcgcctcgcactgccttccacaactgcccctttccctagagyggcccccgttcgcctcacactgccttccacaactgtccctttccctagagtggccccagctcgcctcacactgcctcccacaaccgcccctttccctagcaggcctccgacagccrgattagctagatcaaaaatcacggctcggccaggtgcggtggctcacgcctgtaatcccagcactctgggaggtcaaggcaggagatcacttgagcccaggggttcaagactaccttgtacaacaaagtgagacccccatctctacaaaaaataaaattagccatatgtcatggcgtgtgcctgcggtccccgctactcaggaaggctgaggtgggagaaccgcttgacctgggaggctggggttgcaatgagcctgcaatggtgccactgggtggcgccaagcctgggtgatagaggaaggacaatttattatctgtaaaatacgtgaccttagactagatcctgaactgaaggaaagtaagtattatacagaacattattaggtcaagtaacaaaatcagaatatggcaatacattgaagtattaaatgaatggtaaatccctgaagtcagtacmcacactatggtcacactaacaaaatcctatttctaggaatacacattcagggctaaagggacatgttatttcaactcactcccaaatggctcaggaaaaaatatctgtataggagatgatgacgtaaatgcaaccaaatgtgagaagatctcagtaaaaagcttattagcgttctgcatactcccktatttttctactaagtttgaaatgctacaaaatgaaagatcacctgtagaaggctggcatggggtgaaatgcatagactcccctgtgtttttctagcagcttacctttcacaaggtgagaagtcaataagctgraccccttggtggctgaatctctgaatttgcttgaatttctctcccccccatagagcaatgcctctttgatgaaaggtagccaggtaggtgcccttaggagaccaacgcacatacgtctctgtccatctctgcrgaaaaaggcagtgccaacgttaatacaacaaaatggcaaacacaaagacccctcctacaatgaatttatcctacaatgaatctgttctacaaactttttttttttttgagacggagtctcgctgtctcccaggctggagtgcagtggcgcaatctcagctcactgcaagctccacctcccwggttcatgccattctcctgcctcagcctcccgagtagcrgggactacaggtgcctgccaccatgcccagctaatttttttgtatttttagtagagacggggtttcacygtgttagccaggatggtctcaatctcctgacctcgtgatccacccaccttggcctcccaaagtgctgggattacaggcgtgagccaccgcgcccggcctattctgcaaactcttaagtgaaatacacaaagcctgttcacttctcaggatttacttcaaagctggaagaggaataaaagaagttgttttcagaaagtaatctcaaagaaaatataacgtcacctgctcttccagttttctgatagaaacaaagttccactttgttaaggaaatacaggagaggtgagtccccgcccccagcagcagcaaatacacaccgctctttcttcaattgagacagggtcttttacgtcattccagaatatggaagtgcggtctccactctcaaaaatcacactgtactgatctctgcattctgcctcttcaagccagtaacgtaagttccccttaaaaacaaagacaaggaatataacatttcattaattttaataaaaaactcattcacaactattgctcttaaagatatgacaagttcagtccacatcttaactcccaagtcacaccctaacctcaagtcaagacaccgtctagcatttcttttttttttgagasagagtcacgctgttgcccaggctggagtccagtggcayaatcatagctcacggcagcctcaacctcccaggctcaacctcccaggctcaagtgatcctcccccctcagcctcccaggtagctgggaatacaggtgcatgccaggcccagctaatgtatgtatttatttactttttgtagaggcgggggtctcactttgttgcccaggctggtcttgaattcctgggcttaagcgatcctcccacctcagcctccctaagtgctgggaytgcaggtgtgacccaccacacccagcagcatttctttaaaccactgagatgtaggtttcaggccactcaccaggtctttgaaaggctgtttctctggaatatcccactcgtcactgatcgtcatatacctggagaagaaaggagactgctgagccccacgccctgacgactagaaagagcaactcgtgggggctccagcatggccctgctgtgctcctgcctgcccgcccccagggctgtgactggcataacagggaggggtgctgtaggccagaagtgtggggcagggctgtgaaatggctctgcggcagcctgaccagaaaggatgtgaacaatctgacagacaccagcaccgagaagcaccaagccacccgcacacagccagtcacttgcacgtcaacgtccacttccttgtggccaagtctgaactcacttgtcaaaatccgtaaagaggttgacccggaatgtgtgctgcttgtcaagcttgtagccgtcggcgttcttcacagcatccacagcgtgggcaggggacgcgtactccaggaaaatatacctgagtgagagagggccgttggcacatacccacactgtaaggctaggcaggtatgcgctgtccgycccacccctctccacggacaagccctcggtgccaggagtatctgtgctgctcttcctgcctcgagcctaaggcagtcacacgggggacagatccacagccagggagctcctaagtgacagggaaatcctaaccagaagatccgaagtctctagtttcattatcataattatagaaaagttaatcaaaacgtccattattttgactgtggcgatggtttcgtgatatgtacacatcaaaatgtattaaattgtacgctttaaaactatgcagatttactgtatatcaattatctcaataaagctgtttaaaaaaaaatcttggctgggcgcaatggttcacacctgtaatcccagcactttgggaggccaaggtgggcagatcacttgaggtcaggagttcgagaccagcccggccaacatggtgaaaccctgtctctgctaaatatacaaaaattagccgggcatggtggcacatgcttataatcccagctactcaggaggctaaggcaggagaattgcttgagcctgggaggcggaggttgcagtgagccaagatcgtgccactgcactccagcctgggtgacagagcaagactctgtctcaataaataaataaataaataaataagcaagcaagcaagccaggcgtggtagtgtgcgcctgtaatcccggctacttgggagggtggggcaggagaattgcttgaacccgggaggcggaggttgcagtgagctgagatcacaccactgcactccagcctgggcaagagtgagactgtctcaaacaaacaaacaaacaaaaaaaacttaaaagtagtctaatattgtgtattacaggcaagattagaaagaagctcagagaggccgggcgcggtggctcaggcctgtaatcccagcactttgggaggccgaggcgggtggatcacaaggtcaggagatcgagaccattctggctaacatggtgaaaccccgtctctactaaaaatacaaaaaattagccgggcgtggtagcgggcgccagtagtcccagctactagggaggctgaggcgggagaatagtgtgaacctgggaggcggagctttcagtgagccgagattgcgacactgcactccagcctgggcgacagagcgagactccgactcaaaaaaaagaaagaaagaaagaacctcagagaatgtttcattataacacgagtaactgagggtcaagaggccatccttcaactgactgcccaacacagaaaatgcagcagcattacctgtatttgataattctagaaactaaaactattctagttagtttttactttatttatttattttagagacagagtcttgctctgtcacccagactggagtacagctacgttatcatagctcactgcagcctccaactcctggcctcaggcttcaagagtgttgggagtttatgcataagccaccatgctggcctattctagataattttaaaaactttaaaaccttaacttaaaaaaacaaactttatcatcttctcattcactgctctggatagcttccagctgagggcggcctgaagaagtgaacggcccacgtgcctgggcaaggcaggagctgtgttagtaaggatctcctgcaacactccctcatcatgacgtgccagacacagatgatacttctccaacaggagaacactcacccttttgtcttcccatcctcttcaggataaaaatcatttgtgattttcccaaacttggaaaagatcttgtggatgacatttttgagtttctcaagtcggtcgggtcccacctgagggacattgtccactacaatcaccgaatcrattccatctgcttcctggggccgatctttgagtacatctcccagtaattctgaacaagagagatttttcaaatgatcatttttaccargaaaaacattaatacattaactgagcacactaaacaagtcttcaagaagagacaatgaattgtctaaatgctttcactgtgagcaaaagaaatcctaaccctagcttgtttcagattttaaacatgacagctggggggactggaactctcctctctccctttgatggaaatgtaaacagtcaagacaggtcaattaagttctggtaataaccaaagactacaggagaataacagtgaaaagcttttaacaatgcacaatgcaaatgaagaagaccatctcaagaatatccactattagatcttccagagatgcctagattttgaaaggtttgttgcaacatctaggcaggcagaatcccatcccaatgtcaatgaaaactgactttttacagaagattttagcaaacaagtaaatatttaaatgctcaatatattcacagcacatttgtgctgtgaatacaaattaccagaaattattcaaggaggaaccctctctcgagtgaactgggatgaaagtagtaactcttctcccacctcctgttcccagtgattttcatgttttcaggccgtgaactggatggccattcacaggggatggggaaaaaacccaaagaggaagcgcgtctggggtgagcttccccacctctctccgctgcagagcccaccaccacgcaccttcgttcagaacaatctttacccaatattccttaggttaaaaagctctaaggataaacaactgaactgcaggagacagggatgtgacagtgtctttcctactcacgtaacactcaacacaacgcctgacaccggacgtgggtgtcgcatcaagcagttctccaggggccaccagctgggtgtcctctaacttaatccaattcagacactatctaccaggaattagcatcagatcccacaggctgaaggctcagccccaaagactggcccccatttcagatggcagtcgcaagtagtgggctgtcacctccggttctgaccgacaggctacaaagcagggctcccactatccctcgcttcttgggttccattaatttactgcagcagcttacagaattcagagagctaggtttgccagcttattataacggacgttacagaggatatagacraaaaggcagatggaggasaagcgcagagcctccctgtgctctccaggccaccaccctgcagaagcctccacctgttccgctgcatggagcccctgaacctggtccttttgggtttctatgaagatctcattatagaggcgtgattaatgacatcactgagcaccggtgatmaactcaactttcagccctcttccttctgggtggcagggggagacctaaaaggtcccaccctctaatcacgtggttggttccctggcaaggagccccagccatcaatcaagtcctcgtctacaaaaagacacttaccactttggaaattacaagggtttagacgctgagtgccaagagccaggcagagcccaaatacacatttcttaattatatcacaaagagcctttttgaaaaacactatcagggcagagaccggcacttaaactaggagactggagaatatacaagctcctgaaacaacttttttttttctttgtaaagagacagggtcttgttatgctgcccaggctagcctggaactcctgggctctagcaatcctcctgcctcagcctcccaagtagcagggactacaggtgggagctgccacccccactgagattaaataacagtatttttttcttagtggtaggtgaagctgttcttgatgtgatgaaatgcctcgcagggctgctggaaagcatcacgtgtcagaatttagaacacggccaggctcagtggctcacgcctgtaatcccagcattttgggaggccgaggcaggcagattacctgaggccaggagttcaagaccagcctggccaacatggtgaaacctgtccctaataaaaatacgagaaaaatgatccaagcatggtggtgggtgcctgtaattccagctactggagaggctggggcaggagaatcgcttgaacccaggagatggaggttgcagtgagccaagatcatgccactgcactccagcctgggagacagagtgagactccatctcaaataataataataatgataattccaacatactaaatatgcagatgtccgaaaatattctttactgtatttattctcaaaagttggctgggcatggtggctcactccagcgacagagcaagactccgtctcaaaaaaacactttcggaaatattgaaaactgacccagcatggtggctcacgcctgtaatcccagcatttttggaagccaaggaaggcaaatcacatgaggccaggagttcgagaccagcctggccaacaaggcaaaaccccatctgtattaaaaatacaaaaagtagccaggcatggtggcacatgcttataatcccagctacttgggaggctgaggcaggaaaatcgcttgaagcggggaggcagaggctgcggtgagccattgcactccagtctgagcaagagaatgagactctgtctcaaaaaaaaaaaggaaatattgaaaatactgccttaaaaaataatcgccgttttattttcaacgatgctaaaattgagacgaacaagagaaaaaaaagggaaaaaggcagttgccagtcactgcagtgccggacaccctgctatggaaactagtcaaatcctagggtaacttctaaagcacttaccatacaattaaatagcctgacaagcctgatctgaatttataaggctgcaataaaaagctcaacttttacacaaattgggtactccttcccacaagctcaaagcgtctagtctaggagaaactgcccacacgtaggaaggaaataaatgaagtaactacaccatgaagacacaacgccttgatcactctcagcccaagcatcggttacacgtggctcatggattcccaagcggtctccaggaaaaacagaagagaacaattctcaacactaaatagcaaatagaaagagaaagaatagttaatgagccaaaaaagacatttagagttaaaatcctggatcagctgaaacattaaactgaaaggatgattacagtttgagaagctaatctgtaccaaaaaagtaataaagcaagacagggactccaggccacctctggcctgctccttggaagacttggcccttctggaaagaactgatacagtcacctacggtcttgcacaatgaccctgaagggcagctcttctcataaagcacaaaacctgcgttaccacaaccaggagggccatgacaaagtcggcttcctgagccttagtcctcaggaccagatgcctcacctgtcactctggccaacactgcaccttcagggccacgtgggcccgctgaggacccacagccgtcacccagcctggccaaccctgtcgtcatattagcatcctctgactcttcccaattccagaagtaatctacgtattagaaatctgtgaattcgatgggctcaaataatgctttttaaaaaagtagcagaatatccaagggctcaaaataatcattaaaccaaaagttttgatttttaaaccataataacaattgaagcgttagaaagaacactgttctgagcaggagagtctggtgggccaagcagtayagacccactgggaattctcagcagcctactccaccttcagggacaagtttcctcaggactgaggggcgtagactagatgttcccaaagtctttagtttgtggtgtccttcctgcttttcatgctaaaatgtcttttatgaaaaaaaaaagtgtaatatagtaatggtcacagtaactgacagcgtttttattttttaatttttcactttttgagacagggtctcactctgtcgcccaggcagtggtgggatctaggctcactgcaacctccacctcctgggttaaagtgattctcgtgcctcagcctcccaagtacctgagactacaggtgtgcaccagcacacctggctgacttgtatttctgataacctttttttctttttctttttttttttttttttgagacggagtcttgctctgtcgcccaggatggagtgcagtggcaggatctcggctcactgcaagctccgcctcccaggttcacaccattctcctgcctcagcctccagagtagctgggaaatccaggtgcccgccaccacgcccggctaatttttttttatttttagtagagacggggtttcaccgtgttagccaggatggtgacctcgtgatccacccgtctcggcctcccaaagtgctgggattacaggcgtgagccacccagcccggccctctgatagccttttaaaaatacgtttaaatcataaattggcaactccatgttattcccgaaattgtcctggtgtatcgctggctacatcagcaagggtatttttatttttctcactctagtatcaacttagccaatctgcagaggctgatgtgttcccaacttaaaggcttaagagagctaaaaaacaaaagaaaaacaaatgagaccagctctcatcagaagtagcttcaggaaaaaatctctgagacaggaagcaaaaatatgcctgtaaatccaatcaaggttgagatgaaggcaaagctggctgttatcggcaatattaaaacctggaaaaataactctctttatagatttagcgcaagagataaagaaaaatcaaactggaatttcacagggtgcctgtcccactaaggaagtctctggagatggacaattctgaggggcaggaggacaaratcaccggctctgccacaagctgttcctccgatccagaccttgggaggtctgactggtcagctctggggacacgtagacccgcaaacctgccaccgggtcttcggtttttgccgtacccccagctgctacactcacagcacacccagccataacggagtaccccatgtgccctctcccaccctctcagatttctggttgtcatgcaaatgcctggctcccgaagtgagctccaccctgtcccctttttcaggaaagaaaaggggaggcgctgggctctcagaacacttccagggcactcgggaacccctccctcggtggcttctcaggaacacacggacaccctcgctggaacttctgcacgaaccggtggcacagcccgacgatatctcccacctcgggaaccccagccacgctcccgcgccgctcgccagccccgccccgggcgccctcaccttcctcgctcacgtcgtccacgaagtcctcggggtcgctgaaggagggctcgtccgcgtcgccgttctccagcgcccggggttcggcctcggccgctctgccctcgtttcctcccgcgtcctcggacaccgcctgggcccggctgtcggagcgctcgtcccgagcctgctctcctggggcctcgccctgtgccgggacagggggctcagcatgcgacccgggcagctcctcggcggccggcggcgagggcgactcggacgggccggaggccgcctctgcctcggccgccggctcggtcctcacctcggactccggcccggcctccgcgatccccacctcctcactggaggcctcggtccccgcggcctccggagcgccgggccccgcgggccgcagcagcccctcggctggcggcggctcggcggccggctgctgctggccgggctcggcgcgctcctcggccgcctcgggcaccgccacgttctccgcgtcctgcatgggcccaacgctgcctactcgcagggctccgcggccgccgcgcttccgactctcccaggccgcaccgcgcgccgcgacggctacagcccagccatgtgcgtgcgacggggaggccgcaccaaggcgccgcggggcggggggcgcacccacgccctggggcctcacgaacgaccctgagaggactcgcatccacaagaccgcgcccgaaaatcatcaaactgatatatttgtgacaagaaagtgcttaattccattcagcaaggttgtttctgtgcatcagtaaactcatgggagcattgaccaccccatgtgtggcagcagatggttccgtccaacatggcgtcctccccctttcctttcccgtcggacgctgcggggcgggactgaactatttgtggagctgaaggcggggacaagaaatgattttagtacccggaatgctaggaaaatgtcctctaactcaacagttaataccctggaagagtggagactcaacaggcgattgctcagggcgtctgagcctttcgctagggaaaccgtttagtttacgttactaaagtcccccctgtccgtgtctgtcacttggactcgcctactgactgagcaaaaggccagactacttcaaaatagaaaaggaattcggggcgagccagagagggcccacacgactagaaggacgactgcctggcgcgatacaaaaatgtatggaagtttctttaatcgcttacccccagtccttccctagcggccgtcactgcctgtttccccccattcgggctttcacagtggttcagtccatccgaggccgccgccttcagcgcgggacagcgcgggtcacgtgggggcgggggcgggtcctcgccgcgtggagctcgaggctgactccggagggaccggagcggttcgctctgcgcgggtgctcacgggacgggcattgggtgcatgtggcttctatcttgttttttgccggagtggaggacaaccactggttgggggatgtcttaatcatcctagaaaacaacccagtggatcacgcctgttatcccagcactttgggaggctgaggtgggaagatcgcttgagcttaggagttggagaccagccttgccaacatagcaccaccaccccccgcacgccagccctcatctctacgaaaattaaataaataaataaaacaggtggtacccagaggctggggtggagagtggggagtgtttatcggggacggaccttcaatttgggaggatgagaacgttttggagatgacggtggtgatggtacaacatggtgaatgtacttgatgccactgaactgtatactaaacttcatattaaaatggctaggccctgcgcggtggctcacacctctcttcccagtactttgggaggccaagacaggaggatcacttgagcccaagagttcaagaccagtcagggcaacatagcgagaccctgtcttcgaaaaaataaaataaaatgccaaaaaggtaaattttatgtatatttcatcctatagtttttttgttttgtttgttttcagagatagggtctcgctctgttgcccaggctagagtgcggtggcataatcacagcgccgctgcaatcgggaccttccagcctcaagagaatcctcccacctcagcctcccaaagtgccaggattacaagcgtgaaccaccgcgcagggcctagccattttaatatgcaatttagtgtacagttcagtgacattaagtacattgccaagtacttgggactgaaggtatgtgccaccgtgcccagctaatttctttatttgtagatagcatctcactgtgttgcccaggctggtctcaaactcctggcctcaagcagtcttcctccctcagcttcccaaagtgccgggactataggcatgagccaccacacccatcccatcctaacggtgtttaaaagagcgaaaaagaagcagagtcttcccatgcctagtaccaggtttgactactcctcatcatgctgtcagtggtgtatctttgggcaggtcacttaatgcctccacctcagtttccgcatctgtacaataagggatgacaattttttttttttttatttagacggagtgttgctctgtcgcctaggctggagtgcagtggcacgatctcggctcactgcaagctccacctcccgggttcacgccattctcttgcctcagcctcccaagtagctgggaatacaggtgcccgccaccacgcctggctgattttttttgtatttttttagtagagacgaggtttcaccgtattagccaggatggtctcgatctcctgaccttgtgatccgcctgcctcggcctcccaaagtgctgggattacaggtgtgagccaatacgcctgggagtatgttttttctacatatgcatgcttacaatagggcacagtaagagattaacagcaataactaatagaacaattataacaatatattgtcataaaagttatgtggatgtggtgtctggtggtgtgtctgtgtctctctctgtcaaattttcttcattatgtaatattttccaacctaattgaccataagtaactgaaacagtgcaatgtgaaactgggggtcgggggggctactgtgtttggaagcagtcttcccagatgtaatcaagatgaagtcaaagtggacgagagtggaccctaaatcagtgattgatgtccttattagaagaaggaaattatggccgggcatggtggctcacacctgtaatcccagcactttgggaggccaaggtgggcggatgcattacatgaggtcaggagttcgagaccagcctgaacaacatggtgaaaccccatctctactaaaaatacaaaaattagccaggcatggtggcacatgcctgtaatctcagctactcaggaggctgaggcgggagaatcacttgtaccctggaggcagagggcgtagtgagcggagattgcaccatttcactccagcctgggcaacgagcaaaaatccatctcaaaaaaaaaaaaaaaacaaaaaaccaacaacaacaacaaaaacttactcgattttttgtttttattattatttttatttatttatttatttattttttgagatggagtctcactctgtcgcccaggctggagtgcagtggtgctatctcggatcactgcaagctccacctcccgggttcaagcaattctcctgcctcagcctcccgagtagctgggactacaggcgcccgccaccacacccggctaattttttgtatttttagtagagacgggtttcatcctgttagtcaggatggtctcgatctcatgacctcgtgatccgcccgccttggcctcccgaagtgctgggattacaggcgtgagccactgcgcctggcctattattattttttaacagggtctcactctgtcacccaggctggagtacagtggtgccgtcgcacctcactgtagcttcagtctcacaggctcaccttagcttcctgagtatctggtagtacagatccacaccaccacatcgggctacctttttgtttttctgtagagatggggtctcactatgttgctcagtctggtcttgaactcctgggctcaagcagttctcccaactctgcctcccaaagtgctacaggcatgagccagcaggcctggcctccgctggtctatttctgagcctctgaggtgaaggagtgggaaacctgaggcaccgcaccaaccctggcagcagagatggccggatgaggctcccaggctgacctgcagcgtggcctgtgttgtgcttccaggggtagatttttttctttttgtttttgagacaaggtctcactctgtcacccaggccgggagcacagtggcgcaatcatggctcactgcagcctcaaactcccaggctcgtgatcctcccgccgcctcctcctgagtagttgagactataggcgtgcaccactgtgcccggctaattttttaaattgtttatttagagagcgaggcacagtggctcccaccggtaatcccagcactttgggagagtgaggcaggaggatcacttgaggtcaggagttcaagactagcctggccaacatggtgaaaccctatctctactaaaaatacaaaatttagccgggtgtggccgcaggcgcctgtaatcccagctactcaggaggctgaggcaggaggatcacttgagcccaggaggcagaggctgcagtgagccgaggttgtgccactgcactccaacctaaatgacagagtgagactctgtgtcaaaaaaaaaaaattgtttttagagatgggggagagtgtctcactgttagcccaagctggtcttgaactcctggcttagagcaaaccttctgcgttggcctcccaaagtgctgggattataggcatgagccaccgcgctcggcccaggggtaagctttaatttccctcaaaactctttctaaagaaacgtgacttcattttaaggccaaatttatagtttccgtgaaattataagttttatgggtttgttgcatttctattgatattaacattggttcataactatgaaaatgaaaaatgttccgccacacggccccttggggaagcctgacctggctggggagagaggctgcctgagcccggagactgggccgagactaacccctcccttgctatcaagagagcctcaacgtctctaggcctcagttttcttacctcgcaggcttgggggagtttggatgagataatgtaggaaagctgtgcctttattttcctgtgggtttatcttaacagaatgagaagtatttccaagtaggccaaccaggttctgagcgtggggatttcatgtctttgaggaagaggttcagagccgggaagtgtccagtccctgagcctgggagccatgaaccgggtggtagagatccagggtgacccttccagggcccaggcaggtgagatctctagtggggtggctccgggtgtagcctgggagcctcatgctgggctggagaggactgagactctgacctcaccacctgtccaccatgggccagcctgggtgggtttgtggacattcaggacctgtcacaggaggctgaggcaggaggatagcttgagcctggaaggttgaggctgcagtgagccaggatcgagccactgcactccagcctgggcaacagagtgagaccttgtcttaagaaaagctaaattggccaggcgcggtggctcacgcctgtaatcccaacactttgggagctgaggtgggcagatctcttgaaggcaggagttcaacatcagcctagacaacatggtgaaatctcatctttacaaaaaattagttgtgtgtgggggcgtgctcctgtagtcccagcttcttgggaggctgaggcaggagaatcgcttgaacatggggtgggggtagagattgcagtgagccgagatcacaccactgcactctagcctgagtgacagagtgataaactgtctcaaaaaaaaaaaagttaaattaaaaatatagggggtagggtgaaaaaaataaactaaaaatataacaaatttaaaaatataacacttaaaaaaggaaaataatttgggagatagtggtggtgatggctgcgtcagtgtgaacatgctttatgccaatataccatatgctttaacgtggttaagatggtacattttatgttatgtacactttactataatattacgcattttttttactttttttttttttgtttttgagacggagcctcactctgtcacccaggctggagtgcagtggtgtgatctcggctcactgcaacctccacctcccaggttcaagcagttctcctgcctcagcctcctgagtagctggtattgcaggtgtaagccacctcaccaggcttttttacaatttttttaaagaaaaaaaaattgaaagtcatgattttttggttgtagttctcttgctaacttgtgggtagcctatttttttttttttttttttttttgagacagagtctcactgtgttgc

SEQ ID NO: 97039 - DNA, 13485 bp, Homo sapiens
cgcccccttccctgtgcccccttcctaggcctgcgtttctctctcctgttactgatgcggagacaacacccttgttctcctccgtgcccctcctgggcgtgcccgttttgcacacggctcacagcgttatatgggaactcgggttttctgcagtgcttgatggagccttaggggtcggggggtctggggcatctggctctcccagcatatgtgtcgggagagtcgccggctttgcgaaggcctgagaaaggcaaggcaggccgggctgatgagcaggagggcgggcagctgtcccgcgggaacgcaggccttgttcccatcaagactgctgggccaggcccagcgcggtggctcacgcctgtaatccagcactttgggaggccgaggcgggcggatcacgaggtctggagatcaagaccatcctcgctaacacggtgaaaccccgtctctactaaaaaaagaaatacaaaaaattagccgggcatggtggagggcgcctgtagtcccagctactcgggaggctgaggcaggagaatggcgtgaacccgggaggcggagcttgcagtgagccgagatcgtgccactgcattccagcctgggcgacagagcgaagactccgactcaaaaaaaaaaaaaaaaaaagactgctgggctcgaaggcgtgtccgcctggtaatgggtgggctggtggggaagggggccccctgcagacctggctggtggtcctggggagcccgtctgactctgggaggaaggaaccggcccaggccaggcttgggtctgagttcccgggcagggaccgggtcctatgtgcgtccgcgtgggtgagctccccctcgccttccagggtaagcaggaagagaacgacgtggtggagaagctgaacctcttcttggatctgctgcagtcctataaggtgagtcttggctgctccttggctgggggcagaactttcaggaatgatcttaggatccttcaagggtctaactcctgggggacggaagaggagctgagaagccagggctgcaggggaagacggggccttccgtctggcgggggtgcttccctcggccggctccgcagggccctggcgcaggcatccagacagcgggcgaatgcctcccccggccccgcaggacctgtgcgagcggcatgagaagggcgtgttgcacaagcaccagcgggccctgcacaagtacagcctgatgaagaggcagatgatgagcgccaccgcgcagaaccgcgagccggagtccgtggagcagctggagtcccgcatcgtggaggtgggtggcggggcggccgagcaggcccgtgggagcctttcccctcccggccatggtgggacccggagccgtcctggtgggctcccctgggttggctccttgtgtctggaacagagctgggggtgcagtggaggcagggagctggcccgcgtgcccagagcgatgcggctccctgcacggtgctccctccccggccctctcttacctcgccaccttccaaatgcctggtgaaggctgaaggagaaggggccgccctggctcagggagcacgctggtgatcgggccttggtgctcccgtcgccgtctgggccgggtgcgaaaggcggctgtttgctccgcagcaggagaacgcgattcagacgatggagctgcggaactacttctccctgtactgcctgcaccaggagacgcagctcatccacgtctacctgcccctcacctcccacatcctccgcgccttcgtcaactctcagatccaagggcacaaggaggtgagtccgccctgccccggccgccgtctcggccacggcctttctttgtccctccgcccttccttcaagcccggcagcgcggtggccggccgccctagagaggttctttagtggagttgggctccgcatgggccttggaacacggtgctcgcccggatcttctagtctcctgtgtagccaaaatcagaatcgtgagggtgtccctgtgattcctggggggcggagggaggagcagacagggagagtttgcctcctggagggatttgagaagtcggaggtaaagcccgcagagctcccgcaccctgcggctgagagaaggtttctagcgcttcggagcgccgcaggtggctgttcttccagagagccctggccggcttcctccagagcagatggcggttccttcagcctgggagaagaaacgctcccaaggtcctgggacaggcctccgttgatttctggtggccagctcactgcagcaccgctgggattacaggcgagcaccttgtgcccggctgaaattaagtttattaagtagctgcaagtagctttcaagccatggtctgtggtgtgtgtggaatggcaccgagtgtctggggtggtcacgagattccacactgtccccgggaggtgcttggtgccgtgggtgccgtccagcactttgggaatggcaggctggaggcggccgtggtggggctggagaggcggtagacagccgccgtgttaggagcatcactgtgagatggccagggtctcagggaccaggttggacttggacatgtgagtggccgggtgtgtcctcagtgaaggaatgggaccaacaggcgcccggagcatgatgccataaccccagtcctaccaggttttttattgtggtggtgaggaatttccagccctgtgatgctgtgtgcgctgtggtccagtgactcagcctcccctgcaggcccccagggtgcgccctgcccttctctggccacctgagcccctgcacggcaggtcttggcctgacccctgcctcactgccgcgctcccctcctcacatccacagcatccgttccttgccctggttccaaaagtgcttggcgagtggggccgccgtttgcattccggtttgggtattattgatttggtggatgtggtctttgtgtttttggtttgctttttggttttgaggtggagtcttgctctgtcacccaagctggagtgcagtggtgcaatcacagctcactgcagcctcaacctcccgagtagctgggaccacaggcaggtgccaccacatccgactcatatttctgattttctgtggagacagggtgtccgtgtgttgcccaggctggccttggtgtttgacctgccaaggcttccatgaggccagtgcccgcacggcagctagagcatgtactggcagtgacgcgatagtaacgtttctcacgattccacggcaggcagatttgcagccctttggtcctgggtgcagggatcgaagcgtgggtgtctgtgaccacaggtcacatgtcgctggtccactcctcatttgggcttcctctgtgcaggatgggcagcactggttctgccagaggtttgaggagctggcgcacctgagggcccctccctccctgtcactggcaggcgaaggaactgggatcagagcgtgaggaggagccccggccccgcctgctgatcttgttctcttcgcttccctttcagatgagcaaggtgtggaacgacctgaggcccaagctcagctgcctctttgcgggaccacacagcaccctgaccccaccgtgctccccgccggaggacggcctgtgtcctcactagcgcctgaggctgaggtggtgctccctgcggccgcactaaaacctctttccaaacggtgtgtcccggtgtaattccctttggacggcagctcccctccccgccacgccccgtgctgcagctggagcagaggagctcacgcctgcgggtcgggaggcgcatccgtggaccatgggggcagctgggccacactgtccttcgccctgtggcctgctagcctggtcgagagaggtggtggggttctctggaatggtttcctcctgacacccagagctgtgcggggaggcagggatctctcatctcacagagattgtgcctgggggagcgtggaggcagggcctccaggtgctggaacagtcgggaggggcagcatcatggtgctcggtcagccgaggagagagggcagggctgccctgcagcccaggcatgggactgaccacggacagcgaggggacagccagtggtgctgaggctgggagggagggccattgggcgtggggcacgcacggtgaattttctagggaaattgctgcagtcaacacctggagccctggtctgggagtggcctgtagggtccagtggcctcatgccctgtgcccatatgatgaccccatgtgtgcctgtgtccacaccatgaccctgtgtgtgcccaggcctggaagacaaaggcgtgacggagagctggggctctgagagtgggcgctacagcagctgtgttctcgtcccctggactcccttgatttctggtggccagtgttggggtctgcaccgtgtggcactgaggctggatgggctggcagaggacaggtgggggcgtgggggggcgtgttccattccagctgaggctttagaggagggacagcccccttttaagtggatttccttctctgaggcacctagagccctcctcccagcctcccgtcacgcacttgccggcccagccacctgctcacagagggaaccagtggtctttcaggccccttccctgctctggatgaagaaggccattctcctgagctctgtggggctggactgtccgcctcaggcctgggtctgcttctgcccgaaccccttttgtggaaggcacatgggagcccagtggacccctgcacttctccggagcctgacgcccctccctggccggggaggggtgctggaagaggcccgccgggctccagggtttccgaggtccctccgctccgcagatgctcactggcctctggggcgttcactcctctcacggagggtgcttcccttccgcctgtacctacgggcagctcacggccgtgggatggagaggggactcctgtgtgtgccccgcaggcaggtgatccatcgtccactgcgagccggccagagggaacggccgtgccttctggccccgtgggctgtgctgactcggtggctgtggggctcgggcccagcctgccctgccctgtgggttctgctgctgccttcctgctgtgaggtgggctgcttccttctggccagatgagcagagggcagcgttccctttggagcccgatgggtgggctgtcccgtgagtccctagtccacccgagtcttgggctgcgctgccttctgacgcccctctgcagagacaggttctcagttgccatgaatggcaccatgacacccgagccatgaagcgtgaccccgtgtgggcagaaggctgcaaggcctctccgtccaccccgcaccttcctggggcctgtccagctgcaggaccatagaggctgtggggagtcgtggagggcatcaggtgctggggcctctgtgtctccagagtaggcaaggcacgcgctcctgacacagcccccaaggattgagcaagacttcagaatgagcttttctgaaggagctttcctggcagggactccggggtcagtgagtgtatgagaggccacatacctggcggcatctccctgtgttggaaacttcaagagcagggtctcagggtcctcatgtccagaggctgaggatggaggtggaaggctggagggcaggggtgaggagggagcaggagggcaggagttgggggagcaggagggcaggggtcaggagaacaggagaacaggggtaagggagggcaggggtgagggggagcagaagagggatgagggggagcaggagggcaggcgttgggacaggagggcaggggtgagagcaagggggcaggggtgagagagcaggagagcaggggtgaggagagcaggagagtaggggtgatggggaataggagggcaggggtgaggagggagcaggagaacgggtaagggagggcaggggtgagggggagcaggagggcaggggtgaggagagagcaagagggcaggggtgaggagagcaagagggcaggggtgggaaggcaggagggcggtgggggggcaggaaggcaggggtgggagggtcaggagggcagggtgaagggggggctggagggcagcggtgacgagggcagcctgtctcccacgtgtggtggctgcttcctgtgtgccctggggttggctctgtggaggggtgggcactggctttggaacacctccctccccttcctcctctgccacccagtgccttctaaagggcagcagaaagaggcctgctaggcaggggtggcggaggccaccttccttctcacaaatacttcttggccctggccctgtgctgcccgggcaggtccccaggctcaggggctgagaggctgcttactgctgcaggtggaggccccatgccggagggagagcggggttycccccatgcctctccagccctcctgctgcccacggcccaagcccaagcttgtgccggtcattacggccttgcctagctggcagggacagctgcgtgtgatgctggtggagatgccagatgccgcctgccctgtgaggacggctggcggggccgtgggaggggggttgtgggctggcggggctgtgggaagggggctgccgatcatggtgaaaggggacattttcattgggtcctcgtggtccgtgtcctgggtactcggggtcaccgtgcagacagctgccctttgtctgccggacacagtgcaggcaggggagacaggtttagggctctgacatggggcacagggactccgagccaagggatgtcagggcagctctgtgcatctgaggcctttgcccttgctttgcgggtcagttcatgtccaaagcactttaggaggctgcagggatcaatacccaatatacccaacaactggaattgtttacacatgacctacattttggacggtttatcaataaacatgtgtgaacaactgttattaaaygtgtatgaaagttgggcaggggaggggactagcctatgaggcgttcaacctgggttttagcccagagcccttggccgagcctcagcttcccacactgtgcaggggggttttaagaggacacatccccagcttgtggcactgagcatgtgtgtctctgccctgggccagctgcccacctcggggacagagtctccatcctctcccacctctgtgcagcagtgcgggctgaagcccagcacatctggtagcttcctgtggacgggacctggcaggctgtgctggtgtctggagaagaacgtttgaaaggttagagaccggccgggtgcagtggctcacgcctggaatcccagcactttgggaggctgaggcaggtggatcacctgaggtcaggagttcaagaccagcctggtcaacatggtgaaaccccatctctactaaacagacaaatattagttgggtgtggcaatgtgcgcctgtaatcccacctcttcgggaggctgagatgggaggatcgcttgaacctgggaggcggaggttgacgtgagccgagatcgtgccattgcactccagcctgggcaacagagagagactccatctccaaaaaaaaaaaaaaaaaaccaccgctagatagctttattttcccttccatccagttaattccagatgaaacccggctctgcgccactcaatgcccccaggtgaagatggtttgcggctgttcagcagccacgtctcctgcccaggggctgccctgggctcccgctagaccgtgtccacctcgcggagtgtgtagtccaggatggtgtcctgaccctggaacttgaagtacccgtggaatttcttcttctgaagcaggagtggaaaccagtagctgtcgtcgggccacatgtccttgaaggggatctgatccagctggaaccagcatgggcgcatttctgtaccaatgggggaagaggaggcactgaggtgcaacccaaacttcatgcttaaaaaacatgttttttttggccgggcgcggtggctcacacctgtaatcccagcactttgggaggccgaggcgggcggatcacaaggtcagagctcaagaccatcctggctaacacggtgaaaccccgtctctactaaaaatacaaaaaaattagccgggcgtggtggcgggcgcctgtagtcccagctacttgggaggctgaggcaggagaatggtgtgaacctgggaggtggagcttgcagtgagccgagattgcgccactgcactccagcctgggcgacagagcgagacttcgtctcaaaacaacaacagcaacaacaacaaaaccatgtttttttgtagagatggggtctcactgtgttgcccagactggtcttgaactcctgggctcaacgatcctcctgcctcggcctcccacagtccacagtgctgggattacaggggtgagccactgcgtctggccagcccaaacgtacactgactctctgaggagttcactgagtgattgtgaggaacctgacgatcgtttatatttcatcctcatgaccgtgtttctcattttagggtgggcgcagagcaggggcaggtacgctactggagcctcggtgcagagaccacggctcatgggccccacgctggcactgtggggtggagggggacgcaggctgcccggtccctggcactcagagatggtttgggcggatggcctttctcccagccaggagatgggacccgcatagtggggagggggagcaggccctgtgagactcaccgtcgctctccacgggggtcccctggatgctgtctgtgcagaagacatgcacgtccatgagctcaggctcgcccacgaactcaaacacgatctggcccaccttgtgcagggcgtccactgtcagaccgctctcctcctgcagctccctgcgggcagaggtgggcaggggagggaggccgtcagggcatggtgccatgcccacacgatggcagggaggaggagctgggcatctacacacagcccagggagccaccagggtggatgggagacccaggaggatgtcccctagaatgcattatctggtcccgacctggctgagcttcagaatcaacttgaactttgaagacactgattttggttgagaggctctggggaggggcccggagatggtgtggagcctctggtgggaggaacgcagttctagcccagtgccctctgtgtaccagtgacagcccaggcccagtggagtccagccacttgtccaccgtctcgagacccgcacgtggcagggttgggactgaccccacttccttcattcccggttacttgcttttccgcggctgagcatcagagcccatgcagcggtagttacgaccgccggggccctgggacgcttgctctgggaacctgggccctatactctgggcctgtctgcccaaagaaatgtctttccagcctggtgcctcttctctgagaacacaggatgaaaccacaggcttctatgatctgtttcctgaaggaggagctctggttttaactctggtccccaggctgaccacacgggacacgtggcctgggcctcttcctgcgccttctcgggacatgctccccacagctgtgcctggaggaggtgtaaggggctgacttcaccacgggatgcccaagtgctgctgcgcctgggaacaagcccttccctgcttcgtggcacacagagccaggtttccccgaagtagtctaacgctgttgctaatttaaaaattacatatttgttatagacaaccaggaaacaaaacgccataaactcatcacccaggaatgctaccatttcagtgtttttcctttggctctttctcctctgtttttcccttaagaaatgcaaacattaacccttaatagcttaaagttaaaaaataaaaatgcaaacaggttgggtgcagggtggctcatgcctgtaatcccagcatttttggaggccaaggtgggaggattgattgcttgagctccggagtttgagaccagcttgggcaatatggcaaaaccctgtttctacaaaaaggacagaaattagctgggcatggtggcactcgcctgtagtcccagctcctcaggagactgagatgggaggaatgcttgagcccaggagttggaggctgcagtgagctgggattactccactgcactccagcctgggcaaccgagctagaccctgtcttaaaaaaaaaaaaaaaaaaaaaagcaaacatcatacacactttatacctcgggctttccacgcaagaaaggaggagtgcatgacattccacacctcaaggaacccagccgccttctcaactcctgtttggtatggaagaataaaacgttccaacttcgggttatggtggaaacccgtgttgggcacagcggtgctgctgacctcccgttctgagcgtttgcttgctgtgctcagtcgggttcttgctcagtccctcagcagacacttctgaacacccactctgtgctgggaccctggggatgcacgggctgcagccgctgggcacctcagtctcctcctcttaccatgcacggctaatttttctgtgtgtgtgtttttctgtagagacagggtcttgctatgttgcccaggctggtcctgaactcctgggctcaagcgatccttctgctttggcctcccaaagtgctgggatttcaggtgtgagccaccatgcctggtctaaatggtctgatttaagcgatgcctcctcagcttaaactgcagggactggagaggaaacggacctggaatcagcatttattcatacagatggctaattaaagttgggcttgagctacaaagtgaacgtgtgcttctacttgggtacaaatggctccccagttagatgcaatagaagtgctcagtggggcctcacccgcctcttggcggccggctgttgctcgtcttaaaaagcgtcacctcccagtgggatattgtgactgattttagttaatcttccctagcacatggcagcgtaggaagcatcaagaatccgccgggagacagagctgaagctccatttcccaggcagggagcgccaggcaggcgaagatgacgctgttcagttctgcccaagtgtctgctctgtccatggcactcggttccccaggcggaacacggggaacagggtgagaaatacatgaaacaaaaacacagggtggtgcagcgtccgtggcgtggggaggtgggagtcggaggttccggcgggcctgcttcccatcgctgctcctgtgtccccggcctcgctagtctttggggatcagggatgctgtctagaaaggtcggctcacaccgtgcgcctgaagcccaaatctgcacacccccacaattcagtactccctacgtgcctgtcccctgccccacagaggagggtctgagtccagccctctggactggggttaggcgctcaggcctgccccctgcaggcaagcggggagggtgcctaaaccggctcttggcctgggagttagggcccatcttggggtcctcctgatagaataggactgggtattgcgtggataaagcaggaaccagcctccccagagaccgggctgccgacgctcctccctgcctccccctcctgagcagcacgggcctggggttgccccaggagcaaatccattcagactcgcaggtactgaagcccagggccgtgctggtggcctgtggctgatggtacgtcatcccctgagggcgaggctgtttgctgctgggttcccggggccctgggacccctaagcaccagcctgtctggctccagtgtcccccattcctcatgcttgcagatgctccccaacgaaggatttttttctttctttctttaagacagggtctcggctgggcacggtggctcacgcctgtaatcacagcactttgggaagccgaggcgggtggatcccgtgaggtcaggtgttcaagaccagcctggccaacatggtgaaacccccgtctccaggttacacccgaggatggaagtcacaggcttccggctctgtgcctcagttccccccctcaaaccctggtctgacagcaagccaccgctgtattcagctttgagggtctggagtgatggtccctctgtttgtgtaatatttacagagggtaggaggaaagttccttcgaccgtgacaaagttcagaagaaaataaagcagggctgccgagggggcctgtgctttgcttgtcaccagcaggacgagaagcggaaatccagccacctggagttcctccatccagcctcctcagcaccgctgcctgctccactcacacccaccacttctctgcacagctggcgctcctccagccctctgtgcttctgcaaatgtctccttcctccctccttccacactctcccagccaacgtcaggccctcagagcattttcctggtgcccagttattctcccttcctttctcctggaggcccctggccacgaggtatggaccagacctccttctgcaggtctcctgaacccggcagccagatgacacgagagctccacagaggcagggactgacctgttcctcctcatgtccccaggccccacacagagcagcgctacagaaatccatgagctgatgggcagtcttagcagatcaaagacaaagggctgggcagagaacccccggggccacctttcctgtttcctgtgctgtggtcgctctgcacacactcctggcagggacacgctgtatgcccgactcacacccagtggtcctcctccccagctgcggcccccagcacagagcctgtcgcactggcacctgccacagtgactgatcgaacgtgtccgtgtggctgcggtctggggtcccaagccttggaggggaagcacacacagggctctccaaactgagggttgggacccatgtaccccgggaaatcggcttagtggattgcaattgaaaaaaaaaaaagggtcaagccagtggcccacacctgcaatctcagcactctgggaggcccgggagggaggatcgcttgagcctgggagttaatgagacaccatctctacaaagaattaaaaaacgaactgagcgtggtggcatgtgcctgtggtcccagctgttcgtgaggctgaggcaggaggatcgtttgagcccaagagtttgaggctgcagtgagccaagagtgtgccatgggtgagatcccacctctggagaaaaaaagagaaatgaatcggaaaagtagagcccccttttatgtaataagggcggctactgcaacttactttagctgtacctgcacacctgagtgtgtacactctatcagagtacaaaacgtatttcttactgcaggttgtgatgaaaaaattggaaagccactaggctgcagcgtcctggctttcctccgtgccaggaccctctttactctgtagttctcctctccaggcaagctggcctacctttctcagaacaaaaacacgaacgggggctaacgtctgtgcagcgatgtttacacagatgatctcatttaccctgtgagggttgaggggcgtctggaggactgtgtgatcttgggtaaacggctcaacctctctgggcttcagttccttcctaggtgaagctggctgtgttgaggatgcagtga

SEQ ID NO: 97040 - DNA, 430598 bp, Homo sapiens
  misc_feature (1)...(430598): n = A,T,C or G
ggagtctcactcttgcccaggctgcagtgcaatggtgtgatctcggctcactgcaacctctgcctacctggttcaagcgattctcctgcctcagcctcccaagtagctgggattacaggcgcccgccaccgcacccagctaattttttctttttgtttttttaagtagagacagggtttcactatgttggctaggctgatctcgaactcttgacctcaggtgatctgcccacctcggcctcccaaagtgctgggattacagatgtgagccatggtgcccggctactcttaatgatgtattgacatctttccccaacagcacagctaaatttccaagtcgcataagccctggggctttcctggtggccccactggggctgctccgtccggaacctagaagaggcttcatggccagggctatggattctttgctctggatgaagctgagacacagttttcatctgttttgtatcttagggttttgagtaagattttctatataaaaaggttctcctgaataatgagatcagccaaccgcccatgcaactgaagacactgtcgtcattgggaaagtttcatcctattccatgtagtgcttgcaccgtaggttctttaaccagctccctcactgtggcatcaaggttgcttttggcttttggctgggatgcgtgtgctgtggtgaatatccttgccatttatgtttcctgctgtaaagccagggtagctgcatgcactggcatttgaacagggtgagacagtccacccagagctctcccaagtctctcccaaataccttagagtagggacactggtccccatttattggtgagaaaacaggctcagggtttcatgacttgttgaaagtgcagaaatggaatgctggccccctggatctgcacatctgcctcgctgctggtttgcggtaggtttgccatgaactcttggtgtctacctgcatccccttgggtggcccctgcccatacttaggcggggatatgcctcttcgggcttttcaacagcattttttttttttttttttttttttgtttatagagcctcactctgttgcccaggctggagtgcaatggcgccatctcggctcactgtaatctttgcctcctgtgtttaagtgatttccggctaatttttgtatgtttagtagagatgaggttttgccatgttggccaggctggtctcgaactccaggcctcaggtgatccgcccgcctctgcctcccagcatcctcgaggtgcttcctggtgcttccatcgtggtcagcctgaaagcctttttattgtttttcagctcaacatttattgactaaataagtgaatttgtgttggaaatgtcagttccttttctcattgctgagcttatcaccgtggagtcctcctagtaactgatttcagtggtttctgttcccctaagtgctcttgagatgaagcaggagagtggcccagcgtgccttgtaggaggaagtgacagaaggagagagcgtgagcgtgatctgcctgggcttgtcctcccggaagtcacaagcatgcagccaaagctgtttgccttcggtggaaatttccgaaggttgtaacatactggatattataggagtgaaagctcaggagcataaagtgaggcgtgaggccgggcgcagtggctcacacctgtaatcccagtactttgggaggccaaggggaggatcacctgaggtcaggagttcgagaccagcctgggcaatatggtgaaacccccgtctctacaaaaaattagccaggtgtggtggcatgttcctgtggtcctagctccttgggaagctgaggtggcaggggtcgctcgaacctggggaagtcaaggctgcagtgagctgaggccgtgcaacggagtgaggccttgtctcacacacacacacacaaagacacacaaagataacttgctgatatttgagtaacaccagtttgctaaaactaaaaagatgcctttgtgtcaccttacgtaaaacaagacttgttgcctataactgatctcagcatctgcctccccctcttctcactctgtacctacattcaaagccccctcttcacaagcccaacgcccccatctccccaacagtcccctccactgaggagggccgtagttctgttgagaaattgtcagagttgataagctaagggtacagtcacagattttcttgttcagtctgcttaacagaaaggctgttccaacggtagggggagagaaagggaccgtgtttcattcctagtgtaaacattggaagtccaggtattttgaagattacctcatttttcaaaggcgaaacccctcagtcttcaccccaggaaaatgggacgcctcacgcctcattttagctgggtctcctgagtagctgagactacagctaatttttatatttttttgtagagacaggatcttgctatgttgcccaggctggactagaactcctgggctcaagtaatcctcttgcttcagcctcccaaagtgctgggattttaggtgtaagccaccacacctagccgatatcagtttttgtacgttattttatatctgttcattttcctcatctcttgacttgtttccagtagtttctacattgaaagcaattggattaagctggagaatggatttcttgatttaatccagaggcactttatgtactagtttattattttctttttctttttctttttcttttgagatcgagtctcgctctgtcgccaaggctggagtgcagtggtgcgatcttggctcactgcaacctccgcttcccgggttcaagcgattctcctatcttagcctcccgagtagctgggattacaggcacgtgccaccacgcctgcctaatttttgtatttttagtagagatggggtttccccatgttggccaggctggtctcgaagtcctgacctcaggtgatccacccgtgtcagcctcccaaagtgctgggattataggtgtgagccactgggactggcctattttctattttagtttatcaaaaagagcactcagagataagaaccctttcacagagagtgagccttgggtagtgaaatgataccagatttggaatcagaagtcctgatgcctggcacaggtctgcccatggctgaggatgactctaggacagtcacttcctgtctgggcctcagcttctcagatgttaaggcccgccatctccaccatgtgtctttataggatgtatagatagagaaggcctgtgtttacctatttgcacattagctctttgccttggtcttgacattttatttttatttcatcactttgttgcatgtactgtatttttgtaaaaagattcagggtgtaaataaataacacattcaccatttcttccatagatcccagctctcctgttggcttcgtgcttggggtagatcttcttcacatattccccctggaaggagcaacttttctgtgccctgctgacgtgactgacccgagaacctcacagagaatcctcgaggtgcttcctggcaggagagcagatgtgattctgagcgacatggcgcccaatgccacagggttccgggacctcgatcatgacaggctcatcagcctgtgcctgacccttctcagcgtgaccccagacatcctgcaacctggggggacattcctttgtaaaacctgggctggaagtcaaagccgtcggttacagaggagactgacagaggaattccagaatgtaaggatcatcaaacctgaagccagcaggaaagagtcatcagaagtgtacttcttggccacacagtaccacggaaggaagggcactgtgaagcagtgaggatttcttgtgccattttcataatggtcattagctccttttaagctagaaacgtagcctgagctcctgaagagttcctgggagatttgagctgattttggagatggagcaggacaagtggggagtctctctctctctttctctctctctctttttaaccaaaaagagatgacaaaactaagttcaggggccatggaaaatgaaaaagtccgctatattgtgatttgggaagagaaagttatcaagagaaagaggtgaggatggaaggatggagaaaaacagactgtgggaaggatcagaaggaatccgccgaggcagggatgggtgtgcccatgtgtgccttgacgggacttcatcttatagactgttaaactgtcacacacaaacaggctttccacccctgctctgagagcaccacgcacagatttccagttcttagtgtggctgtttaaagtagaaaatctgggggctgggtgaggccactcatgcctgtaaacccagggctttagaaggctgaggctgggggattgcttgaagtcaggagttcaagaccaacctgggcaacatagcaacaccccccatgtctacaaaaatgaaaaaccaaaaagcaaaccaaaagaaaaatctgaaatttccatctggggattaacttctgtctttctggtgaacaatatagcaattcacgcattcttcaagcagcaaaagttcccggaacaattagggaagacgtatggtctgaatttatccaggcagtgggtctgctttggtttttgctggaaatttatatcagtgtctgggctcccaagaacataaatgtaattgccaaagcaagcagtgatgtggtgtgtttattttcttttactcatctaggaacttgacgcagctttatatttaataaaataatagagattgcattattttaaggtactttcatgctttgaagttttgttttttttaaactggcttcctcaaagccatttcctggaggtgtactcatccctcaagaagagtttgttgactatgattaaattccaaggaccagtgggggaagtctggaaacccaggaatctccatcaggaatctggggctctgtccagctccccgaaggaaactgcgggtcagatgttttgatttttttttttctttgagaaacagaatctcactctgtcacccaggctggagtgcagtgaagtgatcttggctcactgtaagctccacttcccgggttcacgccattcggcctcagcctcccgagtagctgggactacaggcgcccatcaccacgcccggctattttttttttttttgtattttattttcagtagagacggggtttcaccgtgttagccaggatggtctcgatctcctgacctcgtgatccgcctgcctcggcctcccaaagtgctgggattacaggcgtgagccaccgcgcccggccgccagatgttttgacttttcattttatttctggttgcagtcaggttgttaagtccagggactcttgccctactccacctcgttctcttattccatttcattcccggggcacacaacttggaagtctttctctgaaagaaggaaaattcattgcagacccttaggaacagcatcttcttagagggaagccaggggctgggcagagacgggaggaggagaggaagagaatatggaaacgagtaaggcacactcttctcaggaaggctccaatttgaaggatagacaaaggttaccataataatggtggggcctgacctcaccccattggatgctgtgccctggcttgcagagcactgggaaggtagcctagtagcataaattgcatttctagtgggcccagaaaaaagcaaaataacggattgattcaagctgatactgagtagcaaaattttgggaagagtcaacggtgcaagtttgtccgaggaggctgccgtgggcgcggctattccacacattacggcgcgaggcgaaagccttagtggaagcgcgtcctgcgcaaagccggggggcccccgactgcgccttggctcagccttcggttccgagtcctttccgtgcggagtctcccaggggtggcggctccgggtgcggacgcggagtccccaggatcagccggtgcgcagactcggttctttacggcccgattgccacgcaggtctcgcgagagcgcaggcgcaagtgtcgcgataaatgggcgccggcggagcggagggagatccgagcggcggcggcaagctggctgcgagcggctgaggtaagcggcccggctcgcgcgggcggcggggtcccggggtcccgggggtcccgggaatggcaagggaggggccgagggcccggaccgggtgtgctcgccagggtggggcacaacgacccagaccccgtgcctcaggaccccgcgcccgccccgtctcccatgggcgcgctctcctctctgtgctctcccctcctctccccactcccctgtccccactccccctttgggctgtgctggggacagcgggcccctcgcctgggtctccgcagccgtcccttgtgccagggcgggcggccgaggggcgcgtgctcgtggtcccagccccggggtcccgctgcctaccgtgtgggtccccgggctagggtgccggcgcgccgaggaaggrgcctgagctggcgcctggtggagaagtcggggctgcaggggctcttggcatcctggtggctcgcgccggtccgctctcaggaagggggcgtgtgggcccggtttcccctcggggatggcaagggccaccctgatctcgtytrggcaatggaggaattgggctgtggagcctccttccaggcgggcctgcctctgcggggctggcagcctggggagctcaggcctctgcttgcaccaggccaaggttcttgttaaatggaaactcagaaactgtgcagctgcagaagttctacctttggcttttaaacgcgcttggctgttccctagttgtggctggtgggccggcctgccatgagcccatagtaagcgccggtgttgggggtgcaaagttctttactgcggyttgtcttcagccttccaaagccagacagacccaagttccaatctccgttctgtaactttttgaagcttcggtttcatcatctctagaatctgtgtaaaaagacctaattcaccaccctgttgagactgagcttacaaatatagtgctggtcaacctgcagccgtattcccatcatctagcggtggaagacttgagggatattggccccgttccccacaactttgcaagtagatttcactgtcatgagtttacagatgaggaaactgaagttcaagaagtctcggtgctcggaaatgtcagatacctttctttctgatacctagttgaaaatagtagtagtacttattaatgtcactagaaataaacaatgaaaatgagcacagctgtgatgatcatcatctttactgtcactgttgcatgcctcgtttctgattcccagaggccagattttttttttaattaattattattattttttgaaacggagtcttgctctggcacccaggctggaatgcagtggcgcgatctcagttcactgcaacctccatctcctgggttcaagaaaatctcctgtcccagcctccggagtagctgggattacaggtgcacgccaccacatctggctttagtagagatggggtttcaccatgttggccaggctggtctcgaactcctgacctgtggtgatctgcccatcttggcctcacaaagtgctgggattacaggcatgagcaacagtgcctggcttatgtttatttatttatttattcattcatttatttattttgagacactgtctcaccccgttacccaggctggagtgcagtggtgcggtctcaggtcactgcaacctctgcctcccagtttcaagcgattcttgtgccacagcctcctgagtagctgggattacaggcgcacaccaccacacccggctagtttttgtattttattagaggtggggttttgccatgttggccattctggtcttgaactccggacctgcctccgcctcccgaagtgctgggattagaggcgtgaaccaccctgcctgggcaagaggccagactttgctgtgagtgctcctggtaggtagtttcaggcatcaactgactggattcaggaattcctagaaacctgggaaagcatcatttttggttttgggtgtgcctgttgagggtgtttccagaggagatgagcttgggagtctgagtggaccaggtgctgaagatccatcctcagagtcaggggcagtatctaagagcctgggggcctggagaggacaaaaacagagaaaaggcgaatgtgtccatctgcctgcaggagctgggatacactcttcctctcctctcctcaacagcagcactccaagctcgccggcctttggtctccaggacttgtcccagcagcccctcgaactgagaattacaccatcggacccctggctctgaggccttcagacttggactgtgtcacactgccaggcttccagggctccaacttgcagacggcctgttgtgggacagtctctgtaatcgcgtgagtcagtttccccaataaagcccttctcttgtgtctgtctctgtgtcctgttggctctgtgtctctggagaaccctcttacagtgcagttgggggacgtgccacctgagtgctgagccccgcctcccgggcgccagctgtccatctgtccatgtgcaactgagactcaattggtggcttgctggtggggatttggtggcatgcttccttgcttccattttttgtctggtaaatyggcagcatggctcccagttgccattgaagaatgtggttacaggcatgggtgtattatgagctccaatgtgcgttaggggagtggggctgtccagaggctctgctgactgcayggctgatggcacgtggaaaggctgcccctgaccagtcctttgtctgtccccggaaggaaagcaaccatggaagacctgggggaaaacaccatggttttatccaccctgagatctttgaacaacttcatctctcagcgtgtggagggaggctctggactggatatttctacctcggccccaggttctctgcagatgcagtaccagcagagcatgcaggtgagtggcatgtgcctgggtgggagtctgctctggggagaccctgggcccgggcaggacctcttcmagtcttctgtagttgaggtgggtcggtattagcagagcctaragacagctrttcgtctcccaggtctcactatgggcactcctcattttggggtcgtagctggaggctagttggggccctgagccatcctggcttaaaggcctgccttgttagcgccctgagtgggcctggcgctcagcattgcgttcacacaagtgcactcacagaccctggtgacaggatcggaaagccagtkcattcatctaattgaggacagaacccaaactgcctgggggagtgagcaccaggactgtcgggaaggctrtgttggaaacacagtgctgagagtgcctgggcagcccagagacaaagccacagcagtgagcagaaggactgggtgttttgtggtctcagactgtggagggccatttacagattttggggtgatttttacagttttcttctataaaatagttgtattttgtttcattacaagttcttggggtttctcactgtagacacaactgcagaggattcaggcctcctgaaggacttcaggctccaaagagtgatgagcccagtcccagttggggctgcgataayggggcccccaagttgtagggagtggtggggagtggagtgctggctagtagtgtctccagccttgcctgggccctgtggctgcgcaggctcctctaggctcctctgcctggaccctctttcccagtccctgctgcggtccccagagccgttctgtagttctgtccgcattagaggaggctctggcttcctgcgctctcagagcccagatgaggccctgctgcatttggttaaactgtgtgtgcgtgtgcatttgttttgttgcataattgaattaatgtgtgtttattagaatgctagcttgtggccagatgtggtggctcaggcctgtaatcccagcactttgggaggctgaggtgggcggatcatgaggtcaggagatcaagatcatcctggctaacacggtgaaaccctgtctctactaaaaatacaaaaaattagctgggcgtggcacctgtagtcccagctactcgggaggctggagcaggagaatggtgtgaacccgggagtcagagcttgcagtgagctgagattgcgccaccgcactccagcctgggtgacagagtgagaccctgtctcaaaaaaaaaaaaagaatgctagttgctagcttgctcactgccctttcttgatgaggactgttttttattctgagattaggtcatatatatatatatgtgtgtgtgtatatatataatatttatgtaaatgttcttttgtgaaattatgaaggtaatagatggtagttgttttttatcactgacaaaatgagaagtggccaactctgagctggttgcagtggctcatgcctataaccccagcactttgggaggctgaggtggctggatcacttgaggtcaggaatttgagaccagcctgaccaacatggtaagacctcatctctactaaaaatacaaaaattaggcgggtgtgggcacctgtaatcccacctactcgggaggctgaggcaggagaatcgcttgaacctgggaggcggaggttgcagtgagccatcgcgccactgcactccagcccgggtgacagagttggcaactctggtctgaaatgctgtgattttagtgttgcgaatgtctgggacctcttggcctgtctgtcaaagctgtgggattctagagtctgtcttggggctcggaggcccccagtgctcactggtaaaggcctctcggtgaggggatcagtgatggagtgcggtagtcagagcaaggtggtgagcggagtgatggcggcaagaccagccttggtccctggcccctgtcacatcccattcctggacttcgtcgtggttctctctctcctgctgagcccccggcgtggcagggagggcctggagaacatggcaggccgggggaatgtgtgctgtctggtttctcacacatcgtgttgatttaacgtaagggtaaactttcagggttcctttctttccgttgtagtcagctccaggcagaggtggcacacggatcaggtgtgtctgggactcctggtccctgccggtcgtgccccctgcaggcgggstgcccacccttctcgagaggctcaggcttgactgcagacacagaagtgagaccaggaaggctgctgagtttgaagggcagtcttaggaacgcccaaacagcagcagctgagaatcgagacacagtaacataggagtaaaggaagtgtgggcttgggccaccagagaacacaggtgggaggacagagaaacttccctcccctgtcccaggctttcctggccttggcacgcttggcatttgggctgggtaattcttttttctcaggactttcttgtgcattgtgggctgtttaacaacttccctggcctctaccccctggaygccagccagcagcagacacatgtgaccacccccctgtgacaatcaggtgtctccagacagggccagatgttcccaggggcaaaactggaccccactgggaaccaccactctactctggtgcttctcaacctttcatgtgcatgtgaacgccctgagaatgtgtctaaaaagaagtttctttttttcttttggagatagggtcttactctgtcatccaggctggagtgcagtggtacaatgttggctcactgcagcctccgtctcctgggttcaagtgattctccctcctcagcctcccgagtagctgagattacaggtgcgttaccaccacactcggctaattttcatagttttgagtagagacagggtttcaccatgttggccaggctggtctcaaactcctgacctcaagttatgtacccaccttggccccccgaactgctgggattacagacgtgagccaccacgcctggcctagattcttttgtttttttttttttgagacgaactcttgccctgtcatccaggctggaatgcagtggtgtgatcttggctcactgcaaccttcgcctcctgggttcaagcgattctcctgcctcagcctgagtagctggggttacaggtgcgtaccaccacgaccagctaatttttgtatttttagtagagacggggtttccccatgttggccaggctggtcttgaactcctggcctcaagtgatccacccgccttggcctcycaaagtactgggattacaggtgtgagccaccacacccaacctaaagagaagattctgactgagtaggtctggggtgtagtctgcgactctgcatttgttaagtgccgggagatgctgcactgcaaggctctgggccacgtgaagagtcagtgactctgccttttcctccagctgagcaggtcgtacccaaaggccggctctggaactatttggcaagtcttctggggctctttgaggctcagctaacctgtaatcactagccctgtgtggtaggcagacttctgagagggcccccaggagctcagctcacctgtaatcactagtcctgtgtggcaggcagacttctgagagggcccccagaggctcagctcacctgtaatcactaaccctgtgtggtaggcaggcttctgagagggcccccagattccaggctccttgtgcacactcaccttcctactgcctcccaggtttcagtccaayactgagtaggtttcattgctgtgggattgtgcagatgtaattaaggtctaagatctgttgaccttgagatagggagattacgtgggtgggcttgatccactccctggtgggcttgatgtactcacctgagccctttaagtctgagtccagacgtccgaggccgagcagtcaagagacatagcaggagagggatttgatgagggagattggacgtggttgactttggagatggagagggccgtgtggcaagggatgtgggcagcacctaggagttgatggctgtactgggctggcagccagtcgggaaggagacctcattctccatctctgagctccacgtgagaacatgtcctggccgactgcattgatttttagtctgggagaccctggtcagagaatgcagccacctacgtctggacttccgacccacggagccgttggctggtaaataaatgggtggcattcgaggccgttgccttcactaatatgcttaatgtcatctcaaaagacgtcttcctcttcccaggctttttcaccttcccgtttcctgcccctcccctgttccccagcctggagcccagtggctgggccacatcaagacttagcacgggacctgcgggaatgggtcctcagggagtgtgtctgctgcactgagtcactcacctggtttgatgccgtcactgaggattctgtttttctttgggtgcgacctgctcagctggaggaaagagcagagcagatccgttcgaagtcccacctcatccaggtggagcgggagaaaatgcagatggagctgagtcacaagagggctcgagtggagctggagagagcagccagcaccagtgccaggaactacgaggtgggttcaggcggggcgagggtckgcccagacagccccaggaagcaagggggctgtgcacggtacctgccaggtyataagaaatcasatccyagtccctgggagcaagggggctgtgcayggtacctgccaggccgtaggaaatgagaacccagctggctggaagcctgacacgccctgtgtcatggttgccaggacattccttctgaggccactcatgctgtggggcaggtatcagttatgcttgatgtcctagaggagggtggcatgaaatgggaacacttgctgtgtctgttcattgaggctgcggtgctggcacagattcttttgctgggtctcctggtttcctcttccctctggaagaattggaatgcaggtctggcagaaatgccaagtggtgtaggagtgacaggcttaggaggtcatggggtggatcagggtctcgggtccatgctgggtcttggggttggagggccctagcaaagggtgccggtctcaatggcggctctgtgttgctcctggctccccagggcagcagggaaaacaccctgtccttggggagggaattaggtttccactgagtgcgcggatcccctctgctctgattaacagcactttgccagggtttcagtcagtgctgatcagttgtggaaatgctgccaaggttcaggcagagtattgggcggaaagtctccctggcctccgtgccctctctyggcgggtggatgtccagccccgccctgacatcatgcggtgtattcacacactctcctgggccctagaaaaatagctcacgtcttccggggtgtgatgctggttggattgcttgcccctggcctgcagatcctgactgcggtgtgcgttgtgtgggctcagtgagactgaggcaccgctggggtgggggccactgcctcagggttggctccgttgctgctttgagagctgttttccctgagaggtggggcgtttgctcatggcctgggtgggtcctaggagggacagtactggaggaattggtgggaaggggagggagagtccacaggagtctccctaactactgagattcccttgttaggggtggagaggagccaccaggtcattggtctggaggcagcatgctgatggtatggctgtggctgtcaggcaggagggacagtgtgcagctgttggagttcctctaggccgagagtccctgagggcagggcccacccgactctgcccaggatctccattgtgtggcacagcttatggcattttatgggtgctcacaaatgttggattgagggaggggtcattgtagggtctccgggaaccctgtcttggggaaatccaaggatgcaggtgactgggcttacacctggggctccctgctgagctccagccaccttctaacaggactgtccttccttgcccgcagacacagctgcatgggaccccaggaacagtcagaaccagtagttttccaattgttccttggagttccacctggaaatacctattaggggcgagacttaagtgtctgaagtccaaagacctgctggctgccctgtctgcgctgggactggcagttccaggcccggtgccgcatctggctgtgatggtgctgagcggagccccgtgccaaccccagytcttgtcctgcatcacagaagggtctcttggttgttgtgaggcagcccttgcagctcacaagggctggagtccctccgaggtgcgcgggtcagcctctctcagaaggyggccacctctgtcacagctctcctgggttttgggctggagtaccctggatgaggacagcacaagctcgtactccacccggggctccgggagtgcttggtgcttcccgaggaaggcagggtgagagggtcccggagtgccrggctccaccaggactcaccgccttcacctcctgggacgccggtacctggcagtgaactctggagggcctgcgggtcattagagtcaggaggtctgagcgtggtgcttggtcatgtcccatcccaaccagtgagagccacgcggcctccctaaggccagtcgtggkgggtggstctggaggtttgtggtttgtgtgagagggggtgcatgtgtggcagatttgagcccagtgtaaactgcttctgcccacagcctcctgtccacgctgcctgtctctgcccctgttgtctgctcgctgggggagtgccagctcctttcagtgccggacagagcgtaattagacaggatttgctggtgctatgaaagctcagcttctccccaaggtcaatgctgaattttagatttcccatgccccctctccctgcagaggcaactgctgagcagacggtgtgataaatgtgtgtgtgatctgtgccaagtgcccttcytgggagccctgacctcgcacagtgctcaccgtcatggtgccacagcgggggtgccaacgctggggctgggtcccaggtcccgtcctggttctgcytatgacttggctcatgggtcctgctcggctcttttttgtgcctcggcatgttctgagagaggtgtgggggtgagggctccccgctgaccctcccgtgggcggcacgtggcatctgactcttgctctcttaacagcgtgaggtcgaccgcaaccaggagctcctgacgcgcatccggcagcttcaggagcgggaggccggggcggaggagaagatgcaggagcagctggagcgcaacaggcagtgtcagcagaacttggatgctgccagcaagaggctgcgtgagaaagaggacagtctggcccaggctggcgaggtgagcggggcctctgctgcgcagggagctgttttcccgaggagagggagtgcatgctcttgtttgccactgcagtgcccgcttgtgttttcacttgtgcttcccacacgggcagctgcgttttgtacatagttgtcatcagtagaagtattaattttccattctgtagttttcagttaaaaagttgagactttgggccgggcgcggtggctcacgcctgtaatcccagcactttgggaggccgaggtgggtgtatcatctgaggttgggagttggagaccagcctgaccaacatggtgaaaccccatctctactaaaaatacaaaaattagccatgcgtggtggtgcgcacctgtagtcccagcctgtgggactcgggaggctgaggcaggagaatcgcttgaacccaggaggtggaggttgcagtgagctcagatcacaccattgcactccagcctgggcaacacagcaagactctgtctcaaaaaaaaaaaaaaaagttaagcacttttttgcctttgtaattatgaatttaaatggatgatgaatctgttttttgttgtttgtggacgtttagtgtgtttgtgttcgctcatgtatgtatgcgacaggtagcccttccctcagccctcgcttctgttgactttggacagacccctaggactgggttataaggtccctagcgatggcggtctctgcagccgttgtgctcagaggcctggctgagggctccaatttcccygtagccttccctgtcgtggatggtggtcttttctggaaatagctgttgttttgtcaggaggcttaaggaggcacgtctggawttgcatatctttgactgtctgcaaggtctacaggcatctgatggcgtcggataattgcctctgaactggagcctgtgtgaactgcagtcctggtgaaggttgcttgcattttagaaacagcccagacatgggcactggtggaaattggaatcttctgacctctcctgtcctttgtctgtggcgatcaagatcgctggtgccaagaggaaacatgaaaatctgctggtgtgggggtggaggcgtggtaggggtggggtgggcgtgcagcgggggtcctggaggggtccagaaactggccgcgggtccttcctgtggccgtgctggggaggcgtgttcaggctgttcccctatctgcttctggagggaacgttggcaggagaggaggcgtgattggctcccgagaagctgctcttgccttgcccatgctctgggttccagttcccatgtgctgggctgtrctggagttgggccgggggctgtccccgctgcctgcgggcacctgtggttccatgggggagggtgagtcgtgccgagcacttcatgaggggcagaggagcaggagactgcaggagccgcagggcggtgcccggtggggtggggcatagtgaggggaagatggtggcgctgcaggtgctgctgctttggcctgtcatgtctaagccgaggtggcmgctcctcagggaagccctccctgcgcactaggccttgactgccttctcctgtcacagggtcctgattgtcacgctccttactctggaattatcttatgcgcctcttccttgccaactgtccggcgtcccctacaacacgggtgaccctgtgggcaggtgggctcggccctgcatctggccttgcccctggcacacggtgcgtattaattgagttcrgaagacctctgggaggatgtgtttattgttagtatgtttttaatacctttcttctttgttgactcccaggttgatgcttcactgttgtggtgaagtaaaccgtacatattgtgggcatgtggggagcacgcagcccccatgcgggccttcccagagcggcgtggggtggacagcggtgataggcttcagcaggccctaagctgggcacgttctcagggacagggaaatgagtgctgaggcctccttgtttgcggagggtgccgcccagccaggcccacccaggtcgtttgctgtgtgagtttgccattgtcctgtcctgggtgcgtggtccccagggctgacatcacgcccgtgtgtttccgtgtgttaacttacagtgatgcttctcagggtctgtccggcttttcacattggctcgacccacgtgctctttctttctctgaggacacctggggttttctgagcttttccagagggttagggtcctcagaaggtcgcctggtgggagtggtcaggaggaagcctggcggttctgtcgcgtgcgggttccatgatgtcaggcagacctgctgtcctggaggctgccagaggggctgctggctttgctcaggggccgcctccccaggggcgctcctgcccgtgccrcgtgctcccgttccaagcgcacggcctccccagcaggtaccgccctgccccttgcacagcctccgtctttgtcctgttggttggccagtgccttgctgtggtgtgagggcgatgtcgctagcaaacagccgtcatggtagcattggggtggctagggagggatgacaggagccacggttggagggaagaccgaagtgatggtgtggcgggtatgtggatgtctgatgggactttgggagcgtggggcactggcacagagactgccaggtgccaggcctgagagtccgggcccatcttggctggtggaggcttttgcttctgaagccgcctcaccaagcctcctttccagggcccctggctggggcccggtctcctctgtcagctcctgggtggcttgtggcaggctctgggctgtgctgctctggagcaccaggaggagggtgggccctgcgtgtgagcgtctgcctgacctgcatcctccagaaggaggtggctctgccccctggccctctgctcccctgctcctcttccccctgccctctgccccccttgcccccttgccatctgcccccctaccgctctgcccccctacccctctgcccgatgcccctctgcccccttattcctctgcccctctgcctcctgccctgattatagcacgtgggtggtgtcgcctctccactcttctcatctccatgtgcaggctccttccacgcacgggctccactcactgagcggctctctggtcccctctacttttagaccatcaacgcactgaaggggaggatctcggaactgcagtggagcgtgatggaccaggagatgcgggtgaagcgcctggagtcggagaagcaggagctgcaggagcagctggacctgcaacacaagtgggcggggccagggtgtggggtcgggggtcgggtcacgtgtgggggcatgcgtcccacctctctcytggtggctgggtgggatgtggatacactcccagatgctgtcctaattcacagacactcaagaggggcagatgctgaggcctctggagccaggaccgtgagcccagaaagtgtcctgatgttcctggagcagaatgggggcagcaacttcctccccctccttcttagagagggctcctgcagagccagattttactttattttttgagacagggtctcactctgtcgtccagcctggagtgcaatggtgtaatcatggctcactgtagcctcaacctcctgggctcaagtgatcctcctgccttagcctcccgagtaactgggtctgcaagcatgtgcagtacacctggctaatttttttttttttgagattgagtctcgctgtgtcacccaggctggagtgcagtggcaccatctcggctcactgcagcctccgcctcctgggttcagtgattctcctgcctcagcctcctgagtagctgggattagttttgcacctggctaattttaaaaaacgttttgtagagatggcggtctcgctttgtaacccaggctggtcttgagctcctggcctcaagcgatcctcctgcctcagcctcctagagtgctgggatcccaggctgagccgccgtaccctgctgagggctaggttgaaagggcagcatcatgtgccttggaggtggagggggcgtggctgggaagggatgtccaggcacagggctgagccgaggcacagacgtgagagccttgtctggaggtgcrgtcaggagactgtgggcatctcctgcagacttggacccttccatcagcagatgtsgttttaggagagttctagttccgtagtagagaggagaggtcattcctgggtggggccctaccgcagctgcaccagggctgggggttgccgcaggcaggtgagagctgtgggttccactgttggagaggtccttgcaggtggcctgggctcactacgcaccccgtctgaatgagcagactgaggcctgagagccagcccacaggggctggggcctgggaccttggggtacccatgcagtggagtgtgtgttggcggggggcggggggtctgtgccgtgggaggtcctgaaccttggggtgggaatgaacgtatgtgggtctgtgctggggcgggtctcaggctgaggagaattgttggccttgccgcatgcctgtttctgtgtgtgatgtatttttctttcaatagaaaatgccaggaagccaatcagaaaatccaggaactccaggccagccaagaagcaagagcagaccacgagcagcagattaaggtgagtcactccctgtcagtgccttgtggacatccctgtggtggccttgactctcctgcccctgtcggcctttctgcgctggtgccgagctccgtggtccttctgtgaggttagctgctgccctgtgtgytgggcactgtgctgggcaccagggatgccatggtgaatgaggcagatgcttccgctcttgggagcgtgtattctagaggagggagactgaccacaaacaccaagagaaaatgtccgtgtgtgtgatgacgtcaagtgctgatgagcgtgagaagatgctacaggcatagagaggttgagaaagctgcccacagttgcacagctggagctgggtctcagtcagggcatctgactcaagctcaggctgtgccatttccctgcggaggayrtgccagggagacgttgactccagatccctctcctgcctcctgttgcctggagagcagcctccagaccctgtgctctggccgtgccctctcagcccttatgcaccctcacctccaggcttcacaccagctcttcctggctgcagagctgcccggcacccccagcctggcctctgccatgtccgctcctggtggtggtccctggcccctcgcagccctcagtccacctctcaggattttctggctggcagggcgatggactctgttagtgtttgttgaatgaccgtctggtttggtcgtggtttcatactctgcctgttcagtgacttgctgctcacagatgccagctgtctgtgtcccaaggggactgggtaccgtagggaaaagcctgtcctcactrttggaaagactgagctgtcacaygtgctgctagagtggcagaagtgggcttgacacgggaggggtgggatgttttaccatggagtgccatcctggaccagacttgagacagasttttgctcctggagagctccccgagggcaggtggtgagcacagcagcccggcagtgtgcagtgtgaatgccagctcccagtacgcggagggctgggaggtcggcgctgggaagagctgccctggagtggatgctgaggctcagtattggaagcagcttcgaggcccctggtgcagcccaggaaggcctcccacaggagagtcctgaggcatggaggctgctgaggacctggggcagtttagcgaaggaactttgtgacctcaatgactttaatttttaatggrtggtattttctagagcaattttaggttcacagcaaaatgagcagaaggtaaagctcctgtgtaccccctgcgcccgctcctacacacacagcctaccctggtagagtggagcacgtgtgacggtgatgaacctgcctggacacatcagtgtcacgcagagtccacgggtcatgcgagggtcactcttggagtgggacagtgtatggttcgggcagatgtaaaatgttctatatttgccattagagtgtcacacagaaaagttttactgcctaaaaatcctctctgctcccccagtcaatccctgcctctctccttctgagcccttgacaaccccttcctttcccagaacgtcctgtggttggatcctgcagtgtgtatagccgttgcagaccggcttccttctcttagccgtgtgcgtgtgattttctccargtctcttcgtggctcatttttcccttcttctctgtccctggcctccatcaggatctggagcagaagctgtccctgcaagagcaggatgcagcgattgtgaagaacatgaagtctgagctggtayggctccctaggctggaacgggagctgaagcagctgcgggaggagagcgcgcacctgcggtgaggggttgcgggggatggggcagccgcctcgagtgagtctgggtttgtgcacatggagcccactgtgcagaccctgtaggggcagggctcccgggctcttggccttatccctagggtgtgtggctatttgagcgactctttgtgrcactgccagggagatgagagagaccaacgggctgctccaggaagagctggaagggctgcagaggaagctggggcgccaggagaagatgcaggagacgctggttggcttggagctggagaacgaggtgagggcctgtgtggtgtgcggttcctgtgggtgtcctctgccctgcctggaggagcctcggtattgtggtcacgcccaccagctgctcacctacaacatggaggttgctgtgatggggtgggaggcagaatcgtggtccccagagaggtccatgcctcatcctcagagcctgtgaacacagcaccttccctggcagggcgaatgaggtgactggtcagctggcccacggcggggaggggctcctgggccatcctgggggctcagagtgatgtgagagggacttggcagctcttgctgggtgtggagatggaggacgggccacaagccaaggaatgtgggtcatctggaagctggaaagagcagggaagtggactgtcccctggaatctgcagaaggaacacaaccctgccaacaccaggattccagctcggggagacccgttttggatttccgatctaaagtactataaaatattacatttgtgggctttttttttttttttttttgagatggagtctcgccctgtccccaggctggaatgcaatggtgcgatctcggctcactgcaacctccgcctcccgggtacaagcgagtctcctgcctcagcctcctgagtagctgggactacaggcgtgcgccaccacacccggctaatttttgtatttttagtagagatagggtttcaccacgttggctaggatggtcttgatctcttggaactcgtgatccaccctcctcagcctcccaaagtgctgggattatagacgtgagccaccatgcccggccaggctttttaaatgttaaatttttttttgtagagatggggtctccctgtgttgcctaggctggtcctgaactcctgggctcaagtgaccctcccgcctttgcctcccaaagtgctgagatgacaggcgtgagcctctgtgccgcaccaatttgtgttgtttgaagccacttagtttgtggtgatctgtttcggttgcagcaggaaactggtacagagggtgagtcagaatgcgtgtggcactgtgaggatcagggctggcagggccctgtgctgggggtgttctgtcttcaccgcggcagttggtaggaaggtgtcagtgctggaaaacatcctgcagtcatgttgcgggcagaggaggaaactgaggttcagagaagctccctctcttgcccggtgcacagcaagtttggaccagaatttaggccttctggcccctgcctgggtcctctgtccttcatgccacttccctgtggccacagccactcccctctgtgcctggcacacctatgccgcctttctccggtggttgtggggcctggcaggagggcagactccatctgcagtgctctgcagctgcccagctgtccagctggccacttccagagtccccttgggtggcgtggcgtctctgtcctcttcagagctgtgatacagccaaggtcgttttggggccttggccctgtgacccacggtgaggtggctccctgtcagcgggggtatctggcagggactcttctctcaggtgctgggttctgtaggagcttagcctgaaaagacagctcccatgcgacatcttttctctctcccgcggtgtaatttattgtttgatggttgaagagttggggctctcaagccacattccgtagttgggtgcttgctgctccatgtccctgggccagctccttcatctccctgtctgtctccccgtctgcacagggaggagtggtgctggctgccttgtcaggactgtgaggctcacatgagtctatgcaaagtgctcagagcagtgcctggcgcgtagcgaatgttctgtagcgttggctgtcatatagttactagtcaagtgcgtgcctgcgcataggaggggctgtgagaatacctcactgacttgccgagtggagcgttgataacagcatggtgcttggcactgggtggaggtgaagcgaggccagaacaaaggcacagagtccctgccctcagattgcttccgtcctagaagggccgtgagactcacctctttgggatgcggctcagcatgggacaggcatgtgacacagaggggtgggctggcctgtaggcagtgtctcaccctccctcatgctccagggtggctgccctcctctcctagggcctgctggtcctggtctgctgtgtgatggcaggaagtttggctccaggactgagtctgtctgctccagggcttggttccctgaggagcccctggaagatgggggagggatgagtcctaacggctcaaggacccgaggctgctccctggggcacagtcaaccccaggatcctttctgaggctgtctgccttctccctccacagccacaygttgcttttagcttgctgggattcacacttgaatttacggggccaggaaggagtgaggcaggaagcgccagtgtggcttctgcagttggggaataataacccggccacttccaagcagacttggagcatgtagcgcccagctcagagatgagggcaggctctcctgagaggtcagggacttagcacygtgatcatgattgtcagtcttatgtgatgatcctgtggcaggtgatgacagggtctgtgcttttgttgtcttttcagaggctgctggccaagctgcaaagctgggagagaytggaccagaccwtgggcctgagcatcaggtagggaagggcaggtgtctccggggtcccgccttctttgaagggtcctgggtgaagagcagagcctgcttccggctcaccagcgcagtctccagccaggcatctctgtggctggtgcggggcatttgtcctgggctgctcaggtttaatgaggcctttcccagcggatggggcmgtggaacccagtgactcatcctgctgaagccttagtaacatcttcattcagaagcggaatatccacagcaaaccagtggcaggcgtctgattgccctgcgttgcggggctttgtgaaaggactctttttggtgtataccgaggaaataattgcttttgggggaaatcattcattttagggaactgtaaccagtggagatgaactgagtttttagaattaagaaaaacccactgtattaggctgttcttgcattgctataaagaaataccagagactgggtaattatgaagagaagaggtggaattggctcacgcttctgcagctgtacaggaagcatggtgctggcatctgctcggcttctggtgaagccgcagggagctttcagtcatggcggaaggtgaagggggaacaggcacgccrcaatgcaaaaacaggaatgagagagcgagagagtgagcgagcgtgagtagtgttgggagggaggtgccacacacttctaaatgaccagatctcatgagaactcactatcatgaagacagacccaagctgtgagggatccactcgaggatccaaacacttcccacggggccccactttcagcactggggattacaattcaacatgaggcatggggcagggacacagatccaaayggttctcacccaccatagtggaagacgattgtctggtgcttgtagcagcctcttcacgcagtctgtgccaagctgagtgccagcgcttgggtggtgggatgtggggtggagctgccgggggaccaccctgggtgctggggatggtattcttatagacaggtagctggaccgttcccaggtctggtcctgtctgtcctcctgccccatccttcccaggaccctgtgctcatctttctccagcagccgctcagttggcccctgcccttcagtcgcggtgcccctgcaggtgaccacctcctggcagctctggtctggacccctcttcctggttgccctgtgtgcgccaggtctcgaggaggtgcaggagcgatgcttttgaaggagccatcagagcccggggctcagggcccgaggtgctggtgccgaggcggcctcttattgtgtttgcttgtgagatttcaaggcttcccgcttcttgcctgtctttcctgctgttcttggaaactaggctgagactgagactctctgaaagagctatcctttgaccacaccgtccgactgctggttctggaatccattaccttctcatcagcattactggcttcagttctctgtcacctgaaagtgcctcttcattttctttgagctttgctaagtcagagcacggcccgggctgctgtctcctcttgaactccccctgtagaacacagacttctgtagggccggcctcagcggggcctaaatgctttgtgcttctgtctgttctctgggcttattaattgcttggaaggcgacccttctgctcccaggcatactctggccagatgagaaacctctgtgacttctttcctgtgaagggacatcagaggcccccacgtgcctgatgggcccggccctgctggagggtccagtgtgcagtttgccctggagcactgggtgtcagtcgggcacgagacctggcacagctggctgctgtctctggctggtttcaaagtactgtggatcctttcagccctgttcccgcatctgagcgccctgcctgggcatggcttgtgtgagggcgagctggcctgggggtgctgcctgggcgtggccagcatgagggcatgctggccccaggggttctgcctgcctgtgtcttctgtgttcactctgccctccctggtggccaggccctggatgagggagaggaggggttggtctgtagggctggtggaggtgggctgcctgtgcccaccaccagcttaaagtgggcgggaagcaagtggcatgcatgtgtggcgccctgcagctttgatgaggaacacagatagttcttcggaggctggattcaaggctccccctgccccccgccaccaacagtaagacctgtgtcaagtcactgcgctgctctgggccagtgttctctttattgaaagggggacacggagctcttctccccaactgcgtgtgaagatccgacgtgatcgtgtacttgtggagggccctgtgagttggagaggggctggtgcgagcgtcctctctgagcagccggaggctgatggccaggaaggtggatggagccgtcctcgctgtgggggtcgacccctagtctcctgygttggccttggctgtgggcctggtagagggcaggtttcctcacgtgctgggttgcctgccatgcctgggccccttcagggctccccgctgctccttgtgttgtgctccacagggcgggtgtctgagkgtggttctgcatcaggccgtgatctcgggtgactcacgctggacgtcagtggggtggtgctcatgccgcagtccacgggaatgcgggctggcggtcccgaatacggctcctagagagtccacgggaatgcgggctggcggtcccgaatacggctcctagaatcaccgggagggtttggtaaacgtgtgcatttctggctgcgcacagtggctcacacctgtagtcccagtggtttgggaggctgccgcagggggattgctcgagcctagatgtttgagatcagcctggggaacgcagttgagacccygtgtgtaccaaaacaaaaattagcggtgctcagtggtgtgcacctgtagtcccagctactcaggaggctaaggtgggaggatcacctgagcccaggaggagctgtgattgcaccactgcactccagtgactgagtgagtccctgtctctaaaaaacaaaaacaaaaaccaaagtggatttctgggtaaacctgagatgcactgggctttcttttctgtttttagggaccaggtttggggtagttcttaggaatttcccgtgtctggcagcattgaatgtggtggtgaagtcggcgacagggacacagatgtggtgagaagctggggccacgggggcccccatgggagggctgagtgcatttgctgttcttgtgtggagacatgcgtgcctctgtgggcgagcttggggatcccctcctctcagccgtggggacctgaggtgacatcagatgtcctggaagcagagggctctgtggctgggagtgccctgggcctgtgccgggtgggctggcgtctgcttgccttcgggcccaggctttgctgggatttggggcttgccgaggcccgaggccccgtgggtgtggaggagctgctgccactaggtggtgcccccgccttggtgatccttcccacagcagcttcccttgggtctctctggcctagtggaccgctgctctcccaccatgggacttgcttgctgacactggggttttggtcgatggggatgtgaggggcttgtggccactgttcctgactgccttcaggggggcgcttckggctgtcccatrcctgccttgtttctgaccagtgtcctggggccctcaggcctgtgggctctgggctgtgagctcctggcgttgaggtcagacgtcctttgtgtgggcccttccctaaggacagggtgctgacgtcctgcagtcctcagagggctcttcrgcctcrccccgggcttggataaaccctggctgagccccaggagagagtggcctggtcaccctcttccccatgtagggcttcttatgtcttaggagaggaggctgggcaggctggctggggtgrgtcagtgaaaccatgggaagaccctgtggaacgaggtccttatgtgtcacacaggcctgggcacatgtgacatgtgcagcacacgggttcacgcaggctgggggcatgttagtttctacgactttgaagtcacaggcaaggagggrcacagtgcgtgtggatgagcctgcgtgaacacacgtggggaagggcaggatgccagtgccgggagtgtggtgtggacaccctcatccttagggtgctggaagttgggctgagggagttagcagcagtgcgaggcgtgtgtctggaggcagcgatgtgatcagcttggtctcccaggagcatggtctgtctcggggagtgacttacgggtgaggaaagyggaggccagcacacaccctttgaggtacgtgtcatcctcggcaagacctcgggcacaggagggggaggaggagtaatacagagaggccagtgggaaagatggcgtgaggctggagcccatctgggaatgcaggatgcttgcttctctttggaaaatcacctgtttcagtagaatgaaagggggtgcaggccatctctgtaggcgaacagcacaaccatttgtaacaatccaagactcgtttgtgatttaaagttctcagcaagctaggaagagaagagaacttcctcaaccagctaaatgatacctgcagaaaaccagctgatataatacaaggtggacggactgcatccctgacatggagaccaggcagggtgtctgttccctgcacccctggttgcactgtactggagatcttcaccagtataattagggaagcaaaaagaaaagatggacagactggaaaggaggaagtaaaactgtacctggagacaacataattatctatagaaattcccagggaataaatgacaagccagtaggactaaaccgtgaggtttacagggtcacgggatacaaggacaatgtaccaaaatgggttatgtttctgtatactagcagtgagccactcgaggtacataccatgtatgatggcatcaaagtccatgaaatattaggaatgcatataagaaaatctgtgtaagatttgtacactgagaagcttaagacgcaactgagacattaaagatcacctgatgtagaaaaatggagacattgtaagaggaaaaatgaactcttttcccctctgctctcacacagcctctgacaccagatactggaaggtttcccccacaccaagcagttctccaggggtcaccagctggatgtcctgcagcctcatctgcacactctccacctggagttccatcagcttccaatgggtcagggcccagtcccacacatctgtgcccccttcagattccaggtgcaagtagtaggccggcatctctgcttcattttacggttttcttctcttcctctttcactgacatcagctgtacttctgactgacaggctgttaaacgaggcccctgctacccactccttgggtttcattaattggctagtgtggctcacagaactcgggaagatgctttgttatgtttagtcatgtcttataaaggatgttacgaataatacaggtgaacaggttggcagagtgaggtgtgaggagaggcgcggagcttccatgccctctctgggcacaccaccctccaggagcctctgtgtgtgcagctctgaaccctggccttatttgtgggtttttatggaggcttcatcacagaggcatgattgattacaccattggccgttggaaatcaactcacccttcggcccctctcccctcctaggaggttgaggggtgggactcaaagtcccaaccctctaatctcaccttggtgtttcggataaccaccctatctgaagctgcctgggggctgccaaccagcactcagctcattagttcacaagagacactcttctcactccagataaggagctgcatgtatgtcagggaacagaaagaccaaatatatatttcagagtatcgtaaaggtactgtggtcgtgtattggaagattcattattgttaagatggcagtttgctcaaattgacccaaatatttaacatagtcccaatcaaagccccagcagaaattgatgaactgatctctaaaatttcttttttttttttttttttgagacggaatcttactctgtcgcccaggctggagtgcaatggtgcgatcttggcttactgcaacctttgcctcctgggttcaagcaattctgcctcagcctccccagtagctgggactacaggcatggaccaccatgcttggctaatttttgtatttttgtagagacagggtttcgccatgttggtcaggctggtcttgaactcctgacctcaagtgatccacccgccttggcctcccaaagtgctgggattacaggcrtgagccactgtgcccggctgacaatttctaaaatttctatgggaatgtaaagtacctataaattgttatagccataacagtttcaaaaaagaacaagttatacagcttacactggccaatttcaagacacgttgtaaattgcataaattgagacactgtggtattaagtatagacatgtaaatcaggagaacagagtagaatgttcagaaatgattgaagaatacagtgttgattgttgtcaaagtgtccagataattcagtgggagaaagaatcttttcaccgagggtggtaaaccagtaggctcttcgtggtgaggatgagccttaacacctgtctcatgctggacacaagatttaactcaaatgacgcatagacctatgtgtaaaagtcacaaaatctggaagctagggtttggcaaagaggtcttacaatacaacgaacatgaaccataaatgaaaaaattgataaattagacttcatcaaaattgaaaacttctgctctcaaaagatacagtgaaaaggcagaccatagactaggaaaatatttgcgagatattaacatgtatstgaccaaagatgtgctccaggatagagaaggaactcttacaaattagtaagattaccatagtttaaaaaatggtcaaaagacttttaacagatactttattatttatttatttttttggagatggaatcttgctctgtcgcccaggctggagtatagtggcatgatcttggctcactgcaacctccgcctcccaggttcaagcaatcctccagcctcagcctcctgagtagctggggttccaggcgtgcaccaccacacccggctaatttttgtattttaatagagacaggtttcaccatgttggccaggctagtctcaaactcctgacctcaggtgatctgcctgccttggcctcccaaagcactgggattacaggtgtgagccactgtacccggcctgcttttaacagatactttacaagagaagatatataggtggtaaataaggacatgaaaagatggtcaacattgttagttattaggggaatgcaaattaagactgtaatcgcccaacagggttcttcttgctgcccagaaagccaatgcactgagaacggcaggtgtggcagcagagagggagtttaatgattgcagagccagccgagggaggtggacgcgagataactctcacatctgtctccctgagaattaggaggcgagggcttgagggtgttttggcgggcagcggcctagggagtggtgaatgctggttggttgtgttggggatgcaatgataggggtgtcaggactgtctccgtgcagctgagtcagttcctgggagatggggtcacaagtccaggtggcatctcttgatctgctgaaatgctaaatctgaaaaatatcccaaagaccagttttttaggtttcacagcagtgatgtctgtaggagccgttagggaagttccgaatctgacaacgtctggttacgtgactccgggtagcaggcactgtagaagagcaagctaagtaagcagtgacaggtcatggtttacccgtgcctgttctttagcaaagttcaggcccctgtagcaatgccagtcttaatctccaaacaaggacgggtgtcatttttccttgccttgaagtttaactataaactacattcctctcatagttatcttggcctctgtattagaataagcaaaaaaaaaaaaaaaaaaaagaaaagatcctgtgaggttagaagcaaggtggagtcagtaatgtagatttctctcgttacttaaaattctgtaaaggcggtttcaagactgcagtgagataccactgggcacccaataaaatggctaaaattaagcagactgaccatcctgactgctggcagagatgcagagcagccaggcctgttgcccctgggagtagcaagtggtacggccactttggaaatggtttggtagctttgtacacacttacggtgtgaccctgcagttccattcctcggtatttaatctaagagaaacccaagagaaaatgtggtctcatgaagacttgtacaggaatgtttgtagagccttattctaacagtctgagagcaggaacaactcaggtgcctgtcagcaggtgaagggatacgtggaccgtggcgtctccacgcagtgtaatgcgcggcagcggcggtgcttggaaacatgaaagggtctctcttgctgagtgaaggaagccagacttactgagtttatacttactataccatcccattgatttgaactttttaaaaaggtaaaactgagcaacagtgatagaaagcaggtcagtgatccctggagtctcgtgctgggatatgattggggtcttatggggtgctagaaataccctttggcgtaatggatgtgatcgccgcacaggtgtacacgcagcaaagctcatgacactgctcttgtcaaactgttcacgtgcgcrgatcatacctcactcaagctggcctgtcaacagcagacggtcagctcttcggattagctgtgaggggaaggaaaattccttagtggcgacttggactgaattggagagtggcctgggggtgctgtttaagccagccttcatttggggagggacccatcccctgagtttatggaaggcctacggccacggctgcgtgcacctcctgggtctttgttacgtcacaggagtgctgtgaggagtggcagcatgtggggtcagtgcaggctgcagagggtcaaggagtttcacatttgatgaaaagcagaacaagctgcataaatgcaaatgaatggaatgaaaagtggaacgtgttcttcctttcctgccctccctggtgacctcactcagggctgggtgccctgtgtcacagcttcctagccatcgtcaccttgtgttctcagtattcctggggggctgttccagaatagaactgattgccccggaggtgggcagcagggcgtgctgtgcttggccccggttcgtctttctaggcaatgcctgatgagtttcctgtgtgtcgttctggaaatgtgtgtacatagaagctctttatgtactcccatcaccttttaaaattggggctccttccacagttttattctgcaactgttttcactcagtttttgacagttttttggccccagcgcaggctggtctgctgaactactttaaagaactgcagggtgtgctggagtgcagacggactcagactccagcagcccctgttgatggacacttagggtgtttccagcttctttccccaattagccatgctatgctggttgggtaaattcttaaaaggatgatttttagttcaaaagagatgtgcgtttgagactcctagctggtgccacaccgccctcccgaaaagcatgagtgctgtgcgctcccgtcacggcgtgtgactgccgtcacctaatgggggtggtgtgctttcaacgtttctagagagattcagctcgaagtcacagtacagtgaggagagcaggcatcttcaaaggcttggcttttcaaaactgtcatttagcagctcccactgagggggaccctatgaaataggaagggagtgggtgtcaagtcctgtagccgagcccccacttcagggaggaaatcatttgctcgtggccaagatgccgctgttyttggctccttgcctgtcccgttgtgcctgaatctggccttgcttcccatcccggcgggtgggcattatacccgtcagcaagggcaggcctgagggggtgaggaggggctgcagaggaggctgggctggggaggtgggaggcgggcattgctggctcagagtcctggcagctgtgcccacctggaactgctgacccatcccctgtagtcaaagctgggcacctgtcagtgctgacctggacattttcccaaaaacttttgtagactggtcagatgacaagtctcagggcccagcttccctgatgtgtgaggccaattaggaggacagtgaggggatgcatgattttcctctaaggaagggtctaattgaccagcctggacagttttattatcctagttaccgtgcgcgtgatttgtaattacccggctgttgagttgatcaataccagacgccctggtggtgcttgggaaggtgggcgactgtcaggtatgttggtccattttaattggcgccggtttggttttctttggggcatgggaggaggagggggagaagcgtttggccttctggctacttgtgtgagcatggcccttcttctgggcctgcatgccggatgcctcgtggtctgggccacgtttccccttttcgtttgttcattcgttcaccatgagctgctcttgtggagcccatgatctggagggagaaggatccctcaggcctgtgcgtctgtggtgtgcaggtcccaggaccctggagctggagagtggcgagtgtgctgccctccagaggtgcaggccagggtggggcgtgagccaggttcccagctccgtccgagcacggtgcctgccatctctcctcttctcaaccccagctcctcctgtggctgagtcctggccgctttctgcyttggggttgtgttggttttccgtaaacgcatcctstcaatcctgagcattgtgagttaagagctggggtctccctttagcgcccctgagccagaygtgcagtaggcgtgtgctgagcctttgaagagtggaggaccgagcgagggcgtctctgtgccttgcagttggtggtgatgtatgggcggagcctccagtgctcttggctgctgtgacagggcccccctggggtcctgcactatcccagcgagacccccaaagcaaggccagcagagagcttcctgacagctgcctcgctttggcgacrgccctggctggggtgcagcctgtgcccctctycgcccccttgtgaagtttcggatgggcgttcccagcagtgctgacaggctcacgccgcccttgggcttcattccaggtacggtcgggcaggctggagactgtcagagtctgggggcggtgctgtgggtgttgggaccccgcagggagaggcgagagaagggcttcccagaagagaccgttgggctccacccctgcatgtgcctgactgcacagacagctgagtgctctgcggcgtgtccgggtggaaacgctatcacttggtctcggagctctttttggggcttttctccaagctttgtagatagggctcttctacttataggtctctttttaaattgattttaaaaagtctaaggccagagtgacaggctttagacaagtccggctgccgtaggttccaggatttattttagaggaggcggtggcatccctggtggtatctgggctggtttttactcatgggtgcttactggggtcctgttgcgtgctgtcccctccttgtgggctaggggctcccagggtgtccacgtccctacttttacaggtagagcagggggtgccctggcgtggaatggaggaagggtctgggcagctttgtgacagggctggtaggagggggattttgacaggcggcttgaagccagcgccagccgagggccagaggcagagaagctgaaggcctcctctgggcagcccaccactacctgcccttctctccgaggacttcccagcagtgccatggccttcggagagctggggtctcaggcaggctayggggctccacagctccccacccaacattcctcaacgtcagctttggggctgtgaggtgtgacctctacaggatcacctggggtcactccctgcagccagctgtagctgtcatttgtgtcaggagctgctggtcttgcctgcaccacccacccttcccgccctccacctaccctgcgtggcctgggttcttgggaggaacaggagatcctgagctgttgaattcctggaacccacggtcactcrgcacccgcatcccgctcctcccagctcctgcacgcttctcactggtgtggtcacctggaatcaggtgccctgattctgctggacaggcgggaggggaggctgggccgaagggtggaccagcctttgcacgctcagtggctgcaggggggccgtgtgcatgaagcaggcggtcctcgtggtagcaccgtttgtgcagagccgcggtggggagagcgggcttgcgttcacagaagtgctgtgagatgatcacttcatcacaagccagtcagcaccagcctgtggggcggctcatgtggactaagtgatctgactttcctggcttttgtttgacgatgtttccactgttatccaggtgcagagagctctgatctcccacgatcggaagtaccgtgtgcgtgtcttacctgggcagaatgcagagaccttcactggcagctgtgtgtggaccctrgggctctgttacacagccaggtgctgaggagcagggctccgagccaggccagcgaaccttccttagaccccctgtgtgcaggcctggtgcctggtgtcgggggcccagtggagaacaagatcmggctgttgccatgggactttcgtctggtggggagtcctgaggaggatgtggatgaggtggagaagaggttccaggtgaacgcaagtgtccaccctgcattccagggtggcaggcggcccggggcgggtgtggggtggttgggtgggcgccccgcgtgctatgttagcgtagggtggtgcacacctggccggcaggccttggtcccgctcttcaccctccacctgtcgtgggtgcgccccgggaggggtggaggatggagggcaggcgtgggaagagctctgagacccttggcttcatggagagtgttgggcagttacccctcccttgccctcgggcctttgtgagtgtggcttcctggaactctgggggatttgtcaccagtgactgcagggggctctcccrtccctttcatccaggcttcactgtctgccctaagctggggactggtccagctgacctggatggtgcggagtgtgggccctgctggccagcatggcgttgggaagcacctaggtgggtggtgggttgggttgtggccttaccgcggagtctgggctgcagctgagaaagccgtctcctaggaccaggaatctgggtttgggaggctggaggtcttggcccagcagttcagtggctgcccggtgtgtctgcctggcctggccctcgtctggtttccgttgtctgggaggcacccctgcccgtgccaggcggggcactgcgggggcgcggatgcggagtggaagactgctgatttakgaatcgaaactccagggacatccgtgtagcagagtgattctaagatgattaagaaaaccatcaatgatttaaagaaagtgttcactgcagtccttattgagcggtttgccgcgtgcagggcatgtgggggtggcrcaccaggctgcaggcgcccttcatgacggcaggcaggggacctcctaggagtcttggctgtgacacgtgaggtatgaaggccagaaaggtgaacgtgtggaatctgtgacccagaagtaacaaactcctttcttggagagcagttaggtattccattccttagtccatatgccaacatttaaaaaggccaaaaccagaggcctagaaaatgtatctggaagttgcagtgagaccgtttttgatcattgtggccttcctggggctcagtttcctcgctttgcaaatgccattttggcagggatctgctgtggggcatctccgtgcaggtggagctggagttgcgcatctttctcaggctggcatcrtacaggccccagtgcactctggcagggaggggcagccccctcctggatagccccgcccaaggccgggaggactgtgaaggggggatcccactgcctgacctcagcctgtcgggccccacagcgcgtctctctgtggactggtcgccggcttcctgtggcctgtgtgtcctccgagtggctggagctttggaaccctattctgtagcttggagctcctgagcctcaaagggcaggggcctggttccttgcccatccttgcccagcctgatggcctgtgcttgtggactgtacatgggcacctgctttaacacctggaggagtaggggctaccaagagcatgtggctctgggcctccctgggagagtcactcagcggcaggagaactgagtgggacacatcagggagtgtctgtctcatggacgcctgttggcctgcagcctggagagggggcctgaagtgtgtgttccatgctcttgacccccaggaagcactcgcctctgttgaaagcctcgtgccgcakagcgcgattgctgtcccgggtggacggccatcacgggctccttgctccggcgatgycagcgctcctggtgttgtgtgtggctggctcccccttgtctcagccctgggcttagagcaggccaggtgctcaggcagtggttttgttgcttgaaggggggtgtgtacctggctgcagcctgtggagagcgtgagtggctggcagaagcaaaggcgggctcttgggagatgagagcaggcagccggcctggaggcttccatggggctggtcagctcctgctggctcttcctggcacaaatccacgctgggctgggtgccttggctcacacctgtaatcccagcactttgggagcctgaagtgggaggatcgcttgagcctgggagttcaagaccagcctgggcaacactgtgagaccctatctctatttttaaaaataaaaatataaagataacccttcctccaaaaaaaaaaaaaaaaacccaaactcatggtggaccttgggatgagcgggggcgcttgtggggcagaactgggtrtggttgccccgtcctgggcctgttcccaggcctgctcttagaggaggggctgatgggccctgtgggtgcagggagatggggtcagtcacaggctggggcctgggggctgggacctgggggctgggacccgggggctaggaccagttttggctctcaggcagggaggggttgtgaactctgttttgggaatgtgtgtttgaagtgtcagtgatgtagccagaaggaggtgtcagacagcagccgatgtcaggcctgcatggctcctagaggagccctagggctggcctgcccagtgaggggcagggatgagccggcctaggggagtggcagagccagagragcagacagctggcccgagtctggagggattttggcgtttgcaggtggctttgagcctgagggccagtgcctcaccgggtcagagagctctgcagcccgccagtcctggtcgtgcctgtgtccsagcttgggcccgtgtgcagggagaaggtggctgtgcagtgcacgtcgtgtgtaccaggcgtcggcggagtgatgcgtgggtcggggcgggagatgagaggaggagtgaggagaggctagaagcctccagagcagtggggtttcttcctcttcttcactggtgagtgcttcttgaacacataggtgtgcaggcctggtgctgggtgctggggatacagctataagtcaggggctgttttccagtcctctcagatctagccgggcatatgtctgctaggtcaagcgtggctcctgaagagatgacacttgagaggctggcagcatgttccagatagggtgggtgctggcagcacacaggttggccagatgctgcgtgttcggacagtgttgtgtggctccagctggttctaaccacagttctcctgggatgtggcagaagctggacaggttggcagggatctgtcctgtcctgagggtggtttggaccgcgtcctgcaggtcacaggagccgcagaaggtcttcatcagggaggagcacatccgccaattgtgaaggggcctctttcctcactgaattcgcagggcgaggacctggcgccttggcaggaccctgctggtggaagtccctggggctgtctgacccgctgcaggtttcagcagccccgaagtgtggggagggtgggcggtgtttcctgttgtcagttgagagcctcatggagtaggagccgtggagtcagcygcgttgtagtgagagttagaattgagcygcactgttcctgtgagcagggagcccgaggccttctgacttctgaagagggttcgtgttgaaggccagactctccctgtttttctgtttcctcttcaggtgaatgcctgttcctttgtgaccacagtgtctgtgggtagcactgtgattttggagacgctcgtttgtttgttcatctgaacatttatttggagacctgccgtttgccaggctttgggctggctctggcgacgctgtgacgagcacagcacagtctgcccacgtagtgcacacacacagacagctttaaacaatgaaaacaacaggggtgcctcctcagatgcaatcttttggaagatgccgcaggagcgttttgcgggagtatcttagttggagacggccttgttggatatgaatgacgctggtgggaatgaaggccagacgttttccctggtttggaaacaggtggcttacaagagtttctagagtttatttgtttaaagacagagcctgttctcaagasggtcttcactttgctggcaggatggcactgttgacggtggtggttggctctggagagctgctgtgtagttgacaaagcctgttgataatcagcgtctcattcgttcttcctcagaaccctgtggactaagctgggttctgggaggggctgactggcccaagggcatccagtgaatttgtggccctgttgccggaatgcttggctgatcctggagtatggtgagctgtgccctcaataacctccatccatctggctggccacatggtgccatgcagctggatcctgcatttttgtgagctgatcagcccgatgctggcactgaaaggattctgttgggagctgccatccatttagcctgagcggaactcagcacatgtgcgggcatgaagcccatcagctgatagcttctytttcagacctgatggctcccagccgaactttggcaagaaggacctaccagcctgctggagggctgacctgcctgcctttgctgggagccaagcacctcctggcagttctgggatttggttttcagtgggaggaggctctctgcaaggtagagtaagagcagtaattacttgggagaggaagcgtttaacttctgaggctgcaacacaatactatcttgttcgcrgargtggctgagttagaagattagcaattaattttttatcaggtgcaaactactcttcagtttcatggaatcaaacagtcctcccacagcaagggaggggcaggcttccaccccgtgtaatttttcagagcactgctgtttgtctgcttttgagctgataggaattatttacgagtctatttggaggacattttgacacacaattcttggtattcccatttgctctttctagtttttacttttcctgcattgctagcgtttactgcaattaggtctcaggagtattttgccttttattaggattgcaattacaaaatgcaggtatcaactaggttcctttaaatcaaagctcactttttattgactcggataagaaaagtaggtatttttagtagactgagttgaaaagagtgtcattggtagctattacaagcatttcttttagtttaggtgtttttattgtttacgagagcttagctgaagtggcatagataacccagtaggggtcactgctaagttatctgtaagttttctaagcttgagctttagattcaaatacttttttttttttttttgagacagagtcttgctgtgttgcccaggctggagtgcagtggcatgatctctgcttgctgcaacctcagcctcccaggttcaagcgattctcctgcctcagcctcccgagtagctgggactacaggtgcgcatcagcacgcctggctaatttttgtattattgtatttgtttttttagtagagatggggttttggcatgttggccaggatggtcttgaactcctaacttcaggtgatctgccttcctcggcctcccaaagtgctgggattatcagtatgagccactgcgtccagcccaaagacttttaataatagaaaaggtactttctcttgtttcatcatttagtatgctaggttttctttgagtttctgtaactaaacagtgggtacctatgataggttgggatggatttagggcagagtctggtacgttttttctgtaaagggctgggtattaatagtaaatatttactttgtagctttgggggccataaggtctctgttacaattasttggctctgcctttctagcccagaatagggtgattagccctcacggcttgtctgagactgaggagttttgcttgggaggtgggacctttcatgtgaaaactgagatgacccaggatgaaacaggactgtcactgattttagtgcaaaagctgctgtagacagtgcgtaaatgaatggatatggctgtgttccagtaagactttattttcaagacagctggggtgggagtaggtttggcctgaaggccatgcctgctaactcctacctgaggatacagggctagccatttaattttggtttaaaaaatccatgcagaggctgggcatagtggctcacgccygtaatccccgcactttgggaggctgaggtggtaggcagattgcttgacctcaggagttcaggaccagcctgggcaacatagtgagacctcatctctgcaaaagaatacacacacacacaaaaaaattagccaggcatggtggcacgcacccatggtcccaacaactcgagaggccaagtcaggaggatcacctgagcccaggaggccgaggctgcagtgagccgagatcatgccactgcactccagcctaggtgatagagcaagaacccgactcaaaaaaaaaaaaaaaaaaaaaaaaaatccatgcagagccttgctgccttttccctgcagcttttctttcccatgcagagccttttgctgcccacacagcatcatggtggtttcttcctttccagatttgggacagttgggygacggtgtggccttgcctgagggtggttgtggaagagagcctagggtgagactggcgtctcccggatcgcggctcagcacctgctctggctggagccttggcagtgcacagtgaggttttccggaggaatctggagttacccgcggccgtgttaccccttggtaataattttgaagggataaaacccttataaatttgctcccagggttgagaagtgctcatttctgtctcgcctttttttctggtagccgagggttcccaggagcacatattgtgatcacgtctgttccattcaacaaatatttgttgagggcttatgacgtaccgtggtgtatactggctgggagatgcagcagagagcaggacgcacggtccctgtgctgaaactcagcacagcaatgtggtgctgggkgcggaggcggggaagggctttgaggaccaagagttggagggccttgctgttctaggacaaggaccgtcctctgggcggggacgctttctctccaggacrtggtggctgtcggagctgggtggcccttgtctcacsccggttgcttgggcaagtgagtatgctggggcgtggcttgggccgatggtttgtgagcctgcacctgtcagcctcagtttgggctccctgtggggcgtgtgagtccctgttctgactgagggttgggttagggtttccagcctccctgcccctgggaagaggytccaccctcctccacgagtgctgagctccgggtctatttgtactgtgaggagttgcttttgtctccatcaaaaacatgaaccactgtttggagcacttccatttactgacaacccttgccaaattaattttatttaattatctcccagggctaagcttgaatacattttgtgttaagttcacagttttttccttttctaaacgaaatggacttaatatccttgttaaaatctgattaaaactaaaattgagttttttgaagtctgattatcccatgaaatggaattttaaacctaattacagatggatttgcatatacttttcagcaccattgaaaagaaacttggtataaatttattaatgacatccttttctctcgtttccttggggcatgacgttagtttaggagcatgagggaggtggggagaaacaccacccttctccccgcccttccttagaattttttaaaaaactttactctgtggagaatcagttccctaggagcctggggcatagtcacactttcattctcatctttgctgctttaccggcttaggtggctgatagttttcctgaattgtttttcaatactcagagctcttgtctttcggaagatggaagaggagcatgcacgatcatagctgctggtgtgtcttccctgtcagcttaaaacgcagatttggccgggtgtggtggctcacgcctgttatcccagcagtttgggaggccgaggtgggtggatcacctgaggtcagaagttcgagaccagcctggcaaacatggtgaaaccctgtctctactaaaaataacaaaaattagctgggcgtggtggcatgtgcctgtaatcccaatgacttgggaggctgaggcaggagaatcgcttgaacccaggaggtagagattgcagtgagccgagatcatgccattacactccagcctgggcaatcaggacaaaactccatctcaaaaaaaaacaaaaaaaacaaaaaaccccatggatttatatttaacgtgctacctccaccctgatttaattttagtttttaattttaagttttattttatgtatttttttttttatcgagacagaggctcgctctgtcacccaggctggagtgcagtgacgcgatctcagctcactgcaacctctgccagccgggttcaagcaattcttccgcctcagcctcccgagtagctgagattacaggtgcctgccactgcgcccggctagtttttgtatttttagtagagacgaagtttcaccatgttggccaggctgatctcgaactcctgacctcatgatccgcctgtcttggtctcccaaagtgctgggattacaggcgtgagacaccgcacccggcttaattttttttaatttttttgagacagagtcttgctttgtggcccaggctggagtgtagtggcacaatcatggcttactgcagtctctgcctcctgggctcaagccattctcccacctgagcctctggagcaggtgggactacagacacttgccaccacgcccagctaatttttgtatttttagtagagacggggtttcaccatgttggccagactggtctcgaactcctgagctcaagtgatccgcctgcctcagcctcccaaaatggtgggattacaggtgttagcctccaccctagttttagatacatttgtattattaaaaaagtaaaaacaaactctaaatgaccattaggtgaaataaacaagaaatttccaaagggycatgttcctgttctttgagaaatcccacttttccaggagggctgtttgctattgtgtctggactcatgctgcctgttgcgacttcctagtggcaggtggaggtaacaggctcccagcgtacttgccctcagtctggctgtcaccgtggttttgtttcgtctggaattatgtgggaatggaatcatacgtcatgcagtcatttgtgtctggtgatttcactggcagaatgttttctgaaaagcattcattcacatttgttgcttgtatcggttgtccttgttatatcgaacggatataccataatttttaatccggttttttgctcttgcagataaagattctgtgaacatttgtattsaagtctctttatgtatgttttcctgtctcttgggataatacctaggagtggggcctctgggtgatatggtatgttttaattttagaaaaagctgatgagccaaagtggctgcctaattctgtcccctggccacccgtgtgtgagaattccgctggccccacatcccgagctctttcattgaattccgctggccccgcatcccgaatgcattcattggccaccttcactttagccatcctggtgggtgtgtgcggtatttccttgtggccttcattcctgttgccctggtgactaatgatgttgaacatctactcatgtacttaacttgacggccatatatcttcttttgtgaagtgtcttttcaaagtcttttccccattttttaattggactgtcatcttctgagttggcagagtacyatatatattcatgacagagtcttttgtcagatgtatggtgaatattttctcccggtacgtggcttccttttcattttcttagtgtcttttgaagggtaaaaacttttaattttgctaagtctgatttatcaattcattttctttatggtttgtgttttttgtatctgcctaacccaagcttttagaaactttctagctttaactttactgttaattttgagttaatttttgtgtgtagtgtggtcacagttgagggtcgctttcctgccccacaatacgtatgtctgtttcccatttgaatttccttggcacctctgatgaaagcctgtcagccatacattcatgggcctttgctcgaggtcttctttcattgaatcatgtgtctgtcctttctccagtatggtaaggtcgtaattactgtcacttcctaatactctttgaaagaacatagtaagccctccagctttttctttgtaagaattgtcttggctattttagtttttttattttcagataaattttasatttagctttcagtttgttttctttccccccatttactttttatttcgtttattttttcttgccttagtgcactcactgggacctccagtgcagttttacctgggcatggtgagaatggctgtcctggccttgtcagccttagagggaaagcgtttagattttcctgaagcatgaggttagttttagggtcttgcgagatactgttcatcaggttgaggaggatgcttttcttttccccgatttgttgtattgggtcaaatacatatacaataaaattgactgttaactgtttttaagtgtacagttcagtagctttaagaayattcatattgctgtgcaaccatcaccaccatccacctccaaaactttatcttcccaaagccaaactctgtacccattaaacgctcgctccctgtgctcccccgttggctctaggacccaccattctgcttcctgcctctgtgattttttactacagtagggacctcatagaaggagaatcatgaaatatttgtccttatgtgactggcttatttcacttaacataatgtcctcagggatcatccatgttgtggcatgtgccaaaatgtcctttctttctaaggctgagtaatattctgttgtatggatagacgatccgttcttcttatccagtcacctgttgatggacacttaggttgcttccacattgtagctactgtgaataatgctgctctgaacacgagcgggcagatatctcttagagcccctgctttcaacctgctggatcctgtggttcaacttttaactattttaggagccactacattgctttccacagtggctgtaccattttacgttctcatcagcagygcacaggagttccagtttctccacatcatcaccatgtgatgtgattttttttttggtggtagccatcctaatgagtgtgaggtggtgtcttgttctggctttgatatgcatttccctaatgattagtggtgtggagcaccgttccatgtgctccttggccagttgtgtgtcttctttggaaaaatgtctatgcaggttcttcgcctgttcttgaatcgcgttattttcattgttgttttaggagttcccttgtatgttttgaatatttttctcttacagatacggtttccaaacattttctcccattctataggttgtgttttcagtctgttgatagtgtcctttgacaaatttaaaatttaaaaatttaccaagatttcatttgtctattttttttttgctgttatctgtgcctttgatgtcatatccaagaaatctgtgccaaatcccatgtcataaaccttctcccctgtttttttctaagagttttatagttttaggtcttacatttaggtctttgatttgttttgggttaattttttgtgtatggtttaagggcccaacttcattcttttgcatgtggagaccagttttccagcaccatgtgttgaaaagcttgtccattcctcattgaatggttttggcacctttgtcaaaaattatttgagcatacgaaagtgtttatttctgggatctctactgtatttcatgggtccatatgcctgtcattctgtcagcaccacactgttttgattactgtggctttgtagtaagttttgacttaaagtgtgactctttcaactttgttctaacttttcaagattgctttggcgagggacctttgggtcccttgagattccatatgaattttaggatagattttcctatgtctgcaaaatatttagttaggtcttgatagggattgcattgaacgtctagatggctttgggcggtgttgacatcttaacagcaagtgttccacacgtagtggtttctggaaggttagttgtggtacggaataatcttttcaaactgtygtactaaaattcattggtctcttgcactttgaatggacctttatccatgcatggttatgtaacatcatacattgctcatttgaaaatatcgacgcactgaattrtgtaggtcttttattatgccttattaaagaaattacaagctaatcaccacaagttattgaaaagtctttaaacgttaggaatccatcaagcttgtggtggtagatacaaatttttaagaatttagatatgtgtttggcagcttgagttttattattgtcaacaaatactcgtggttgtattctttcaaatgataacgtttatttaattcgtttttgagaaaatgtctaccagatgctcaagcctgagtaactattgttggtcagttagtttttaagtaaaatattttacataaaaagggctagttcagttcacaactcaaacatggaagaccaaccatcgcactttagtatgcaccagaaatgtcttacatgtgctttctatttcttcacacagaatgttgagatcttatcaaggggwtaagatttaatgaagtgaatattttaactgggcccagtactcctgtagttccagctgctcggaaagttgaggtgggaggatggcttgggcccaggagtttgtggctgttgggagctgtgattgtgcctgtcagtagccattgcagtccagcctgggcagcatagcgagaccccacgtggtgcccctggtttgttttgctaacgtgttatacccatcagtgcttttgtatcttcagttcaaatgtcagcacagttagaagaaaaaaggcaaataatagcttattattattattccttgtttttttggagacagagtcttgctgtgtcacccaggcttgagtacagtggcatgatcttggttcactgcaacctcaaccttctggattcaagtgattctcccacctcagcctccccagtagctgggaccacaggtgtacgccaccatgcctggctaatttttgtattttttggtagagatgaggttttgtcatgttggccaggctggtctcgaactcctgacctcaagtgatccacttagtattattatgaaaatagttttgatggccaggcacagtgactcacgcctgtagtcccagcactttgggaggccaaggtgggcagatcacctgaggttgggagttcaagatcagcctggccaacatggcgaaacctcgtctctactaaaaataaaaaattcgccgggcgtggtggcgcatgcctgtaatcccagctactggggaggctgaggcaggagaatcacttgaacctggtaggtggagcttgcagtgagctgagattgtgccactgcactccagcgtgggggacagagcgagagtccgtctcagagaaaaaaaaaaaaaaagaaaaagaaaatagttttgatgttacaagactgcctagaatggtgtctgcagaccacacttagtgaactgttgtcctagcgcttagtccctcaaggcgagaagaggctcacaagttggactcacatgtgatcctacagctctgtgacatgcttttcaaaaatattgtacaggataatgtaaatccatcctcactacaaagaaagctcaaacagtacagaattaaagtgaaactttcttggatttctctgctttttcaaattctgcygtatcccaggttaacattagcagtttgctataagtccttacataatttttatgtgcatggacgtcttacgtacataacaaatggcatcatacggcctgtattgttatattattttcccttggattgagttacttgaaatgtctggtgtttactctttagtagccattattccatcgtagaatgcacatattttaactatttccttattagcatacactacagttgttgccaattttttctttttgctattaacacacagatttagtgaataccatttcattaaacatattttttaagtgtatctgaaacattctttttattgatgggaatgctaagacatagagtatgaatatttaacactttaataatttttgccaaattacgttccaaaattatacttctgttaacagtacttaagattgcccatttttctgataacattcattgatgttgtyagtgtttccgatttttgccctttacttaaagtcagctgctgtattcttagcacagtgctttctgtgacagatgtttcagatgacagtgcttcctgcctgcaggctcatctgtctgccctggtagctttcaggctctcaggcaccctccctaatggaccgactggggtcaagggctctgaaaatgctgcccaccctggcccaagggcctcctgaacaggtaggctgggggtgggggtgagtccggtggcttagatgacaaatggaggtagaggacgcattctcgcctgttatttcgatttttttctctcctcaccctgacygtcacgttctcaccttttccacctcaatccccagtcacactagcttcccaggattaaaatggtctctctctcatgaaacttgtttagaaatctagaagcattaaaaaaaggaaaaaaaaaatctagaagcatgcacgtggcttagaaaatgcctttgtgttgccagatgcarttcccttgctttgacagtggcattcaatgtggtcttttaaaaaaagaaactatctattcctttaacatttttttgagataataattacatacagtgaaatggacagatcttatgtatataattgagtgagtattgaaaatgtaccacctgtgtcatcactgcctccgtcaggctgcagaaagtttccattacctctggaagttccttctcgtcccttcaatcaattcctacccccgggagacaagcactgttctgatttctattaccataaattagttttgtgtgttcttgaattgtaaataaatggaattgtactgtgtttattcttaaattgctgtcatcttttgcccagggctgggactaggggggaggcgagagagtgtgggatctacactgcacaccccaagagtgagattctccgagcaatcacctcctgaaagtttgtacgccggcatctctcttgcttcacccttgtcctggccctgcttttggacaacagagtgcttttgaggttcagccctgttttggggagatgagtggtacattatattttatttttattatttatttattttttgagatggagtttcactcttgtttcccaggctggagtggcatggtgtgatcttggctcactgaaacctccgcctcctgggttcgagtgagtctcctgcctcagcctcccgactagctgggattacaggcgtgcgctatcacgcctggctaatttttgtatttttagtagagacagggtttcaccatgttggccaggctggtctcgaacttctgacttcaggtgatccgcctgcctcagcctcccaaagtgctgggattacaggtgtgaaccaccgcacccggcccagtggttcatttttaacttgtacgaatctgcttgtttgtttccccgtttgctgtccgaggacatctgggttgtttcccagtagctgcctcttgtgagtatagctgtggttaattcacatccacatctcatgtgctcctatgtttccattctctcgagtgagcacccagaagtcaaattgctgggccttttaatgagtacgtgtataacttcataagaaattgccaaactgtcttccaaggtggtggtatgattttatgctcctacctggaatgtatgagattccatttgcattatattttcaccagtatttggtgtggctgtttatttttaaaacatcctttatttattccagcggttgtgtggcgttaccgacttttggctttaactcacgttccctaatgaccagttccctagtcagtgaatatgttgagccctttcttttttttttattttaaaatttttatttgagacagagtctcgctctgttgcccaggctggagtgcagtggcgcgatctccactcactgcaagctccgcctcccggattcatgccattctcctgcctcagcctcccgagtagctgggactacaggcgcccgccaccacgcctggctaattttttgtatttttttagtagagatggggtttcactgtgttrgccaggatggtctcgatttcctgacctcgtgatccacccgcctcggcctcccaaagtgccaggattacaggygtgagccactgcgcccggctgagttctttcttttgcttaatagctttgttttttatttttatttttatttttatttttttattattattatactttaagttttagggtacatgtgcacaacgtgcaggtttgttacatatgtatacatgtgccatgttggtgtgctgcaccgattaactcgtcatttagcattaggtatatctcctaatgctgtccctccccgctccccccaccccacgacagtccccggtgtgtgatgttccccttcctgtgtccatgtgttctcattgttcaattcccacctatgagtgagaacatgcggtgtttggttttttgtccttgtgatagtttgctgagaatgatagtctccagcttcatccatgtccctacaaaggacatgaactcatcattttttatggctgcatagtattccatggtgtatatgtgccacattttcttaatccagtctatcattgttggacatttgggttggttccaagtctttgctattgtgaatagtgccgcaataaacatagctttgtatctgttccttgggaagtgtctgttcttagtcttttgggaaattgtattggtttgctttctttctattattgatttttccaagttctttattctggatacaagtttttcatccagtgtatgtcttgtcaacatttttgccctgtctgtggcttgtcattttctttagtttttaaattattaaaatatacatgactactactgtaagactgactgttgttcttttttttttttttgaggcagagtcttgctctgtcacccaggccaggatgcagtggcgcgatcatagttcacagcagcctctaactcctgggctcaagtgatccagcttcctgagtagcttggaatacaggtgtgagccaccacacctggctaattttttctcttttgtagagatagggtctcactatgttgtccagactggacttgaacttgtgacctcaagtggttctcccacactggcctctcagagggctgggattataagcgtgagccaccatgccctgccgcttgtctgttttaaagtgtttaatttggtggtttttagtatatttgtaaggttgtacactcatacctactgtctaattccagaagattgtcatggtccccaaaggaagcccagttggccgaagttccctgttctcctttccccagcccctggcagtcactcctctgctctttgtctctgggtttacctgttctggacgttgtgtatcagtggaatcrcaccataggtggcctctgtgctggcgctttcctctcagcacgttctcaaggggcgtctaccctgtggcacggatcagcgctcccttccaccacatggcacgtggtcataccccattgtgtcatcagagctcatttcagtgacccattcatcagctgtagacatttgggttgtttcactttctggctattacgaacattcaagtacagatatttgtatgagacctttttttttcacttctcttgagtggaaacactgggttacatggtagctctttcttttttaggaattgccaaactattttccatagtaactacaccattttacattcccaccagcagtatatgaagattccggtttctctgaatttttaacccttattatgatgtcttttttcttatggttagcctygtgggtgtggagtggtatcttaaagtggatttttttttttaatgactgcatgatttttcattggatggatataccataatttaaacaatgacttattgtgggacaaaaaattatttccagttacattttatgatcttcattgtttatatcagtagtagtttatttttttaatgggattttattttttatttcaatagtttttggggaacgtggtgtttgattgcatggaaaagctctttagttgtggtttctgagattttggtgcacctgtcacctgagcagtgtacactgtccccagagtccattatatccctcttacacctttgtgtccttatagcttagcttccacttataagtgaggatgtgagatgtctggtttttccattcctgagtttcttcgcttagaagaatggtctccaactccatccacgttgctgcaaatgccattatttcattcctttttatggctgagtagtattctatgatatatatatatakakagagaccacattttctttatccactcggttgatgggcatttaggctggttccgtatctttgcagttgcaaattgtgctgctgtgaacatgcgtgtgcacgtgtctttttcgtagaatgacttcttttcctctgtaggattgctgtctcaaacggtagctctactttcagttctcgaaggaatctttgtactgttttctgtagtgattgtactagtttccattcccacgagcaatgtaaaagtgttcctttttccaccacatccacgccaacatctgttattttttgacttttaaattatggccattctggcaggattaaggtggtatctcactgtggttttgatttgcatttccctgataattaatgatatttagcattttttaaatcttatgtgctttttaatttgtatttctcayggctaacgtgtggaaacgtcagtggctgcatagaacagagacacaaacattacagaattagttcagaaaagtcatgaaacaagtaaaaaacaactacagctggcagcaccagcagccagccctggcaagggcagagaatctgattccagagttgcygcaaaattcggaagacatgcaagaagcaagaaagtataattcatacatggtggagaaagcaatcaatcagtagaagcagaatatcaataaaaagaaactataaggagaaaccacatagaaattctacagatgaaaagtacagcaactgaaatgaaaatttggtagataagctcaccggcatatttgagcagcagaagaaagaatcagcaaacctgaagataggtccgtcaggattctccggtaaggggaataaagcagagagagaagaaaaatgaagacaggatacgtgctttctccacttctgttcagcattgtgctggaggctctacccaggacgtttatgcaaggagaggaaatagaagacatccagattggaaaggaagaagaaaactgtctctatttgcagaagacatgattttatacattaaaaaactgaaagaatacacatttacaaarttattagagctaataaacaagttcaacagagttgcaggatacaagatcaatatttaatattatatttaatataagataatgtttaatattatacgttagcagtgaacaatctgacaacaattattatccccagagatattttgtctaattttctcattggcattttgctttgtttcagatgctacagaaacaagcccagtttccttgacagttgcactatttttattacaaaacctcactagacatttcacatttgaaaactctcagtcgtaaattaaccatggccatcaagtctctgtgatctgtggacagttttttgtttgcctcyaatgcttgtctggaagttcggcatgctttaggctagatrctcggtcttaagcaaaggccagtctcagaatgaatattagccagagatttcctgagatacctagaactggtgagtccttgatgaggrgctccggtgcaygctgggccaggtggtggccactctgcctttgccctcatttcctgcttgctcagagcttcaaggtgagcaggagggagaacccagggccttcacaggcctttccgagcctgtgcgcaacatgcacggacatggccccttagaatctcagtccccatggacagctcatttcttagcttttctgtgtcagcgttctggtgagtcttttgtttgccactgctgtcactcaggcatttgtgatgttgaagtggttgacagactcattccccaaccaagtttttgccctgggagagattaggggaggtgaaatcaagacaggactttctttcttttctttttttttttttttgagayggagttttgctcttgttgcccagtctggagtgcagtggcacgatcttggctcactgtgacctccgcctcccagkttcaagcgattctcttgcctcagcctcccgagtagctggaattacaggtgcctgccaccacgcccagctaattttttgtatttttagtagggatgaggtttcaccatgttggccaggctggtctcaaactcctgacctcaggtgatccacccaccttggcctcccaaagtgctgggattacaggcgtgagccaccatgctcggcctaagacaggacttttaattgggatcttaaggtagtaagtgacccagatgggtcaagtaataactcttctttgggaatggtattttgagagatgccagccccattctgttccctctgtcctgggaatgtagagtgcgatttttcttttttttttttttttgagacagagtctcgctgttgtcgcccaggctggagtgcaatggcgcgatcttggctcactgcaacctctacctcccgggttcaagtgattctcctgcctcagcctcctgagtggctgggattacaggcatgcgccaccatgcccggctaatttttatatttttagtagagacggggttttaccatgttggtcaggctggtctcaaattcctgaccttgtggtccatgtgcctcggcctcccaaagtgctgggattacaggcatgagccaccgtgcccggtctagactgatttttcaaggccaccatggagttgtggtgtgggggctgggaccagggtgagttaaaatgcyccaggcgcactcttcttgagagccacctgattttcttgaccaaacgttcccggattgctgtaagcctttggttagttttcagagttcaaaaatctgattctgaccgttttagtcactcttctgttgcttttatggtggagtgaacttccataggctcttactctgacatttttactgagatcttaatggtgttttggatgagtaaaaatttttgattttgatgaaatccaattcatcaattttttcttttgtgatagtagtttttcttttcttttcttttttttttttttgagactctgtgtcgcctaggctgaagtgcagtgatgtgatctcagctcactgcaacctccgtctcctgggttcaggtgattctcctgcctcagcctcccaggtagctgggattacaggcgcccgccaccacacccggctaatttttgtatttttagtagagacagggtttcgccatgttggccaggcttgtctcgaacttctgacctcaggtgatctgcccgccttggcctcccagagtcctaggattacaggcgtgagccatcgtgcccagcctaatttctgtgttttaagaactgttccatttcatggttgcaaatttattttatgttttctacctgtacatttgggtgaattcccctcttcttgaggtcctcccagtatcctgaggttcctgtctttccagcaagtggtcttaaccatctggaagatgggagagttttgttgctgttggctgcatgtgcaccgccatctttgacccttcagagtagtttgtcatgctttattgaatgagcattgttctcagatgacacgcaggtaaggcactggttgtacggtttgtccaattctatcacgttaaaaaggaggaaaggttcttattgaacctactgctgtgaaaattaaggagactcagtaagagtttctgaattctgggataccagtgaaggtcaaagatcatttgaaaatatttcgtttttatcaaagctgagttcaacaaattgttgtaggttaaatagcttaagaagaaaaggcaatgacttccccttgtatccagaaaatagaacataaaaccagcatccacaaataacctcagtaaaacttccctcttcagttcatttagttctgtgtaattaattcttatcctgttagatctagggtttataaactcatgaaaccattgcttcttgcctaaagtgaatttggaaatgtggacttaacctcctggtgtgtttgaaagtggtgtaagggttgctcttgcctccagagcctgtccccacaggtgtcagtcatggcgatgtcggctgcagtccttctccagagccactgagactgcccttcttgttgaagatgcaaactctggcctgtgagtttatcccgagctttcaggcaggcgtttacagagtcgagcagaaacttttcacagatgacaaagacttgatggcaatggttaatttcttactgataatttttaagtgtgaaatgcctgatgaggttttatataattttcaaacatgaaatgtctgatgtggttttaatagtaatgcaactaatgaggaaattgggttgtttctgtggcatccaaaacaaagataaaaaggcgattaaaaaattagacaaaatattactaaggataataattcagcctgtttcaaagaagtcagtggatgttaacatctgattcattgaaatgggtgaacataatttttrtgaagaaaacagtcttgagatgtacaatgttgagacaaaatattccyggaatataccaaagcatatcaaatgaagagactgggtaagtctgagatagagtgaaccatttttaatttcataaaacctcatgaatacatctgctgtacatgaatgcatagcactaggccacttgagaaccagtggcctagaaagtgccagattcaaattaaagaagtaatgtggctaatcattttaggtcattgaaattgtggctgtaacactatgttgttactgcctgatatcagggagagcacttgaaggactcggatacagaaaaacttgaccagactatttcataagcattttggtctgtgtttctcctgacattaaaacatattatggaatgtgaaggcattgacagatctccagggatttccactgaagcgcaccatttctgaaatacgtcttttaataacatattagcgattcacagttcacctggagaaggctgggtgtctcttctgatttcacaaccctggccacacagctcaccaagcaaacagttattaytagcgtatgttttttagaggagctcttgcctatcttttgataaatttaatcctaagaattttgtattattgatgataatttgagtagaattttgaagactgtcacctttccaatatttgctgttattgtatagacacagtatagtttactatgttgacagtgtcctgtgactttgctggattctcgtgtatagagacagtatagtttactatgttgacagtgtcctgtgactttgctggattctcgtgtatagagacagtatagttttagtgttttgacagtgtcctgtgactttgctgaattcagtcttagtgccagtaaatttttttttttaagattccttaggctttttttgtataaaaatagtgctatttgcaaataaagacaatgttactccttcctcttgagctttataccttttgtttcttttttatcacattattacattggccgggacctctggtacgacgtgaaatagcagtggtggtagcagatagcttgttcttatttttgatctgggggaaaatgttcaatatttcactcttttatttatttatttttttcctggagacggagtctcactcttcacccagtctggagtgcagtggtggaatctcggttcactgaaacctctgcctcccaggttccagtgattttcctgcctcggcttccgtagtagctgggattacaggcatgtgccaccatgcccagctaatttttgtattttcagtagtgacgaggttttggcatgttggccaggctggtcttgaactcccaatctcaagtgatccactcaccttggcctcccaaagtgctgagattacaggtgtgagccaccgcacccagactcatccttagactcgtatttaattaaagaaaatgtacaatgcagacaggatggctgatgatagtccttttttcctgcctgattttggttatttgtgctttttctcttctctcttaatatcttcagatgtctgcaactttattagccttttaaagtaactgatttttgacttggttgatttctcaccgttgtagtttttccatctgtttttaatctttatttcctgtctttgggtttattttgcatgcttacaaaacttcctgggtgattgtgtgggatggcctggacggaagggaccagggcttcaggaggaggatgagccccaccctttctgtggtgggaatgcctgagctctgttgggctgcacatggctcctactttggcagtcattcaacaagcctgaggaatgtggcttactggtaaaatagaaaagtatgttgccagagtttttctaggaccagtttgggggatggagaggatggtagattgaatacatacacctacctttttctttctgaaacctcatactgcagtgagaagtgtggtgggttttttttttttttttttttttttggcaaaggttcatgtgaataaggagaaagtaaagtcatagcattcctatttcagaagctggaatgtaattggagagttggtgatggacttagctgacttgaraaaaccaaatgctaatttgggagtggggaaagctgagagctagcttgatctgtgctgcagagttttgaccacgcttgggagctgtgactgcttacttccagagtggccacacgaggacataagagtgtgttgtgagccggctgctcagaggccctggtcsttgctcagcccagtgcagccggggcgggcattaggcgtgctgagcaggcggtaaagccgatggtcgtgcacttggcgcttttcgggacggggtgccttatggactacggtaagtgaactctgtgtgaccgccgagatgaccagctttgtccccactcagcattgagtctgggctggtggagcgttgtccactaagcaagagtagaagggcctcctgtggggactgagactatccagagggaggacagaaaggtactgaagtcgccacctcacaactctgttgccgtgaaacttacaggtggccgtcacagtcgctcattcagagcctcctagacatctgaaggagtctctgatgtaaaaggtatagaccaagcaaacagaaaaacagtgtagaggaaatggaaattatgcaaggataaaacttccaggaagaaacctctcataagcatcctcagtgagataaaagtggttattttaacaagagaagataatgaaacaagaaaaatgtcctctggaagaagcacattcagtgaacaagaagagttctgggaagttaaaactacatgaacagatatggggaaaaaatcagtgtaagtgttggaaaagttaaggagatccggaaagaaaaaaaagatcaaacaggagaaacggaatacactctgaggatcgggttctgtggascacattcaacaagtacsgcaaagaaacggcggggaggacagcataatgaaacaattgaaaaaccctctcttgagcgtcatcctcttctagactgaaggagccaccaagtacccagtccagtggatgaacgtctgtgatcaaagaccattgccatggcatgttgctggaccccaaatatcagggtaaagacagcatcctacacaccttcagaaggatgagaataggttacatacgaagcgggaatcaggatggctttgtgcttctagacagcagcattggaatttagtgcacagtaaagcaatgtggtctagagttgcaggaaaataattttcagcctttgattctatacccagtgaaactaacagtcgcatgagagagcagactaaaggcacaatggagatttgcaaagtctttaaaaaagtcagtcatcctggccaggcatggtgcttcatacctgtaatcccagcactttcagtggctgaggtgggaggatcacttgagcgcaggagttggagaccattatgggtaatggtataggagagtgagaccccatctgtccaacaacagcaacaatagcagcagcagctgggtgtgctggcctgcttgtagtcctaggtactcagggtacggagggctgaggcagraggatcgcttgagcccacgaggtggaggccacagtgagctatgaccataccactgcaccccagcctgggtggcagagtgagaccctatcttaaaaacaaattatctccctcaaatcttttttcagaaagctactggagggtgcattgtactaaggaagagagagactgatgactgaggaaggattggaacgcagggagcaggatatccgtcactgggggagaagcagctgaagatgatgcctgtgcccgggcagayggtgctcagtcctcagagcaggaagtggtgccgagaaagtctccccaaagacgagattgccaggcagcccgatgccgggtgagcatggacatctccagaggagatttgaacagtttaaagagccagggtggaatgagcgataaacagacagctaagcaagtgaaaaaccccttctcctgtyagcttgaggggaagcacaaagtaggaaggagttggaagtcaccatggtttcctttgtggcctcagtgtgagtggttgagcacccagctgtgctcagctagacrcggggctcagccagacgcggggcagctagagctgtggtgatggtggtacctgcggggcggcagaggggtggtgggagcamagagccatggcctcctcttccatcctgagaagtcacaggtaatgccccaaactgaagaattaggaaagtggcaatgaaagcctatcgtctagaggaagggaggtccgtttcaacataattgactcaaataacttagagtgtttgcttctgaggctgggaactggkccaggagatgcagagtggagttggggatggctgcttgccataacaagccttgtagtttgactatgtacactttgtttatgtaacttcacgaggaatacgtatacatggaagaaaaggagattcgactgggaatgccaggggcatgctagcaggtgctgtagtctcagccagaggcatgtgtgcagggtgcctggcaccgtctggggtcttctgtgcgcacagaccgcggtgtgcacgctcccaggagccatctgatggggcagcctcgagcacctctgacttctgacttcgccccacgggagcccatctggggctccagccttgacctggcagccagcagggctgggatgggactgcggccagccacgtgggttctcagctggttagggcctcggtcctctatcccttacctctgtcccacggagacccgtgcgagggcccatcaggcactcgagctggcaccacgaggactactgacggctttgctggatgctgctgggaagttgagccggccaaggtggcgagtggctgcgcctgggctgccccgtcctggcggcggcgccctcccgttttctgttctgggaagcacacggtgcaggcagtgtttgtgccttttcccagaggagccctttgtcctgaggaggcgtggatgttctctggagacccggggcctttcgcagcggcaccgtgacttcctgctgctgggccctgggccctgtgtggagtcgaggcctgcaggggcgagagtcagacgagagttggagtctggggttcacatgggattctgcagcttcccagcggtgtaatcttgggccagacatgtcccacccgagcctcgtgtgcttgtctgttgaatgggaagggtcgtggtgtctcgcaaggctgtgaagaatgaaagctgtgtggtgaggaataatggcagagaacactcaccaggccctttccaggtgctgctccaagcacttcctgggccttcactccagcagtcctccctgccaccctttgaggtgggggcactgttgtcatactcattttatgagtgaggaagtacaggcaggagaggttagcagctgtcctgaggactcacagccgatgagtggctgggatctgaacccacacagcagtgttgcattgccgtgtgctcttcccatcagacttaggcctcgtggtgatgagcttgtgtgtctatcccagggaccctccagatgtggctgatttctggcatctcttacgggtctggtcttgggctgcgtggtctcatggcccctttggcagcctgcatggtgccctcttactgggcacggtgaggcctcaggaacacagcagctccaccctccaactgctgggcttctctgctgccctttgcatggcggaggtgacccatatgtgtcccatctccaccctccagctgctggacttttctgctgtactttgcctggtggaggtgacccatacgtggcccatctccaccctccagctgctgggcttctctgctgtccttctctgctgtcctttgcacggtggaggtgacccatacgtgtcccatctccaccctccggctgctgtccttctctgctgtcctttgcagggtggaggtgacccatacgtggccctgctgtaatccgccaagcacttccgggggtgaggttgaggaatctttgtggggcatgtgtgcacgtgtgtgcatgctgtggctccagcaccacagtgttgacagtcctgtgagcctactgggtaagagcctaggttgaggcctgctgcctcctttggttgtgtggcctcaggcaggttatggaactgcacccatgttttcatctttaaattggggagaatgagagtgcccttygctctgctggcacgatacgcaggaaacgttgcttctcttcagcagattattaggattctctgaaagttctccccagttctcttttctaccccattcattaatggcagccaccagtggcgtagcagcaaggaaaattgggccgttttgaagcactatcgagttctgcctgtcttgctaaatcatctgtgttccaactgtgctctttgaactgttgaaggccagaagttgttttgcgtttgatcacctataaccgccaaccccccatgtgtttctgcctgtgtttaactggtcacagggagcttggggctcctccggttcccatccttgggagaggcaggcccatccactcagtacccacggcaggcacctggttctcatctctgacgccccgactttcccttctcagcctgtgtcgcctttcctgtgatttcctctccttgccttcctgggatcctgctagttccagcccatccccactgccgctacgccacttggaaaccctttctcgtgcagtggccaccttaccgtccctggcttcacttttgcgtcttgcaactattcttcactccagcacttggagggatctgcctgagatgaagcaatgaccacgagaccctgctcaaagctgtttgtctgtccctgccgatgtcacgatgaagtcctcatgtctccatgtggctgaccagaagcctcctgccattgcctggctctcccgcttctctgtcaccctcgcctcagcctctgcaccagccacaccgaacatgagttctgtgctttctcccactccctctgccctcccacttgccctcccctttccctgttacggcccactccagccccgaacacttagtggctttgaacagtgcttggtaatttttcaggattctgcaggttgcctggggccaatctggtggcagttggggatgggacatccaggatggctttatgtgcacgtgtgctgccttgttaatggccaggaggcagggctgccttctttcctcaggggctctctctggctaggacgagctgcttcacgtggctgccaaagcccatagggacaagccctggcatgcaggttccttaagcctgttggttgtggttgcagtagctgtggccagagcctggcccgggtgtttgtggaagggacgacctgagggcacgagtccgggaggcagggccccttcggatgcattcatcatttagggtttatctgcatcctgtctcgtctcaggaagccttccgcaacccctccacccagactgtggtccagcccctgctccgagtgcccccrgtgggcctttgtgctctcagtcctggccgacccctccacccagactgtggtccagcctctgctccatgtgccccctgtgggtctttgtgatctcagtcctggcaccttgacccgctgcttgttctgctctcctttaaactccatgcacctgacctgttaattgcacgcagcgcggagcctggcacctgcagtgtagacacactggccaccgctcagtgcaagagggcccctttgctaatgtgcacagctctttatgccttttttcctatgcctttttggattggagcaagagattttttttttccaagtaaagaayaatttatgttcctaaatactttttttccttgacatgacgaagttgagcaaggtggctrtagaactttttttcttaattttattgcacaagtaatgttctttacaaagtagggaaatacagatacataaaaagaagactgccaatcccccgtaatcccaccagtcgcatccctacccgctcttaggagattccggtttacctttgtagattttcactgtctacatgcggactttaaaaggtgcagtcctgcaggcgaatgtgtagccgcctgcgtttgcgtcataggtcccgaatgtcctttctgccacacaggaggccatcccacgcttgtcctgtcacggatcgtttgcctcctgtgaatattcaggttgtttccggttcttcctgttctgaacagcgccaggacaagcaccgggtacacatttttgcattttaaaacacatttagtaactcattcttcagctggggaaaagcccacgtaagagcccatcagcaagtccgagcgcgtgttcctcccgcttcagccgccatccctggctccttagcgtgttcctcccgcttcagccacaatccctggctccttagcacactcggaataaaacctgagtcytcycggtgkcctctgggccccacgccccgtgtgtctgccccctgctccaggcttgtgttcttcctccaccctcccagagctccttggtgttccggcctcaggaccttgacctcgtggcgccctccacgcgggagtatcgtcctgtgccttctcgcggctggttcacccacaccagccacatcatcagaaggaagagattcttaggcgatttttgtttgctgaaggagaatcacagatcaggatgaggtctcctggtcccttcctcccttttaaggacagataactgaagttcaggaaagcccaggccacacagcaggccagggaccagctggggccacagcccaggcctgcaggtgcatggctgttgcctttctagagttctgaggccttttctctccctttattgctcagcaagttcaaagaacatctcgctaatgatgcacctttttctgagtttctgttcgttaaagtcctttgttcccacattgcctttgattgtttctctagaagccagatttacttgattttcaattcactgttctttttttttctttttttagacagtctcgctctgtcacccaggttggagtgcagtggcacgatctcggctcactgcaacctctgcctcctgggttcaagccattctcctgcctcagcctcccgagtagctgggactacaggcacccaccaccacgcctggctaatttttgtatttttagtagagatggggtttcgccatgttggccaggctgttcttgaactcctgacctcaagtgatccacccgcctcggcctcccaaagtgctgggattacaggcgtgagccaccatgcccgtccaatttactgttctttactctgcaatctgctgcctctttgccaaaataaatctttgcaggtaagataggtgcggtggggagtgtgaaatttattacagaatggttattttgcttcttaaaaaatttttgttttaagaggcagagtcttgccatgttgccctggctggtatcaaactcctggcttacacgatcctcctgccttggcctcccaaagtgctgggaytacaggcatacaccrtcatgcctggtctaaaatattgtgtttttttttttaatttttttaagagatgaggttgcccaggttggagtgcagtgatgtgatcatagctcactactgcctcgaactcccgggctcaagtggtcctcccacctcagcctcctgagtagctggattacaggtgcccaccaccatgcacggctaattttaattattattattattattattattttttgagacggagtctcgctctgttgcccaggctggagtgcagtggcgtgatctcggctcactgcaagctccgcctcccgggttcacgccattctcctgcctcagcctcccgagtagctgggactacaggcgcccgccaccatgcccggctaattttttttgtatttttagtagagacggggtttcaccgtgttagccaggatggtctctatctcctgagctcgtgatccgcccgcctcagcctcccaaagtgctgggattacaggcatgagctgccgcgcccggcctgctaatcatgactaaaggtagaacagtcaggaatgtcacctgttatctctgaagtcatagtcccttggttttccctgacctgcctgctactgcgcccacttgcagcagcacctccgttgcccagtgaagcatgctgccctggtcttactgtttcaccggcactctcctatctgcgatgccactgtccacagcggggttgctttagggttycgagctcacctggggccttcctgggttctagccccgtgagctacaggcacttctttgtaaaaggggattccaccagttaggcagattccggttcagtctccagcagccyggggcccttcctggaagagtgctttgtgagcggagtgcgccgcccaggtgtgtagtggtgcttctcaggcccatgggctgcccttccctgggcctcttctgtttgaggcccttgtcactgggttcgcctggcatgatgatggaggccctgcagctccctgccaggygtggttccgcccaggtcattctcccggcccagctgctgtggacagtggacacacgctgtcacagcctcaggccggccgggccacgcctcccggaagygggcctgcttgtgtgtggttgcatcccaagctctccacttgctgcccctgttctgagcttcttgccgaagttgtgtttggggccattatctagctttctttttgaacgtttaaagcattcaaaagatcagcttttccaaagagtgaggaaacagggagagaaaattatggcatttgtttgaaaggttctgagggcttttttttagctygaacagttcaaacagcgcctcttgttaatcaggaatgttctggcatccctggggtggtcacacgggcttaattggaacccaggctgctttgaagcccttgagatccttcctgagctgggagaaagagtgcgagggcagcaactgtaaagccggyatttcttcattttatttacatgtgtctggggacccttgtaactcatgtccctgcagcagttgagccaagttgctgacttgtggacagctcagagagatgggggccagtttctggcaaaagagctgtaaaacatggcctgggtccagggctgcggcgggatcccctcctgggaggcgaggtctggatggaccacgtcacagtcgtggtggcgtggactttgctgctggcggcctgttcttgtcagaagtttccacatgggagaacgtgtggttttactgaagtcacttaatgagtgaccctaatagctctaagacgttcatcagtatggaccccaggacttacttcctctttcgcagagcatgtggacccacagtaaccacactggagttccaggcacaggtgtaccctgggggccggtcattctgcgtacacagacctgcctttgtcagcggggctgtgggcagcatggggtggccatccagccatggccatgttgctccaagccccaccgtggtcctcaggggcactctgtctcgccctgagcctccagccaccttgcccgtcagtctttccctgtacctcttggggatggggagtctgccacctagcaaagcacccacttgtcccaccccttccattctgttgagctgagacgcgtgttttggtcgtttcgtgccgtggacaccaccttggtttagtgaaacacggcgcagagtcccctctcccctggaccacgtttccccatttcagctccctgctgtgcacggctgcttcttcccgctctgcagagggtggtcctggtggctggagtgcggcaggcagcagcatcctcccatggtggctcgcatcccagagtgtgaccgtgggttcatgctgacggctcaggcatcccctgagcctggacactgaagtgtacagattgaggtgtgttgttggatgagtcatgacaagtggaacatgtgcactcgtccagataacacacttctatcagtccagagttcccggggtccccccagtscagcccttcatccccggcagctgtagcttagccttgtttgttgtagaacttcctataaattcttccctttctattttttttctttttctttttttttttgagatggagtctcactttgtcgcccaggctggagtgcaatggtgcgatctcggctcactgcaacctccacctcccgggttgaggcgattctcctgcctcaacctccagaatagctgggatgacaggcgtgagccactgcgcccagccgtatttgtattgcccaccttttgtttcgttgaatctgtgctcaggtgtcacctttccctagctagagccctttcctggccctcccgggtcaacatgcccccttccctcagcctcaggctttccactcttctccagatccggccactggatcaagccactgtcacctcctctgggccttggggatgtcacctgcccactcttgtcatggtcggcctcctyagcgagccactcagctctagctgcmaaggactctgtctgtttgtccatgtagtgtccttgctgggcacacagyaggtgctcagttaaatttgttcactggatgcagattctgcaggcatcttcacagattatgctgatggagcaggtgtgccctaccaccatatgtttctacaattgatttttttttggtgcaactgtcaaaaaatttatttttcctctaccacccgcaacccccmcccccccatttttcctgcttcttagtgtggttttagactctgattctgtcacttaacatatctgctgtctccatttgatgtgacctacaacctgataggcatgccgtctgcccctgctcgggcgatgggcgtgggcaccagcaaccgtcacaggggtccagggttttccactgactgccgggtgccctcagcgcagagctcctgcaggagggtcgaattgtctgtttcatagaccagaaaactgaggctcagctgggcccttcacctggctgcctccagagtgcgggctttctgctgtgccaggctgttctcttgcctctcccattcctttgcatcagtcggcactctggaacagtgcctgaggatgttagaatcaccttatgtctcctctggaaagaggccagtggatagagaaatatttatttctratcttgtagtctctgtttatacagcggttcgttatacaagtaacctattgagaagaggacataggtgtctgcatgcatccgcttctcagtgagtccatgctggactgtaactgttsccattttcctgaggtggggggttgaggtttggagagctcagagtcacagattcgcaatgaatggacttagaattgagtgcttgactractgcagacactaaggtgttaactctgctgcctctttatgcttgggatggtttgcagaacctgctttttgaaaacaagactatttacatgcacgtttctgttcccagtaattcttggcatggatgagggagatgctttgtgtcagattcgcatggtgaggagggggcagctctgagaggagccaggcccaggctgcctccagggcgtccagtgctccccaggctygcctaggagartgtcgattcctgctgcacagcaactctcatgaccaagtttaaaatgcattatacgtagaaaagtgtgcttctgtggctcacgcctgtaatctcagcactttgggaggccaaggcgggcggatcatgaggtcaggagttggagaccagcctggccaacatagtgaaaccctgtctctactaaagatacaaaaaattagccaggtgtgktgtcatgcgcctgtaatcccagctactctggaggctgaggcagaagaatcgcttgaaccgggggggcagaggttgcagtgagccgagattgtgccactgcactccagcctgggygacagagtgagactctgtctcaaaaaacaaaaaacaaagaatacatactgtcgcctgtgtgcccattctcaagaaaaaggaaagtttctttgaaaacatgtggaccttccctagttccatcccattacgcccccaacccacactcccagagcaagcccctgggctctgtgatcactcctgagttttgtaaacactgtggtgctcactcagtcctgctccctggaggccttggccgcccatccttaatgtgccggtttgtgcctgttgcacrtcattgtaattacatcatttaattaaatatggaagctgatgaaaaataattatgtgtagagcaatgtttctgtgaagacaaagctgaatgctttggaaagtcccaaaggaaaattgctaaaaaattgctattgaataaagcaaatagtgaaagattatgaggaaaagttgtaaggtctgggaagatgacagggatccactttaaagaaacaaagctaacaatcatgagcggtgtgtcgtggacatggttcatgcaaaaaaaaaaaaaaagatgaaactccaattaatggactcatgttcgaagaaaaagtttgcagcttgaaagataattgtgtgtttttctgttttaagttgaaatgtttgagatacacgcatcatttgattcctcacttagccaacttctgggatccattacgttttttttttttttttttgkgagtggtggattatagataactttatttttattctttgtgttttcctcttttaatggattttttttaagatatcatttacccctttaagttggttttttgtttgtttttttttttagtatttattgatcattcttgggtgtttctcggagagggggatttggcagggtcataggacaatagtggagggaaggtcagcagataaacacgtgaacaaaggtctctggttttcctaggcagaggtccctgcggccttccgcagtgtttgtgtccctgggtacttgagattagggagtggtgatgactcttaaccagcatgctgccttcaagcatctgtttaacaaagcacatcctgcaccgcccttaatccatttaaccctgagtggacacagcacatgtttcagagagcacagggttgggggtaaggttatagattaacagcatcccaaggcagaagaatttttcttagtacagaacaaaatggagtctcccatgtctacttctttctacacagacacagtaacaatctgatctctctttcttttccccacatttcccccttttctattcgacaaaaccgccatcctcatcatggcccgttctcaatgagctgttggatacacctcccagacggggtggtggccgggcagaggggctcctcacttcccagacggggcggccgggtggatgggcaggggccgccccccacctcccggatgggcgggggccgccccccacctcccggacggggtggctggccgggtgggggctgccccccacctcccggacgggctggctggcgggcgggggctgccccccacctcccggacagggcggctgctgggcagaggggctcctcacttcccagacagggcggccggtcagagatgctcctcacctcccagacggggtggcggtggggcagaggcactcctcagttcccagatggggtcgcggccaggcagaggcgctcttcacatcccagacggggcggcggggcagaggcgctccccacatcccagacgatgggcggccgggcagagacgctcctcacttcctagacgggatgtcggccgggaagaggcgctcctcacttcccagactgggcggtcgggcagaggggctcctcacatcccacacgatgggcggccggtcagagacgctcctcacttcctagatggggtggcggctgggcagaggctgcaatctcggcactttgggaggccaagtcaggcggctgggaggtgaaggttgtagcgagccgagatcacgccactgcactccaggctgggcaacactgagcactgagtgagtgagactccgtctgcaatcccggcaccgcgggaggccgaggctggcagatcactcgcggtcaggagctgagaccagcctggccagcacagcgaaaccccgtctccaccaaaaaatacgaaaaccagtcaggcttggcggcgcgcgcctgcaatctcaggcactcagcaggctgaggcaggagaatcaggcagggaggttgcagtgagtcgagatggcggcagtacagtccagcctcggctcggcatcagagggagaccgtgcaaaggggagagggagggggaggggcaggggctccattatcgtcttgatgattctgggtaggaaaccttgcagtgatatattgctgccccatttatagtgccagttatttgcattgttatgcatagctgagcgtcagttaggaatgatagaattgttttgttacaaatgtttataattagattttctctgcattaatttgttgtgggaattatttttctttttataaaatttttatgtagtacctgattctgcaatataaggttgcaatactaggctttgaaaattacttattgaacagctattgtattttcttggtacagaatattgaaaacattcaaaaagtatccagtggctagcccggcatggtagtgggtacctgtaatcccagctactctggaggctgaggcaggagagcggagattccagtgagctgaggtcatgtcactgcactccagcctgggcgacagagcgagcctcygtctcaaaaaagaaaaaaaaataggccgggggcggtggctcacgcctgtaatcccagcactttgggaggccgaagcgggcagatcacaaggtcaggagatcgagaccatcctggctaacacagtgaaaccccgtctttactaaaagtacagaaaaattagctgggcatggtggtgggcgcctgtagtcccagcccctcgggagtctgaggcaggagaatggtgtgaacccaggaggcggagctttcagtgagccaagattgcgccactgcactccagcctgggccacagagtgagactctgtctcaaaaaaaaaaaaaaaaaaaaataggatccagtggcaagcctcctgccatgttcttgttctccagcaggaggccattgttattttcttgtttatcttttagattttttttttttttttgagacagggtatcattctgtctgtcacccaggctggagtgccgtgcgcgatcatagctcactgtagcctctgcctcccaggctcaagagatcctcccgcctcagcatcctgagtagctgggactataggcactccccaccaggcctggctaattttttgtattttttttgcagagacggggttttaccatgttgcctaggctggtctgaaattcctgggctcaagtgatctacccacctctgcctcccaaagtgctgggattacaggcatgagccacwgcgcctggccagacttcttttgtgcaaaaatgaatcaacacagccatgcaggttttgacttttctgcacacggcagcatagcatacttatagtccgcttcttgtgtctgtatttagcactgcctttttggtgatctttcatgttaatataggaaaagatgtgtttttttcctcttacacaagttccattgtatggatagactacgacatttaacctgttataccgaacttttaatccagtggtctgagttcagtagaatgacttgcgtagcatttagtcggatagttactgttctggaatgatatgattttttttgctcattctcttagtatttattgaaaacgtattattgggccagtggaaaaaaacagaacaaaataaaaaacagtcccatgcctttctggagcctgcattccagtggagggggaaagacactaaataagcaggtagaaagatgcaggatctcagctggtggtgttctgtgaaggaggagagcaccaggaggagcggccaggagccagggctcaggtgacattccattgaagactcaaacaagtgaagagggggcaggccacgcaggcatctaggggtgcggtgttgtggaagagggctgtgcagaggacctgaggtgggaatgtggctcccgttgtgggaggttttgaggcagtgacgtggagaagcagatgcctcctgcacccctgtcctgcacaggcagtgtgtgggacccacatccccgtaggaaagtggttgctccctgtgggagtcacagcgtgacgagggtttgctgctgcgtgggcctttgggcttatggatkgggctggagagtagtggtggagcagccaggcctgaaaccacaccttgcctgggtccctttccatggggtaagagtgacctttcctctgtctgctgggaagagtgtgagtggcatcgtctgccatgtggccagggtgtcacggagcggcccaggctcttggtgagagggactggtgccccatgtgaatcccctgacttggggttcctctgatcttgggaccagagagtctgagctccagcttagtggcctcaggctgggtgcagcaggtgcagcaggtgcagcctcaggcaggtggctcctgcagaacctgacccagggccgggtactgcacagcatggcattagtcccctgtcttyaggaaaacaccagctgctcctcccgtgttctggggccatgcatctctcccaacctggcgaccccacctttccacacaattgtgttgcatcagccagaaaagtccggctgacatgacgccctgttgcccttgtgactttgcagttgtgaatgctgattgtcctttggtttgtagcactgaggttttgctgtctaatgtattttattcctatttctgcatacttttcgcaaaacaagccctgcagagacagcctgtgtcgcttgggttgtgttccctgccttccgcagggctctggctggagccccagcctcagcagttttggactgtggtcctaggccctgtggatttctattctttgaaagcttgaggtgtcttgtttgctaattagtttgatggctgttgctgtttcattcattttccacctcggagtcctctgggtctccagtttttcagactcggtgaaactggcactttgggcttcagctagagccccaacatctgctattagccccaaaatagctgtggcttgggctggagctgctctcgcctcggaaggaaagcagtaggccggactccccacagccctctgctgctctgcgtgcagctgggcttgagtcaaaattcagctgcagatagaacaaaaagactttcttccccttgaaaacccaccagttagaatttaaaaggcttcgcagctgaagcccgcgtgttcagcagcagatgtcacagcttggactgcagttggaactgtcactgccgtgtcatctccgagctgaggctcctgaggcctctgaatgccttccactttgtagttggtgaagtgcgggtttcagaatggactgtcgggagttattcttaggccgtaatratacttggcacggctcctcctggttacgagcacttagctaatccccagagcacccttggtaaacatctctgagtagctttaaccacacacaggtcaggaggcttctggaaaataaacactcttcctgccagttggaggtgttggggctctggtcttggatttgatgtgtggcgaaggctgcaattgtttaataacccttcatgattcaacagctcttcaagaactttcctctgttcttgtgtggagctcgtgacagccagtggtggtggagctccagccctctcttcccacaggcacaagccgggttcctgagtcccagggcttctcgggaggtgtctgccctcctctttcagacaccctctgccctgtgtcccagggccctgggcctgtgctgcactgagcagagactgtaggggaccggctctcccactcctcccagatgggcagcgtcttccgtgtcgggagcatgctgtgctgcttttctcttctcagtctcttagtttttgcgggttcttacgcatgtgaggtgtggacttgcatggtggggagctcaaatggtaacatgaaggggaggagccctctgagtgctgtgatttgttccatcattaccgcttcctgatcacggtgacctgcactgctggagtggtcagtggagccaggcctccccacaacagtgttcccatcgccttcttactattgatttctattcttaaaatattgtattacttagcactcttttgaagacgttccagtatatatcaaatgatcaaaagtccataaccttgtcctacgtagaagccaaaggtgtcatgcagtttcaggtgttcgartttccagaattcttgtgatgacatttgtaggattcttcttttagacttggaccaaattctgtaacctaatatttgtccttcagattgacagagaaccgcaggcagtgttttctctgtcacacgtgtggtgggtggcatcctggtgacataaagaattgcctttggtaacttgyccagaaggctgtagggttattttctgcttagactttcccctatttctttcttttcttttcttttccttttctttctttctttttttttttttttgagatggagtcttgctcttgttgcgcaggctggagggcaataccgtggtctcagctcactgtaacctccacctcccgggttcaagcaattctcctgcctcagcctccygagtaggtgggattacaggcacctgccactgcacccggctaattttttgtatttttagtagagacggggtttcaccatgttggccaggctggtcttgagctcctgacctcaggtgatccgcctgcctcggcctcccaaagtgctggcattataggcgtgagccactgcgcgcccagcctcccctctctatttatgcagatgatcggtagttccggaagtagttgtgtgtaagaatcaccagggagtttgtgtgcagcccctaagccccgccttcaggggggtcttgattcagtggggtggggtggggcggggcaggctggagttgcctcagatgactctggtgcaggtggtccatgccattagcccgacgtcatgacgccacgcaccgtgaaaccatgcatccactgccctcgccacacgcgccgtgaaaccatgcgcccgctcccctcgccacacgcgccgtgaaaccatgcgcccgctcccctcgccacrcgcgccgtgaaaccgtgcgcccgctcccctcgccacacgcgccgtgaaaccgtgcgcccgctcccctcgccacacccgccgtgaaaccgtgcgcccgctgccctcgccacacgcgccgtgaaaccatgcgcccactgtcctggttagagccgagcacatcctcgtgtcctgcgctttttgcagcaactgcctgaccacctttttgcccagcatcagctttaatgggtgttcagtgctcaatgttatggctatgaggacttgcttattttttttattgttgagcttttttttaaattaaaaactatgagatggagaaagtaagttggtgcagccacagtggaaaacagcctgtggtggttctcggaaaaaccgaaaaggggatgctctgtcagtgccgcttctgcgtatccacccgagatcattaaaagcagcgtttggaacaggcattggcacacccatgttcctagcagcattattcacaacagccaaaaggtgaaagcagcccaggtgtccaccgacgggtgagtggataaacgttgtgtagccacacaatggagtattactcagccttcaaaaggaaggagagtctgccacatgctgtaacatggatgagccttgaggacgtgatgccaagtagagtgagcccgtcacagagaaatgctctatggctccactcatgtggctggagtggtcgcattcttagagacggaaggtagtatggaggyggctggggctgggagcagaggggctgtgggagttcctctttaatgcgacagggtttcagttttgcaaaaktaagagttctggggataggtgtggtgctggttgcccaataacatgaatatgctcaacacgacagaactggggacttaaaaatggttaagatggtatattttatgttaagtgtattttaccacaattaaaaacatcccaacacggtggcaggatgccaccgtggccaggtgtggtgcttgtcttgggtttcctcaggatgtcctcttggaagagcgtggcaggtcagcaggtcaggcctgaggacccccctttgctcgctctcttagcctcgtccttttggagggtccagtcttcctcaggtagcaagccttcttgccaggccacagaagccccaagccggaggagcggctctccggctcccgtgctgcttctccgtgcaagcctctctgagagctcacagtccacccctgtggactcctccgcgtgcccagagcctcctgggctcctcctccccrccccgcttggttcaagggtatgtcctttactccagatggtggcctccgtccttctccacaggctgctgttaatacgagaagagggcgccggaatgcttcctgtagagttcaggaggtgacctcctgacccgtttgatcggattccaccttgttcttgatgggacctcctttgtggcctcagaaatgtccacatgttggcaaaaccatttcrtcttttctttttctgatatggagtgctctgaaaccattgccttaaacccattctgtttycactagctaaagctcatacacttcatccccagagagcccattttcttttatttatttatttaccatttatttatttttatacataatattttacatatttatggagtacctgtgatattttcttacgtgcacagaatgtggaatgggcaagtttagggtatttggggtaaccatcactttgagtatttatcatttccacgtattgggaaaaattctggttctcttctagctactttgaattatacaatacactgttaactctagtcaccctcctcttctgtggaacaactgaatttatacctttcatctaactgtatgttcgtacccattaactcaactctcttcatctgtggttccgctcacccagacctttcaatccactagttcctgtcattctactctctgcctttaggaggtgaatttccacagctcccatgagtgaagaygtgcagtttctttctgttcctggtggtttcacctgacacggtcacctcccattccagccacgttgttacaaatgacaggctctcattctttctttttttttgagatggagtcttgctctgttgccaggctggagtgcagtggcgtcatcttggctcactacaacctctgactccctggttcaagtgattctcctgcctcagcctcctgagtagctgggattacaggcgtgtgccaccacgcctggctaatttttgtatttttagtagagatggagtttcaccatgttggccgggctggtctcgaactcctgacctcctgatccacctgcctcggcctcccaaagcggtgggattacaggcgtgagccaccgcgctcggcccagctcttgttctttcttacggccggatagcattccactgtgtgtacatccccattttctttatccattcgtctgtcratagacacaggttaattccgtatctttgccatctttgctgtgataaacatgggaatgcaggtatctttttgatacagtgatttcctttgagtaaatacccagtggtgggattgctggatcatgtggtggtgttctgttttcagctttttgagaaatctccatactgggttccatagcggtggtactaatttacattccttccaacagcagctgagagttccctttcctctgcatcctcaccagcatctgtctgtgtgttttttggtctgtttattagccattttaagctgaggtaaggtggtatctcattgtggttttgatttgcaattcccccgatgattagtgatgttgaccattttttcatatacctgttggccatttgcatgtcatcctttgagaaatgtctctttgtgtcctttgcctactttttcgtgggattatttatgtttttttaattgttgttatttgagtttcttttgagttgtattttggatgttagtcccttattggccgaagagttgacagatattttcctgcattcaagaggctgtctcttcactctgttgattgttttcttggatgggcagaagctttttactttgatgtagtcccatttgtctatttttgtttttgttgcctgtgcttttgaggtcttagctataaaatctttgcctagaccaatgtcctgaagtgttttccttgttttctttagtattttttatatttttgggtcttaggtttcagcctgtaatccatctccagttgatttttgtatatgrggaacacattttcttttgattgacactgccgaacaaagggtatacaaaatttcacaacttttaacatgctggttgatgattgtacttgaagtgttttctcctcatgtccccggygacatccagrcaccgcctccacggtgcatgtcctctcccggcctcccaatgccagtgtgaaaatgggcttggattgcacaccctgaaaacagcctccagcctccctgtcccttccacatccataaagttaacggcatagggattgtcaggtaatagcagtgcactgtacctgtgccgtagggttttggaagtgagccttaggaagcccagccgagcaggtagggagttgagcctggaggggtcrgggctggggctgagacccaggttttctcccatgggtccatctccttttcctttaaggatgtcctggccttccctctgtctctgcaagtagagtagactggtcccgtgtgacgttcttgaaggctgtcatcgagctcactgtgcttgtgcttttgagtggaagctgaaccctggtcatgagcaagaatggccagacagggctcrygaggcttggtttagccaaagtggtgactgcgggtttttcagcgcaagaggctgcgaagggagggattccttctggtgcccctgtgccctccagcggcttctgcccgtgggaggtgttgggcacggctgcccctgtggttggagggctctggaatagcaagccctgcagcttcagtcctccctatgatgggggcctggtcgcatggggrctgagagccggcagggatctgggggcctagggatgtggccagcaagtatccaggctgagagcccatcacgtgacagtgctcccgagggctggggtctgtgtgggaccatccgcctcaggcgccagccttctgcctcagggcaagccatgctctctgttcctgcctggggcaggacaactccaggtcacacccacctcaggcaaggaggagcgtgcaggggagccacccggaagcagcctcctgcagagtcggtgggaatgtggagagccagcctgctccttgggtgatggagatggatgccccggggctccagagtactcaggtttctcctgtggcccatcagtgccagaatgaggcgttgaccccatgacatgagacagaggccttcctgggtgacgtaggagactgcctggtgcgtgtgccatctgtgggcgcccagcacttcagaagagagckctgtcactgtcacttttcagttgatttgaaccactcccatttcccccctcattgctaaatggttgcatttatcatggtcttggcatcactgggaatcgcagaacatggttagcagagcctggccctctgagatcttaccccagctcccagctttgctgggtgggttcgtaccttggggcaagaagcttgtttctaaatcggtgtcaaatgctcctgaccctgccttctgctctgcaggctgcagggaggcttccccacagagggaggtggcaggcagtgtgccctctggtgagagagaaccatcccagctgggagaaccctggggcctggtactgcctgccaaatgcctctccactggcctcctgctgtttcaggtccagtgacatgtgaggtccctgaggggtgtgaggcggggtggtcttggctgtgtaggtggagcctgtagcctgccgcctgtgaccaccccacctgccgctggttctgggcacaggggctgggaggcgccgttgcagatgtggatatatgcgatttttatttatttgttgtaaataaattctttgcactgagttagtgaaaatttacaagcccctttgattaatgcaaaacaacttaaatatctcattcaaatgtttcagaaaaaatatctcttggcttggaaaggtttccttactttcgtactgatatttttaactccctgaggttggaagctttgggaaactggagagaatggtcacggcgttcaagggcagctgcacctttcatctctgtcctagagttcagtttctcttccaaggtctttcagtcataaatggtttttccacggagctgctttctaaccccggtttgcctgtgtgtgtgaggacagatggggtctccccggtgccagctactccttctgcacccatcgctgtccccactagatgttcagcaaggggcctgttctttgggtgggcagaggaggcctctctgggggacrtggaagggagaaggccgtggcgtgctctgtgtgaattggctgtggtcagagggagggcttatgaccrgccctgggtgtgtgtgagggctcagggcctgggccaggccgcaggacatctgctcacaggctcttggtagctttgttccagtgatggaagacactccagaaacaccaaactaatgctgggcaaggcggcctccagctgtcctctgtgccgtgcaaaacaggcatgggatggcgaggggcgtgggggtggccagagacactgtaaggaagtggcccttcctctgtttggaggaggagctgggtgctggaagaccgggggaggggctgtgtgagcgctggatgagcygatgagggtttcgggggcccatgggtagggtgctcaagtgacaggaaaggtcagtggctgtctcagggcagagtctggtcgggcccagtgcgtgaggtttgcagcgtgcgcgttttaggcagcaggatggcttctgttaggggtccgtggttgcagtgtgcctctccgtggccgtggctgactcgcagagaggagctcccgggcaggctgctgggagggtgtgcccgggatccacccgaggctgctctgggggcctggctgacagagtgactgggacctctccttccaggggtgcaggtagcctccttggccaatgtcggggtccccgttgctcattcagtggtgcggtgcgggctccctgagtggggctgggtggggctctcacagcattgccagcgcctgctttctatgtggacctgcgcttggtccatgacaggtgaagagaagaacaaggatgggtcctcgggcctgagctcacatgccactgggtcagtctagccagggagccttggctttgtgccccaggttgtgaggctgggaatgctcacacaccactggcgtaactttgcatgcatggctcagatccttgctgtgtcctccggagtcccagcgttgagttagaagatgtggctcgggccgagctcagctgttgctgatcatcggggtgcactttgaactttgaagcggctgtttcacattggagtctgagtttcctcgtttaaaaaatgraaacggtgaacaacagggttgctggggcattcactgagacaatctggaatcgtcctggaaagtagaaagcgctacacctggagatcgctgattttactcttgttgttatatgtgggtcttctgaaggagaggtgaggaaaggaacttaaaactcgctgagcacctcccctgtgccaggggcctggcgggtgctttttaaacatgatttcgtttcctctgaagagtgacactgtcaggtcgtgtctctgtttctacaggtgaagtaaaatcggggctttctaaggtcatctccccggtgttgcataggggtgggggctgtggttgaccccaggctgtagtgcgtgcatgctgccctggacctgggtccacagagttcacacatcctgggtcccagagcatcagctacagaggttgcttttggccttctgttttgtgtgcagaatcaggtttacttctcggggacagctggaactgagtgtgccttgtttatcctgcaggactccagaagacctttccagattcgtggttgagctgcagcagagggagcttgccttgaaggacaagaacagcgccgtcaccagcaggtagacctggccgcccagggtgcttgtggggatgcgtttgctttggagagttaggggtgagtgagagtgtgtgccccctggctcttgggggatggctgtccttcatcatgtggttggccctggtctgggaggagatgggggagcagggatttgagggaagggtttgccccatgtttccaccatgtgctgtgagcctccgctgaggcaccaccgtccatcgttctgacaatgtgctaaactgccatggggtctgggggttggcctcctgttgtggggtccctccttggatcaggagggttcttgtcttcccagcagggttggggcctcatgtggtcttgggaaccagcccgtcggtcactagcgggcccaccctgagtcttcacgtcagcatgaatgcaggcgtgattggaaggggctcactatgaataccaagagacatgcccctcactcaggaagtcccaagggcttcagggaacctgggatgacgatcagatatgtatttcttcttatcccacagcccggctcttctctggtttcrctcgtggctgtgaggggccatycaggctccggcatcacacccagaggcggaaatgagaggcctcttttttggatcttttctgtacaagaaagcgtttcctaggacccccactgccagcaagggccccttatgcctccttggctaagaaggggtcttatgcctgcccctgaccagaaggtggagctaccatgagggactgaaccccatccggtgggacctgtggggctggtgggcagtggggtgggcttgcggcagagggaagggccgtgcaacggggccccaggggagctctgcgccctgcacggctgaccaggccgtgggtctgtgcggagggcctgaagctcacctgtttgccattgatgatcaagctcagccttgtcctcctgtggagagagtgttttaataatttattaatagccagaaggaggtttcttattttgggggctgatgtcactttgaaaattggcttttagaagcatctggttgtgttggacataatcacatcaatttactgaaaaacctcaaatgataaagattgccttttgctttcaaagccgctgtcagatgaaacaggcattaaaagtgatttgaagttaaagcgttcacactttaccaggcgatcctcatcattttactttggaaatgaaacagaatgaactattaaaggaaaggaaagttgcctgtacttttctcccaccaaacagggaggtgcttcctaaaattatttgccttgaccagcagcagcaggcccatctctgtgtccagggccacacggaagggaacattcgcatctgcatgctgcccatgttgccttcgctgtggtcagagatgtggattgagcccatggggggattggtttgggaatggggtctctgtctcagggagcagcctctacagtgggcaggtggtcctcacaaccccagctgtggctggcctctcaggacctgtgggctccctctgagagctggggcacccgccctggggaagggtgagtcttggggcatcccatggacgcgcttggtgctccgtcctgttctgtgaaatggggtcttgggggtgagacgaggtcctcagtactgcgctggtctgggaggccaaagggagaagctgccctgaaatcctgggttctcacaagcgtttccagcttgctttcatgtgtgtgtctgtatgctggcttctgtcccacgtgtggcttattgccctgtgtgggcttctttagccaaggtgcaggctccagatggcgctggtcacccgtcgccaggagcgctggagacgcttccctgagatggggcagtggagaggcgcaggaggcctctgggcgtgaggttggagctcccggtccctcttgcctgcaggtcctggggggcggctggtctgctccttgctggtcatgtgacttgggcaggcacctggtcctctcttcatctctgtgagctgaaaggtactggcagtaacgactgggttgctgtgaggtctgagcctcctgaactgcgcctgggcactgagccgtccccgggtctcagtgctgcttgctggtgggtggacacttcccgaccaaggctttctggggcctggtgacgctgagtgcctggcccttttgtgcacttccaaggcccaggaaggaggcagaccctaggacaggcagcgctggcagtggccaatgaggtgtggatgagtcccgtcgtggccttggtgcttgcgttctggcctctgggctgctgctctcttccgtggcgggacaccgtgttcrtcgcggcctgccgtggcggggtcagggagcctcgcacggttgaacagctgagcacatttctacaagtctcttacaggcagttggacagaaattcagatgagcgtgaaggaggcggcatggcagaagatgggaggccacggtggcccagatccccgagggctttgccaggcgggcctcattttaaagtcacttttgtttgtttctcattgaaagtagcttgtagtcactgaagaacagagccctggtccagctgaggtcacgggtcatgagagcagctgctgggcattttccctcgtctgtgcggaccagcgggcacgtgcttgtgaccacgtatgttctcctctgcagtttttaccaagtatgttggccgtgtccatctttccctggtagtgaacgctgttctcgccatctgaggagcttctcagggtgcggctccactgccctgttcctcgtagcccagtgcccggtgctccctcttcgaggcgktgccctgttcctcgtagcccagtgcccggtrctccctcttcgaggcggtgccctgttcctcgtagcccagtgcccggtgctccctcatcgaggtggtaccctgttcctcgtagcccagtgcccggtgctccctcttccaggcggtgctgctgtgacggtgccgctggggtagctcacgtggcagcatctcggaatgcttgtgcctcaggccgagcttctgaagtgacggctgggtcattcgtgtgcctgttttcaggagcttggcttttagaagatgaatgttgcctatcagccggcgtagtgtgccgctgtgagcagcctacaccacgcagtcttgatgcacttcctgggtgttgtgtaactttccttctctgctgatctgatgtgcggaacagagcgcccttcccacagtcgctgtcttggtgacttggtgttcctttcaccaacatgacacatgtccacgtccgtgaagccagaagccagcaggtacctcagcaggtcctgtgggtcgggctcctctgcggagttcctgccgttgctgcctttttaaagtttgcctcagtttctctccatagttactgcagtagcattccagcctgtttcagggaggatcctggagctctcccacccagaggagttccaaggtagggaaggcmgcccagggagggtctgatgtcagcttgccgtgsaacctggtgcaggaaacagatcatcccgcagtgagcagatgccgagccggaagccatcacctcccttgtttgaggaagagaaaatgacaccatatctcggagttagctgctgggccaccaaccagcctggagcaagaaggaattttcctagcattgagctatagttttgaccccttttactggtgaagcacagttccaaacgctgctgtgagctggactgaagtttctgtctgaatgtttctgcgctcttaggactggaggctggaagccccacggtggcacctgtgctgcattctggtcttggggctggagttggtagaggcaagaagcttctggaactctcagtgtaggacttactgctttccagggttgcgaggagcctgcttgttagctttatgcgggtttgctcaggtgctgcactrgaattcctgtcttacagcagagagagtgtctgtggggctgcttgaggattcagcgggatgacgttggtaacgtgcctggtgcagcagctctcggcagtccccgggacgtggtgctgtgacgaagggtccggggctggctgtggagccaggagcaggcagggctctcagtgggcagcggggcagcctacagggcactggccgtaaggcgctccaggagggtggggtgctygagtgcattgcagcctgggggttgggtcagaaccaccaaaccttgcctcctgtgtgtttctcccttcctttagccgtggacagatggggcgtcattggtcactggtgtgagcagagcgtgtcagagatcctgggcctctttaccttggagcaggagcttcatggcagygtaggggagcctggcctggtttacgctcaagcctcgtttcggctcttagaatctgagaatggacctcctggttgtggggctgaggacagggcatactgttcagaatcagtgggtggatctggtgcgccctctgctcacgcttcacacagggcaccccggggctgccctgtagcctcccttccctttccgggccctcttagtctccttggcccttagggacccaagcacccctctgcctggcgtccccagctctgccgtgggaagagccgggacaggaggctgcagtcctctgtggcccagcccgtggccatgctgtcatctttcagatctgggggggaataggccagcgtgctctgagggctcgtgaagaacagggctgggaagctcgggcagggatgcgtggggccatgctcttggcggtttctctgctgtgctggaaataagrccgtgctttggagagggctggtggcgggagcggggcctctcaggaccccgtgagggctccagggttcaggtgtatcatctgtaatcccggcgatgaatgacgatggggacgctgagagcagtcagtgtttgtctcgcatctgccctcaccatgcgctgcgctgtgcttcatgcgcagcctctcacttgagcctcacagacgctcccagctggaagctcttatgattccctcttttgcagggaggaacttgagccccgggctaaacagctgggaggtggtgaaagcaggacgtgcgtccaggcctgtgggtctccagagctctgtgggatgtgtttgcaggtggctcctgggtccctgygggacacgttgtgtggctgccgtctcggctttggccttgcttctctgcctcagcagagaccctgggtcatggatcctgcctggtgctgttttgcctgtttgaagccccaggcatcctcctcgatgctgacttaaggtagagccggctgagaagtccacagaggggagcccctgagggccgtggatgcagatggagctcttcatgttggggtctgccctggcctcccctgcctcccctctgtgcatcggctttcccagaagtgcattccagcctgggctgtgatcgccgcagtttgttttgaagatcccaccttgctgcctccaggcagaagagcccttggcctgaagccacaaggctggcatgtcctggagcacctggccgtgtggtgcttccaggtgcctgggcctggcctgtttcatctactgctgccatcaggggcctgggcagcgtcaggaggagtcaggcccttgtcaagcataaggractcgagagtcattgggtgtgatgagtggatatcaccatgttttctgtcacagacggtgcttttctgagcctcttcctgcctcaggtttctgtcacctcccaagagtgagtgaagatcagtttactagttatgagtctttcctgctgttggtcccaggtggttaggccgtcctctcaaggacgtaacaaggccttgtcacctggcatctgaattatggtgcacttgagtcatccagagaccagcaaggcatacgagatccatggtggctgggctgttcccctcttgcacttgaggggcctcccgctggagaagccaccactggcccaggttcctggggcctgtgtttgcatttggctctaccaggagtggctctccgagcgagtctttctggtgatggtgactcctgttgggggttttgaggctcagtgcagtcgcctctatggagcctgtggacggtgctggctcagggtgcaggtttttagctagtccttgtcatcactggcaccgtgtcctgctgtcactttttgaggtaatgggaaagtacaatttctgggagccttcagggcatggcaggggtaagttttccaggggactctgtggggcaggatgtctcctgtgtgtggccagtggtgatgatcagacgggttaggcggtgggggcatctgggaggtcaaggtgacggaatttgccgtggatcagtgtgggtgagagagcacatcgggatggccagttctggcctgcccttgaactgaccatggcctcagccatgtgttcccagcaagtctcatgctcaacctgaccaccygctctcggcataagggggcccctggggtttgacatggccagaggccttgttgcgtccgttcggctttggcgccactcgatgtaaatggtctttggcagaaggtgtggaatcagcctgagtctaatgggctgtctccatgtattccacggtggcagcctgccatgcctgtctggtccagggctgtggcagggcacgcgccaggagctctgggtggcaccgtgcccttcaccgtgggctcagtggcagctaggggcgctccgtccggcagcagagaacccgcgtgatctgtctgtatcctgctcctgtccccctctgccccttgtgcgtcccatgtggggctggtcccaagagtttctcccgcagccccggaccatgcctgggacgcacagtgcacctgcgccatagaggcctcagcccccaacccagccctgcaccaggggacagccttttgaggctccttgtctgtctctagaacggggcccttgatggcatctgctttcctgtggtggttccagtgcggatgctggcacgtgcctgccttgttctttggcgaaggctgctcgggttagtttggctagtgtgggccctttgaaaagccgtctctctcgtgagtcagttgtctgtctgtaggatagccccagtgagcgggtttttggggaaatgtgagggacatccctgtgcctggggtctggcaccatgcacttgaacatggacccctcagtgagtcaggtgccccagagtgcgctgctcaaggtgacaggggagcaggcccattctgtgctcayggctgtgcggtccacctgctggccggtgatggctgccccggcgaccctggcctggctggtggcctctgcctgtccttttggttctcagtccccctctcttctccactgggactttagtaggaaaagaggacttggcggcacctgtcccgggagccaggccatgtggaggagctgggccttccccaggctgtctgtgcggcacctgcctgcagtgcccagacttggacgtgagatggtgcctgtggcatgtgcagccgcccgctcctctgtgctcagcttagaacctcctcgtggggcctcctcagygggggtgggtgggtaccaggcctgtacattttgtggccaattagagggagagagagaaggggggcatggcatggagatgtctgggtgagcgggcgtctgtcttggggcctccctccctcatgcggtgccttcttgttcctccagtcctttcctgatcagggctagtgaagtcccgggttgggggacatagacccggtgcccatcctgccaatgccgggttctctgtggccccccagtatggtctgggggcctgtctgaggcaccatcatgtttcaggctgcagctggctgctgggcctgagatcgagccccatctctcctgagagggggtccagcccatcctggctccaggggaaagcctgggtcatcagcaggcatggtcgggtgtcatggctgtgccccgcagcacgcggtgtctgcctgcttggaggggcctcygcagtggggcactgcgtggccctgtaggatgcaggcaggctttggcaaggctggccctgctctaggtgggtgtctgaacctgttccctccccaggcagagcccgcaaggcgagcacacgctccttcatgackgggccgggtccagcgtccgctgccgctgggctctggggtctgtccggggtgcctccgcctgctgctttagccagyttgtgttgcttctttcagcaagatgagctgccgttaatatttcacacccagactgtttccctgaatgttttgcatttccatatttaaaatggcatttacatattcatggctttttaaataagtttttattgttaagggatgtggaagtggatgaaatgtgaaactcccccttttattcaagcactagaaaaaaatttcatcccaaatgcaatcactttctgagtgtttagctctgtggcagttgccataggagattgttccagaagccagtgggtcccagggccatggagccgccctttctggcatgcagggactgggggaaggcaactgccatcagcattgctttccagccgaggttgggcatggaggcctggttgctccttggggtttctcctggcgggggcctggcctcgtgctgggatgcggggccggctcccacccacatccatggctcttgttttggaggaagtgtctaaggcagacgaggctcttcatcttggaagtggctaagccagggatgcctggcttcttttctcccttctccctggtcactcggcgtccctgccctggttggcctcttgctcccggctttgcggctgcggctgcagctagggcctcggagggccattcggccctggtgcactctccgattctgaggcgtggagggtggcaccggcacccttcacccttcagggtcctttgagggtcctgtgtaagaacatgtgcagggcggacgggggctgctggaggggtgctggagtcactgttttacgtttgggcagtggtgaatgtggctgagcctttgcctctgggacactggcctggggaaggcccagaggaagccaccaaggattgacaagagtgggaggccttgggagaggcgtctgcaggggccacctgggcttggacgctgtgtaggtgatcttgagccaagcacaggtcacagaaggatgcacgtcctgcagggaagtagttgagggctttggaagcctggccacctggcctgtggcgtgctgtgctgcagtggagcagggcagggactgggggggggcggggtccagatagtagaccataaaaacagggaaactgaggcctgtggggggaaagagactctacttggtggagtgaagcctagagcatggatttttctgatctgtattgttactttttaatatttttaggcataaaattgttttttatcatctcaggcctaaaccacccacaaaaccttagccttgagggtcgggggaagtgtggtccgagctgcagctggcctctccacgcagagcccctcacactggcccctgctggagccatctggacgggggtctgccgaagcccggcttcctcccccatcagccttgaaggagagtggcgggtgtcctctgtggctgtggagttctcagccttgaaggagagcggcgggtgtcctctgtggctgtggagttctcagcagtctgcctttggccccagcccctggcagcttctcccagcatgagtgttgtattttccatactctcagggtgctgggtcattggtagtgtctggttcctcctgagaccagaggcaggacacagagctcagggctgtggccctgggggcatggctgggggagtcaccttcactgctgagggtggggggcatctcagtgtgcgtcctggggcccgcagcgctcccgccttggcaagccctggactgcagcctgtgagctcagagggagggtggtcccgtgagctagggtggggtgggggtgcggggagggtgctcccatgggttggctgagagtacattgctggctcagggggtcgggccgtgtgatccccgtggcagccagggcttaggctgtggacatggtgtggggtgcttcctgggggttgggccctcctcacagtcctcgccctgtctgggtgggctggccacacaggagggtgaggctgaggcagcctcgcctgctcttcctcctcgcctctggcctcggtaccggggcgtctgctgaggaggaagaccgcttgtcctgctgggaccttgggcctctccgatgcatgttgactccagctgagaggtgttctccttgcctgtcctgcttttcatctggaaaatcaggtccaggactcttgctttgcaagatgagtggagaattgaagatttcagaagttcccaacatcaagcaggtgctcagggaatggcggcattgtttgcaggagtggggtctgtggtctctgtcactgggtcctgctcacttgacccccgagcctttctttcctcatttgtattagggtcagttccaccctcaatgggtttctttgaagggtatgtgcagcctgcctgggggaaggcagcggagtgctggccttcctctcagtgcttgcttggcccctgggcctggggttctcagagtgaggtgctgcaggcgatggcggtgtggccttgagagcgggggaggccccatctgctgcttcccctccggctgacttctcctaacaagccggaagtgtgcgtctggcattcatgcccccaatccccacctcttgatgtggttccttccgttttgtcagtaggatctgttttcaacctctgcatgctgaagtgctcatctctctaggccacttggtctggcgcccacctcgtcgtggttctcaggatgcctcatttcattaggctgagtggctctggactaagtgcacctgcagagctgaccgccccaccgccagcctgctgagcgctgccgcagccaggayggtggccagggagcacgtcccctggggcagcagatgcatccccttcctttctccttccctttggaccctgtatgcacccctgcattctctcaccctctttagcaagttaaaaaaaagctggcatttcctcccacccccatgaaaccctttgtaacagcagtctcaggtccgcagtgtcaggggctgcccagtggtggtgagagcgcagcgtgggtgcagccctggtgaagggcctgggactcacagctctgtgctctgatcatgggctggcccgcgctgtcagtacagaaacgccctgtgaacttcagctgccatcatggcctgtgtcgtgtggctggtgtcgtgtggccctcgcatagttatccgacatggcaccgtcggcacagaaacgctctgtgagcagcagctgccatcatggccggtatcgtgtcctcgtgtagttgccccatacgtccacctcctgcttggcttcccctctttggagcctccagggccagaggagcacagttcagaaactgctggtcaggagacctttcctggagaagtttctgttccggttgtggatctggcctgtgtgggagcctgaggtggcatctttgaggtgacccgggaccatggggaaagcgctctgtttcctggctgaggttttcaggcagtgccatggcacaagcctgtctgcacctggggctagaggtggcacgtgcaagtcacagaagggaaggaggagacagcctgggcccctcactcacytgggccagaggtggtgtgtgcaaggtgcagaagggaaggaggaggcagtgtgggcccctcacttgcatgggccaagcagaccggtaacatgcctgcygctctgtgacgtttctgttagagagcggaaggtgtctgacctcagctccccaaatcagaaaacggcatctggagtgccatatacgtttgagaagagggtgcttgggtcagttctgtcctttgcaagcgaacatctttcttggcccccaaaaggtggtagtagaatgtagatttcctcaaacatttggagaaaacacagaaatgaatactacttgaatgttgtttattgttgcttcaggaagagaatagggagatgggagaagggcccttgctggggttggtccctaagtattttggkgccctgaacttctgtttccttgcttattttgaakgggtttgtgtgagcctaaccccaggagagcagcccacaccccacagcggagcctagagcagggtcagggctgccaggagctgctatctggggagactgaggtggggtcctcgaggcctcctctctcatgcccggcactgccaagcccagggcatcatcagtggacttgggagcatcctcttatgaacgcttttcttgagtttccctgtaacttgttgtaaactttgtaagctctgagccaagagcttccttcttagccttgaagctggccactgccggctcctktccatgccgagctgggattcttggtgtgcaggtgtggagagcagctccggtgccatcaggcgattgkagtacgctttccttccttgtttggcagaacataaaatcagtctcaggccctcccaccatggcctccactgctgagccccgaggagatgccaagagatgggaagggcccccaccgaggaatgcagctggctcagagtctgcctgtggagaacaggagcccctggaaggggcaggctttgggcaggtgagtgcacttggtctgagggagggtgttggtgttgccagcatcctgagctcgagttggtgccatagacctgggagggtctctcgatcctgttaggaaacttgggtaagagagtcggaacaaagaaacatccactgctaggcacctgtgggtaccaggcactccacacgtgtccccctgccctggcactgatcctgcctgctggcggggagcctctcgctttgccccagtttccccaaggttgtggagccactcagcctggagtctgcttgtgagctcagggctggctgtctcctaagcctgtgccctctcaccacgttgcctctcatcagggcgatgctttttcaagctcagatrtcacaggtcgcttcckcagggcatgaagcctcttaatgctgacccttttttaatactgtggccgagaaacacagttgcgcagagtctgcaggaggaacagtgtggacgtggctgtgacaggcatttttggtcagcgtggggcaagtgcggcttcctgtttctgtctcattgagcttggagtggacataggggctctaggagaaggaaggctgtgacccctgccctgaaggagctttccctctgcctgggaagagaaaccagcagtgaatcccttaggggactagagagcgttgggccgcgtggtcctgatcatggccacgcttcccaaatgcctggctgcttgtgagttatatggcgawaagagcctgaaaatagagatccttggactcacctccaaaggctcagattcaggtctctgctgaggccgttgctcccttcatgagtgtactttcccttgggcctgggacatgtgcacacacgtcaccatgagaggtggcaggcaggactcccatatgtggccgtgagaggtggygagagctggtgggcattgtcccgagsgtcgctgtgagagctggggggcaggaggcccggacattgcccaccacctgagccttcctctgcaccagcattgccctcacttgtcagtccaggcccctttaatgataaacaattaccgaaaacaaagagtttttatttgtggggaatcataactatcagtatttaccatctttggaaattaaaattaaaattaaatcattatttacaattatatttataatctcattaaaaacaattcattatcacttaacaaaatatatttatgaaaaatgcattttctaacacaaaacgagacagtgagaggaatggcattgttttttactttttacaaatctcttcagtgtctggtgaaatagaagatgggagcatctcgtgtctgcgtccatctgccacggtctcttcttttggagtctgtggaataagtctggccccgcacaggtgtgcagttggaagaaggagggcctagtggcctgagggccccacacacaggttctgctcagccttgcctgctgggtgggtgagggctgaaggcaggtgcgctcaccgttccttcacacctttcgtggctagtcttacctttctgggtagtgtttgctcaaaattctgattagattgtagggggtgttttttgtgtgttgaacatgaacatcattaatgaacgtcagtcattgaatgtctgggaaggtgtcctcagttctggtttttctggaaacggtgactcatgtatcctagaaaaggcccactttgcagcattccgggcagttgaaggaagatggctcaacccataagcagcagagctgacttctttcaggtgttcttgccctagatgagcagcaggggtgtccctggggcctggagatcatgcccacctgatttctggtggagccaggaacttgggcagccacaagttgctctctgagaaccccacaaatccaagactagtccttaagagagggtggcctctccagagacgtgtgcagctgctggacacaattgggctctggtgactggtcctgtttaaatgggcagatttttctttttgttgtcatagagaagctaatttcttattacttgtcaactatttccgtcttaaaaccaagtaagaaactagaagctttctcgctaagatcaggcacgaggcaaggagtcccactcaccactcctattcgctgtcgtactggaagtactagctatagtgcagtaagacaagaagagggaataaaggaaggaagaaataaaactgtctttgtttgcagatgacatgatcgtctatgtagaaaattctgagaactaacaaaagaacttgtagaataatgagtggtgagagagagcagggtatgggccatacacgccgtcagctgctttcctgtgtaccagcaacaagcagagggaatttgaaatcaacacccagtactatttacattagcaccaaaaaacagtgtagacacagagaccggtacaggttatgtgtgaggaaatcaccagacctgatgaaagaaatcaaagccgtaaatcaatgcagcggcattctatgttcacgggtaggaggagtcaatatattatcagttctccccagagggtctgtgcagtcccagtcagaatcccagcaagttatatttgtggatatcaacagattctaaagtttatatgggaaggcaaaagatggcaatggccagcacaacaccagtgaacaacaccggaaaactgacactccccgacctcaagacttagcgtaaaaccacagtgatcaaggtggtgcgctgttgatggaagaatggacgaacaggtctgtggaacaggtcagagagccacgagatagacccacacagatatactcggctgatcgtggaccgcagagcaaaggcagctcagaggaaaacggtcttctcagcaaatggtgctggaacagcggaacagccacaggggaaaaatctagacacagaccttacaccttcctcaaaaatcaactcagagtggatcacatacctgagtgtaaagcacaaaactttaaaactcctagaagatagcggcggaaatatctagctgactctcaattaggcagtgacttttaacgtacaacaccaaaggcacagtctgaaagaattgatgagatggacctcgttagagttggaaatggctgctctgcgaaggaaactgttgagaataaaaggagaagccccaaatggagaaaatatttttcaccgtcatgcaaaagacatatctgataagggctgttatccaaattatacaaagaactcttcaaactcagtggtaaggaaacagaccacccaattaaaaaatgggtgagctctgaacaggcgcctcaccaaagcagacacgcgggtgacggagaagcacgtgcggagatgctcagcattgaaaatgggtgagctctgaacaggtgcctcaccaaagcagacacgtgggtgacggagaagcacatgaggagatgctcagcattgaaaatgggtgagctctgaacaggtgcctcaccaaagcagacacgtgggtgaaggagaagcacatgaggagatgctcagcattgaaaatgggtgagctctgaacaggtgcctcaccaaagcagacacgtgggtgacggagaagcacrtgaggagatgctcagcattgaaaatgggtgagctctgaacaggcgcctcaccaaagcagacgcaggaagggggagagcagggagacgccaggctccctgtaacaatcatctctcctggtaactgatgaagtgaggactgctcttcagcatgagccgtcatgagggacccacccccatggcccaaacccctcctctcaggtcctgcttccaatcgtggggatcagttgtcaacctgagatttggaggggtygggaaccacacagtaacagtgtccttccatgggtgaatggataaaagatggtatgtccattcactcaaatactgttctgagctaaaaagaaatgagctaccaagctgtgaaaagacgtggaagaatcttaaatatatattgcacagtgaaagaggacagtctgcaaaggcggtgtactgtgggatttctcctccgtggtattctggaaaaggcagaactgtggacacagtaaaaagatcggtggttgccagggatggacaagagggatgcgcaggcggacccagaggatttttggggaatgaacctactcttcacgcggccgtgatggtggacacgcagtcgcacgcagcagtggaccgactgcacgcggccgtgatggtggacgcgcggtcgcacgcagcagtgaaccgactgcacgcggccgtgatggtggacgcgcggtcgcacagggactgcagacatgcgttcgtctaaacccgagaatgtaagacatgacaagtgagcccacgtgtccactgtggacttgggttcatcagttgtaatgaatggactgcagtcgtgcacggtgcaggggaatctgcctgggggctgaagggtagatgagaactctcatttctcctcagttttcctgtaaacctataattgcttgaaaaaagaatatctgtaaatttaaaacaaaaattagcaagtaagatgaggctagagagagctgtcccaggggtcagattgagacaaaatgcagttggggccrgcttcctcctgagtcagcctcactgactgcttggagaagagagggaccacgctgagcgtcaggaggcagcgccgcggcgggtctacgaggcacatctttcaccagcctttccattagaggcacctgagcagccctccatcatttcacgtgtgcatggtcaggcccttgtggggggctcacaggacttgtgtgactgccagttgccgaaagaaggaagcaggtcccttgtcatgaccagagagaccccaggtgcratggctgtcacatcctgctgaccttcccagcctgagccagctcgggccagggtgaggacaagggctgatgggggctgaagggcacagagcacccctggggaggcgtgtgggcctgggggacacacctgagctgtccctgttgctgctctctggatgagaacctgggggcccagctggtgcaggcacgaatgttccagcacatttgtgaggatgagctgggaggccttgagcaaggacaccatcagtgcctgcgcagaggtcccctgggactgacaagctcgtcggggaacagaarcagygctttgaattttaaattggttaaattccttttcctstcacagtctcagctgctccctgtttccttagagagccagggagtttagtgtcctctcatctccatgctctgccaattttactgcctttccgtatttcctcaccatgaatagaactgattttatggtgcgtaagccatttttaatgtagcctctcatcacaaggtggagaagtgagggggattgtgcctctccagaccatagtacatgcgtcccttctgtttttaagcatttgggccaagactgcctttgcagattcctgaagtgcctgggatgagtgtttatcgtgtgcagggtccgctctggggcccgaagaaggctgacacgctgctcatccatctcttgaaggagctcatagygcagtatgtcaacccaaaatactccaaagcgtccgaatctagtttaaagagagcttattcaagtgcaaggttcttccaggacggccaccagggaagcacagattccaaagaatggaagtcagtgttccgaagcgtggaagttccggatcattyatgtagacaagtttagggaagcttagcagatctcagcatccttctgcgagaggcttaatgcatcattagaaagatcggattcgatgcggtggcctttatctttccgggaaggttgatttggcattcgcactgaagatgtagcaggcatcttgtgccatctggtctgtaggtgcaggacagtgaaagaggcagtgaatccatcacaaagatcggtgactggaagtgggagaggtgtggtgtttggtctctcctagttatttacggaacaagagctaagaggaagagagagtcgcggacacgctcccagcttcggcctccggggcttaactttttccccctggcataataaactgagagggtcctgacattttattttcttttacaagtaggagtgataggacacacctttggaattgagtttatgtttggaatcattggggtcccagagagagagagaggcccaagactatgtgggaagctggtctcctttcccagacctgccgcagacgacgtagagagttaagctctggcctctcaattgcttccttattccaaatttctcggtctgttcatctggtgtgcccctggggaactcctgggagttgggggctgtaatggcgtggagagagctctgggcttggggacttggcctcgaggtgctgtgtgtccaggctagcttttctctagccccaggacgtggtgactgaaatatttcagcggggaggcacctgartgctgctggcacagctccctggacctctcaggtgagctccatggctgcgcccagccargcacctgctgcgggccgaaggcagggcagggaaatccaagaggagggcatttgcctcctgacatgtggaggtgcttttgatgcagtgaggcgcatcggggcagccaggtggcatttcctgcacccacttggtgctggagtctgtctgcctgcccaggtgcttttaaccccatccctgcccctctgttgggtagtgttttcttcacccttctgctgggccccagaaggacagctttttggactggttgggagcttcctggcagcgggtgccatgggaaccatgagtccgtctgcacctgctgacccagctgcctgcctgtgtgcccctccgacggtggtggctgtgttgtgcaccttccttgtgtgtagacaggatcctgggggaggccgttggctcgagcctggggtgcagagagcactccttggactgtctctgacatgcgtgtaaaaataactgcatttgtttttctgatctctgggcagaagctcgagcctgcgtgtccagctgtgtctgtcttgccaccttgctctcgtcagggagaccatctttgttagacaggcagcctccagagggatgggatcgtgtgtgtgctctctcctcatgacgggaggcacctggggttcctgtcctgctgcctcgtgtgtgactggactctgagaagcgcgtgttcctcgcgtcctcgtcactggcaggtgacggattcagacccacggcaggaggggcgctgcctagcaggagccgtgtggacaggagccgccgtgagcctgctgggtggcttggcctgctcgtgcctgtccacattcacagtcccgcggagacagaccttttactcttctatacctgccacagcacattcagatgtccacaggcaaaaacctgggctttccctcttccaggcgtcttgttctttcactccctccctgccccctggcctgcctggtgttggcctgctgcacatgtgagctgcctggcggtgggttagccctggtggccccagctcccccgggatcctgcgggcccctcatggaatgcgcctgcccggtccctgccccttccagctggctctgggactggaaggaatttccgatcagagagctgcctgcccacaaacccaattttgtcctcgtggtggggtcgtgcaccacctccactctgcccagttggtcagcgccagcagcactccccatctcctcaaggtccagatgccctgaagccttgggaaggtctgtgtccccctctggcttttctcctcctccctgtggtccgtgtgcctgactgccgcgtgggaagcctgaaggtgtgggagcagagagactgcartgtgagctgaagatggggccttgtgctcctggggaggcgtggtgtggcctgacgggcttgagggtggccgaatgaaccttctgagggcaggtcccagcagccacctgtcctgtccccagggtgagaagggcagagggagccggtttcagcccctctgtgtccccgccaggatccctgcaatggccaaggccccagctgagccttcagccctcttgcagacacatcgtgttttctgctttgccgctcatcctwccatgttacacagcctctggtggcgtgcctgtgccctttgcgaggcctctgggtgtagggactcccgtcagggccttccctcaggcagggcaggtcacctggcctctcctgaacggccatcttccagaagcagccttcctgttcgtgttctgtgctttttgtgactcccgtgctgatgagcgagtgtttcatgaactctgaactgcctaggtctttcacggtggtctggcctcctccgccctctctttctggcaccagggctgcrtttcggggactctaggcatggatggccctgccaggtttyagtagtgctgtttgggagatgagaggtggctgagctgctgatgacaaatgcgattcagtgacagaaaatgcagaataattagtctgggaccagagaactctaaagaatgtatgcaaaccaggacaattgtccggcttcatgagaaccatgttaatttagaaataatctgggagggcgtcagcagctcctcaacaggggatgaggccggaccagagcccgagttgatgagttgtaaccgacgactgtgatttaaaaagcgttttatttatcgaatgtctctcagtgtcagggcctttcatccatttgttctcatcatgaagttccgagaggtggacactgtcttaatctctcaggtgcgagcagaagtctcttgcttgaggtcacagccgctggtcggagtcagttcagaccggctctggggccattgccagctgcgtgcctgcgtgggtagtggggttctgaggccccagcaactccaccctaggctttctcattcctagcaggcgtctgctcccctgacgcccacagtgccggctgctcttgcacgtttcccggmgtgcaggggtctttggtgggcgtgagattgtaattgcaggtgggttcctgcgggttcctcctctccgcaggtgggttcctgtgggtccgctcctctctgcaggtgggttsctgtgggtctcctcctctcttgccttttttccccaccctagaccccaggtcgtttctgctccctcattgcccacctacaccaggttcctgacgtctggaccttggtctttcctaccggtcggtgtggtcgggcccgctcccccgtgtgcagctgctcctccgtggcacagcacgaagyagcttcccaagaggctgtgtgtccattgccctcaggagaatcccctctggagcaagtgtgctgggctgtccctgctgccctctccttgccccttgggtgctccatcaggggccccactctacagcctcctgtgtcttgctggggctgggtgagttgccgctcctttgtgcccctctgatcacttcagattttcgtccatctcccccttgtcataagtaggggagggcggggacgtcttctctgtggcactcccatgactagcaaaggcccgtgggctcatgccagccctgagcacctctcttctggaacaagcgggtcaggccagcactgtggaagactgtccccaaagtggggtcactgagaggccccctccaggagagcgttcagatgtcttcatcccacccgcgtctgctctgttcttccctgggaacgaggcctcggatgtgcttcgtgactgaactcacacctgacttggcccgctggctttatcccaggttctcagttgtaatctgccgttgtttaaaatgccctactggatacatagaagcattgctgatcagctgatttgcctggcagtgtgrgagggggttattcattctgaggtctgtggtttctaatgaagcccgacccatggggacagtgtcagtgagcacctgcctggcggaggctcgtggctcactgcagggttgacgacaggtgtaaagctgcccagcggtcactctgcttccttgcagaaggaacctactaagctgcatgtttaaaaactctgagtgacmgaagaggccggtccccagagatgctcctgggcctcctcacactgcctttcagagctgggctgggcctgggttgtgcttggtcccarggaaggctggcggcatcggcctgtgtcgattcttagtggccatatggtgcacaatcattgtgcctggcctgggctgtcaggtcaggtgtccccgctgccccccaggcctgaggggggaagatagctccgcagctgtgcacaggacctccaggctcctgggrtccaggctgggggcctccagtggtctggtccacatctgctgccctggggttctgccctttctgtgcatgcccgagtgcctgtgtgtttattgaaaatggaattcgaagctgcccttgttaccatccccttctaggtggagtcttcaacctggggccctccgagggttgcactctgtgggcgtcccccgtccatgggccgcgcactgagccttgcctgtgtctgctctcggctcccgagacgctctccttcatcctgcccggtctttgcaggaacctaggccatatggcagaggtgccatccctcgcttcacaggagggccgcctggcaggaagtggcagtgaggaccgaagcctgggtctgtccccgagtccactgctccagcgccccgggctgcagccccacctgtggaaagcagcccatggaagatgacccctctccaggaggccgcctggccccactcactttctcacctgtggcgctgtaaacgtgaggaggcccaggggccaactggctgcttcctcagatgccagtgctggctcaacgcttaaaacagacgcgtaagctgactttcaggtagtccgttctcctgattttaaagcgggacaaatgtcaggagtctctcttgatattgtctcctcagtttatttttcagagctgtggtaaatgaccccaggaagcccttagctggaggtgggagctcagtctgagctgcagtttctggagcactcgtgctgcttggtgtctgggcgcctgcctctgggtgagagggccagtggctcactgccctgtttggagtcgtcagaaacctcgagccagcctcctgccggtgaggtgctgcctcacctggtgggggttgtagctagaattgggtttgccacagcaggccctcgctcacctgggcagatgagaactcgtaaatattcaaaggatatctcagatgccctgttacagtctcatcctgagtgtacggtggagctcgctcaccaggctgcggagacatcactacccattgttttgagctgtcgcccgggggacacatggggccagcatgaggaggaaggatgcgtgggtggctyggctcagggctgctgcttgtgtcctctttgtccccacctgggcatctgtccagtcatcagaaggggcaccacccccacccaccttgtcagcacctgcctcgtggcgccgcccccacccttgggtccaggacctgctggagtgcacctggcaacagtggcggtgacttgccctgctgctgctgtgccactgtgggctgcatgacccggggtctgacgcaacctttctgtggcaggtcctgtgtctgtaaagtgcagccctgacagcagggacttcctggggtcgctgtgaggaccggatccttagtgtgggccgggagcccagcagggaaggggcccgggatgcagagcaggaaccacctgcatccctgtgccctcagccatgcccatgtgtgtcctccgtgctcactggtgtctcctgccctggggctggaaggccgcctgcagctcctgcacccttctcaagctccagggaggcccgctggcatcactggccgagcccctgcgtcctccttcacccggaggtgcctctgttgtatgtgatgtcaccgtgcttggcactgagcaaggctcctgaattcagagtttctcccacaagcgccgggcacccaggtggaatggctgtctcctgacccagaggagggtggggcagggtgggcctggccctcccggggtgtgtgagaacccagcaggtctgcccctgggkaggcgtggagccccatacgctccttgccgagctcagagcgggggcttcgtgacctcctctctgccagagtcttcctagccatcctgccctcactgcacccctgggcagtctgcctctgttggctggggtgggccacatgcaggccggctgtcccctcaggctgtgggtgcagctgtttcctcactagccctggtagcaggcaggccttctgcccactcatctcccaggtcttcttactctctgtcctgggggagcctgctcttcctttcggcacgttgggctcttcccaaatcagttccacgccccgtggtagttccacacccccgtgtctgtgcgttttgctcctgggcgagggtctttggagccctcgtgcccctggagtcttggaagaggcctgtctgggtgggcttgcctcctctccatgtctcgacccttgtgggtcctgcaccgctgcccgatggcctgcccctcctgccttgctgctctgcgagktgagcaggggcgtggcgtggcctctgacctgtggagagctgggggctcccggctgcatctgtactgggggtactgagagccttcgccttgctcctggaggtgtttgcccggcttccccgtctagaggaggagcctgacctggctacagggggcttcccaggaagcagagttcttgcccccggggcctaagcccccgccccttgctgcctgggctgcctttgcttgtgtgcagccttgcaggactctggtgtatttggagaagctaaaaagcccttgccagagcggaaaagggcgctggctaattggcagctttatttatttatttctggcttgagtggtaaacagcgctgattctttgcacagcaggaacagattgggaggcatttacctgactgattcctcacctgcagcaccacgccgccggaggatctatcgattcagcgccgcctgcgaagtgcactctgaaacaggcttaattgcctccgactcgcttcctggtatcgcatgtccccgtgagtcctcgcttgagggctgctgccctccagsggattgacgcctcccaygcgtgcccttggcggggctggctcctcctgggtgctccctgggtggactggggtgctctcctgcttgacagggaaggaaaccctacygtcaccagctcaagcgcaaacagagcccaccgggtgtcagccgccctcacacacaggaccagggcctcaccagcgccctctctccgtcctgcaccccagcccagtttcgcttgctgggagccctcccgcaatgtctccaagctgtagcgtgcagtttcatctcagtccctgagctggctgagctcccctgctgcttttttttttttttttgagatggagtctcgctctgtcgcccaggctggagagcagtggcccgatctcggctcactgcaagctccgctttccgggttcatgccattctcctgcctctcagcctcccgagtagctgagactacaggcgcccaccaccacgcctggctaatttgttgtatttttagtagagatggggtttcaccacattagccaggatggtctcaatctcctgacctcgtgatccacctgccttggcctcccaaagtgctgggattacaggtgtgagccactgcgcccggctcccctgctgctttttaagccagactcagcagaagggaggcaggtgaggtaccggtcgccttgataatacacttctctaccagggcaggatgggcagacggtgacggggaagctcacctgggaggggcgctgggtggacggcggccgtcaccacccacactgacgccatggcctgcacatgtgcagctctggacagatcctgcgccttgacttcccagctgcgcctgggggtgagctttagcaacccttcacccgtgcacctgcacaggtggcagtcgtggctctggcactggggctgacttgccagctgcttggaccaaggctgcatccttcctgcctgagtctcacctgcctggagcaggccagcgtcaactccctggtttgtgattctgggacctggtgattggctgtttttttttttgaaacagagtctcgctctgtcgcccaggctggagtgaagtggcctgattttggctcatggcaacctccgcctcccgggttcaagtgattcccctgcctcagcctcccgagtagctgggacctggctgattttgtatttttagtagtaacggggtttgtccgtgttaggctggtctcgaactcccaacctcaggtgatctgcctgcctcggcctactaaacttttaggattacaagcgtgaaccactgcacccagccagkgattggctgttttaagtaacagttatcaaggtgctagataatattttaagacactttgaggtatgagattaggcaaggcacacgaggtggacaggtctgacgcgggcagtctgagcatttctccagccyccgcgggtttcctctgtcccagccctctggccacatgcggggtggccactgctccgacctctcttggtgatggcttttctgtggatgacatgagacagtggcagttctgcttgtccctccagacaagccaggaagacacttttaaaactcaaggccttttcccaagagttcctctgtccctccagtctccccctccccaccccagaagctacttttaacacccagggtcttttccccagtgtcttggtgcgtcttggctctctagcccttctgtgcgcctttgccggtccctcaggtgtccacrtgtccccacatctggctgctgcacgggtctgtgttcctgctgtgccagcccctgcccggtgctggagagggtggagagcgaggcagacacacctcacygtctggagggacagtgagacagacctcacaggcctgcgagggaggtgggacatcatcaggctcgtagaaaggtgtgacctttccctccccacccaaccctcgaggactcctggcccccaggctctagtgctggaggctgagtttggccaccttggctctgggcccaagcggcctcctgctggcaacatttccaggatgccgtgatctgcagcatagtcctgccccactccctcccaggagcccagaggcctgttattctgaggtctgtggtttctaatgaagcctgacccatggggacagtgtcagtgagcacctgcctggtggtacacctctggccaccgggactcygttaacgaccctcccgtgggggctgtgaggtcgtgcctgccactgcccgggaggctccagctggaccgagtgtgtgtggcgtatccgcagcctccctcatccctgcctgtccccacggtgcctggcaggtgctgggggcctggtgcagagcctcgctctgacgctgarcagaggttgggagaggcggaggagccgcatctgggcttgtcctcttggcagcacccagcgcctacacctcacatggaaatggggctcrccagtgagtggagactcagatcgtgaggcctcaggcgggaagggccccagagccacctggtccagctcgtcctggtgaatgctgtggcggggcgcctgccctgggagcctgcgccgggagtgtccttgcggctggggctggtgtgcctctgcaggagccctgccgtcaccgtgcgactccacttgggcccatctccctcgagtccacctgtgctgtgatggcagccgcctgtcttccttgctgggcctccccacgtcaggtctgcgcctgccctagagcaggtgcaggggtgaagaccttcctcgccccgccctggaggccacaccagcctgttgggatccttttctgatccctgcctgcagccttggaaacggaagcagctcctgaggccctgctgtcccccgagttcctcccatgggggctcgcaggctgcctcccgcctcctgtcccgcaccccctgtctttcttggyatatactcttgtttacaagtctctctcgaagtgatactctcagataattattatgtttctgaaacgccttggttttgtgttgttggggaaacagagcaacagaagacacagttcctggctctgaggaagcctctgggtggggtgggcaagagtcagacccgtgggggcacggggagtctggcagaaggcagcgccctgggtgtggggcttccgcttggttcctgcactgcgagtgcctcctccctgtgccaggctctggaagccgtgcagattgcagggtggtgaccccaaggctgcgcccccaggctctccagggtgtggcggccagtcctaggctttctcagaaggtggtgctggctgtggaggcagaggctgctgcagcgcrgccttcgttatcagctgggaggaagtggtggcgggtgttgagctgggtcagactttaggaggtgccatttgctgtaacatacaggcggggctgttggggtaagcacacgccgcagccagtctgtaaggaatggtcctgaaggacaggcaactggggaagggagactgtgytgggcaaagccagcaggtggagagggccaagagagggggrggtggccttaccatagacccagtgtggggcrtgggactgcaggaggctccacttcatttggaggagtgaaaaggcaggtgccacctggtccccagggagagctggagggcctgatctgaggatggagagcatgaactggggctcctccacctggggcattgctagggatgccttgggcgcatsctgggaggaggtggagtgaggaggatgctgagggcggctttcagggaataaggagctcctggttggatgcttggaaggaggggagatcccagatcagagtcctggaccccagcgaggagccagcaggaaagagcctaggggtctggaacagttgtcrtgggacrtgtgtggctgccatctgtgtgagctgtatgggtgcagccaggactgtgctgaggggtcccctgctggactggcaggctctccctcctcaggagcactctgggtttcggggtgcattgtcactcagcacaggttaccctccagagctccagccctctgtcctgcagctgtagcccacctgccactaagtcaagggcttggaggcctctgatgtctgyatgtgggtcagagctcgggcacgtgctgtccccacagtcgggacctgagagctgcctggggtcaacttgcacagggccaggaggatgtaaagagctgctcttgtggcgtcgtccagctttggccagctacagagagtgtgcgccccacgacagctcctgctcatcgcatctgggtgggagatggaggactctcaccccgtcctaaaccatgtgggccactgtcagaaagggtgggtgatggagatgcgatagggaaggcgctgcggagagccatggcctgggagcttctcatgtctgtgaaccaggggcggggcactcctttggtcacttgttttggggggataatggagagggagaggagggcactgggacaggagaaatgtcacagtagatgaaacacagcaggagtccaggctgcctggcctgaaccttcttgctttgtggaaacacggcttcaccaagagcaccgggcagcagtcaccctgaagccctggagctcgagcccagccgctcctgcttgtccgcgcaggggtctgggaggcagaccgtcacgtggggctggaggctggggcgagcccaggcagctgggcgtgtggagcttttggccttgatggaggacgtctcagctccaggtctgcactgcaggtcaaggagagagacgggaggcacaatcgcggggtggcttctcctctgagagcaggctgtgacccagacggctgtggaatgctagggacgtgtctgcgcgtgcctcacgtcacctgtgaaatgcctgtgagatatgacgtggcttttggagggatgtgcttagctggtggtagccccttatccggaaggaagactgtgagccgagcctgctccttggcggcatgaacctgccatggaggcagtgtgtgggcagcagtatgtgggcaggggctgggagggacggccctgttccttcacttccgtcacctgccccagggaacttggacatcgagggcctgtcaccaacaacagccttgatagtgcttgctggggagaaaatgctggcccagtgtgttgagtagtgtgtatcttgccgcgttcatgccacgcactacggatgctgggcagacccctgtgtgctcaccgcgcccacacggccaagctcccgtggctctgacacaccactcagggctgacctcctgcttctgggagcctgatggcagcacagggggaggtcctgctggtcaggagggagggttcacctgcacagtgtgccgtgtagatctgtgaccgccaaccacgtcctgcrtgtgtcaggctcaggccccgttctgcagaggagcccccagagcagggctggcactgtgccctggatgctgccccatccactccagtggagggtctgacaggctgtggctgagtggcacccctggcagcacagcgtccggcattgtggtcaggagtggccggctggcggcttgggatgagtgtcgggtgcacagggtggagggtgggtaaggggcactgagctggcctgatgggctggagcctcctagggcagttgggtggcctgatcctctcctgtcctgccccatgctgagggacactagggaacatttgggggtgtacttgaggggccattgctgtgcaagggactggggccagggatgctgagtgtctggcagttgttgggatgtttgtggatacaagtgagttgctttgcgccaaaggccagtggggccctgtggatacacacacttcatggttgggtgcttcctgctgctgtcctctccctggcagggcttctctcttctcttacccctgtgttagttcactctcacagtgctagtgaagacatacccgagactcggtgatttataaaggaaaaaggtttaattaactcacagtttatcatggctggggaggcctcaggaaaatgacaatcatagtggaaggggaagcaaacacgtccttctttacatggtgrcaggaaggagaagtgccgagcaaaagggggaaaagtcccttataaaacagtcacctctctcgagagctcactatcaygtgagcagcagtatgggggtaactgcccctgtgattcactcacctcccatgacatgtgggcattatggaaactacagtttcagatgagatttgggtggggacacagtcagaccatatcatatcatgcctcctccttgtgaatgggcagctgcctgtctgtagagaccacgaccatgtgggtggcctctgtttgtgggtttctcccagcctctgtgccgtccgcaccagcagtgcttgtggagctggactgcctgttagtttgcacaggggttgacttggcttgggaaggtgcccttgggaatggggtgcagcttccctgcagagccttgctcctccctgacggtggcccccagggcccgctagactgttcaggaaggaggggcctggggaacgtggatgttgcaggagactcttagctgcttctggtctttcctgcccgctttggctgcctgcctggctgcctctgccaggcctatctctagaaaaggctgtgttcccagcgttagagcctggatccctctcctgctgcattgggagctccccaaggtcgggtttccttgtcttcgggtggtgcccagtgctgtgccatgctgggtgtttgctgtgggccttcacttgttcattgcaaatacttctttgtctccactgtcctctttaccaagggcacacttcaggatctcctgggactttgtgcagcaccgcccaggcctgcagaggcagggtgcagaccacctcgtacttggtgatgtgcctgcctccttggctaaggccctctcactaactctgggacatccagacgccttcctccccgttgggtctggtggcctgtcctgcttcttcctcaggcwtcttctctggtttttctgctccagtccgatggacctgggccccctgcaacagtatgacacatggcctgttactgcttttccgctgaccgccacctcctgcagccctgtgtacacacaggagccccccccccccccaaccctctggcctgccacgtgtgggtacctgccttatccaggccctgcccacctggggtcttgctggggacacctcggtttccctgccctggcattcatcgtctgcgctggctcyctgggggctccccagtcctccctggcaaggctcttgtctcttagaggacagaggctccttgtcgctcccgttcaggaagcgtttgttcaacacctgctgtgtgcagcccactttaggtgcttcaggaatatgagatgagtcaggcctgagtcttgttcgtcctcccggcacttggcacacayacagccgcctgccctccagctgcacccacgcactccgctccctgggcctggctctcgctcccttctgtgctgggaaggggcacaagaggatcctggagctggggccactgggagcagcagccaacacgtcagtgtggacagtgaggtcctgctcacgcccttcagctttttctgtggtcaccttggcccttatttagtgttgaggaaacagagggatattcgggttagggagtgtggttaagtggtgggcagtggggctgggccccattcccactgagccttatcccccctccaccgtctccggcagcgcagccgcattctgtgtttaggtggtggggtgctggcaggagagggtgtgggcctggggcaggaggaaggggaagtgggacagcccgccctgctctgagagcttcttcccgcagggcccgccaccgttcccctcctgatggcagcacctcagtgcgttccctctgctccgagcgctccatgcaggtcatgcgcggcaggtccttctgtttggccaggaatagtcctgaccttgggggcagggccgtggcttccctggatgtggccatgcgggaaccatgcagactgagtgtccacaggcccggcattgacacgccatgtggagcctctatccagcctcctgtgaccssggaacacgcggggaccctgtccagcgcctcctctgatcccggaacacacggggaccctgtccagcgcctcctctgaccccggaacatgcggggaccctgtccagcgcctcctctgaccccggaacacgtggggaccctgtccagcctcctctgaccccggaacacgcggggaccctgtccagcacctcctctgaccccagaacacgtggggaccctgtccaccgcctcctctgaccccggaacacgcggggaccctgtccagtgcctcctctgaccccggaacacgtggggaccctgtccagcctcctctgaccccggaacacgcggggaccctgtccagcgcctcctctgaccctggaacacgtggggaccctgtccagcgcctcctctgaccccggaacatgcgggaattgctgggaagggtcctgagccagcgccccgtggtgtgaacgtggcctcatgtcctcctgcgggagtgcttccgcagtgtgccagtggtgggccccggcttctgggggagccttgggtcgcggggcggggatacagactgagctggcgcctccagctgttcgggctctgatgcaggtctcccaggcgctctgctcttctctgctgcactggcccgtcactgtttctaccctgggaacagattcttccggaaggttccctgctgctgcagcggtgctcaccggaaggcggggcttcgaggcccttgtgtttgcaaagcagattcttaccgagatcccagaactacctgtgggcctcaaaagatgggtctgacaagtgtcttgtgtgaagggccagaacggactctttggggtttgccgggcaggtggtctctgtcgaagacgctgaactctgccatcgtgctgtgagagcggcagcggcgattcgtatttgattctgggtggctgtgctccatcaaaactttgttaaaaaaacaaaagttgtttacaaaaacaggctgtgggtgggatttggccacaggctgtagttgttggaccctgttaagaaaccaccgttcaagtcgtagccatgctcatcttcatgaagatccttctgccacgtgacgtcggcttgggccttgctgcagggaggtgacccgcaagattgatcccggcagccaggctttcatttctcgcaattgtctctttcaggaaagatgccctaggaccatacactttgtggccttaaggaggatggcgtcctctggtgttggccccggctgggcggtgctgcagggtgggagctgtgctctgtgtagggaaggccccctggttccctgctcagaccgtgggctggctcagggctctcccgcccgaggtgtgttgagatggcctttgggatgagtcattaccatccggccatttgcccttttgtctttctcatgtgtctggcatgttcttctgggaacttttcattttgacataatgttacactgacaggaaagttgcagaagtcgtggagaatgtttcgacgcaccctccgccagctttcccgagggtaacgtcttgtgagcccgtgtacagttatcagaagctgtaaggcctgggtgcagcaggcgcgggtcctgactgcgttcaggtcttgccggctctcccactgagctcctttttctgtgccaggatctggcctgggatccccatggcgtttggtggccctgtcctgccctgcactctgggacaggagagaatctgctcctcggtctytcctgtcgtcgtgaccccgcctcttcgagagcacgggctggtgttttgtggatgttcctcagttggagcgagtctgatgttatacatgattaggttgaagctatgcatttttggacagaaaatcttaaaagggatgtcatgtccctctgggtgtgtgatgtcggggtgtgcgacatcaccatgttctgttgcgggtgtggtcactccggtcacctggcgaaggcctccctaaatgcatggctgcggcttttgttctgataataagtatcttggggaagatgctttgagaatatgcaaatatcctatttattttattttatttttttgagatagagtctcgctctgttgcccaggctggagtgcagtggtgtaatcttggctcactgcaacctctgcttcccgaattcaagcaattctcctgcctcggcctcccaagtagctgggaccacaggcgccygccaccacgcctggctaatttttgtatttttagtagagagggggtttcgccatgttagtcgggctggtcttgaactcctgacctcaggtgatccacccacctcagcctcccaaagcgctgggattacagctgtgagccaccgtgcccagcccccatttcttacaaaaacttctcctcctagttcaagcatctattggtgcatctcagctgcggggcttgtcaccatggccccagggcggttttctgtccgcccgtctcttccgtgtttcctgagtgggacgctttgctgagggaggctctgcccctcgtccccgtttcctgagtgggacgctttgctgagggaggctctgcccctcgtccccgtttcctgagtgggacgctttgctgagggaggctctgcccctcgtcgagtaggttatttgtgtcagttgcttccttctctgttttacttcacggccgtgacccagtgctctgcggattcggttcattcacggtatttcagccttggtcactgggagctctcacagttgggctctcgtgccctgtgatttgccctcatctttttttaaagccttttttttttttcaaactatctggcactgcaggatgctctaaacttagatgtttttcctgcccttttcctgcagtccgccactttcccagtgagccctgtttcctcttgttgccgagtgctgcttagagatgagatgtgggtgtggggtgctgcctgctccgggtgygtcagggccccagggcccctcggtggacaccctgacactggctccatccagcacccctgggctgtcctcgcctcctgtgctgtctccttggtcttgagaagcccaggtgtcagcacacaccatgttttacttacccatccagtcctcacgtgcgcacagggtctttctggaattgctaatccatggctctgtgaggagaggttgacttgcgagggtgcagtgtctgtggacaggccgttctgtccttggcctaccgttcccagtggaagtggcgttttctcagcaccgtgggtgccgttgtgtttcccactgcctggtgttgtgttctttgtttgtggttccyttaggtttaccgcttagagctggtgtttcattttgagtctttttcattctggttgattaaaaaaaactgtctatacagcctcatttgcccttctgctgtgcagctgcgcattttcacatgcctggggctgacttgcggccccaccaccccagactcccctccctggccaccccagcatgctttctgtctggtgattttgccttttccagaacgtcatacaaatrtggcatctttggctcatggaggtgcatttgggactcaccgcgtggctgtgtgaatcgcagcgctgcttttcgttgctgagtgatgctccaggcacggctgctctgggacttgtttattcgttcactggttgaaggacatctgtrttgtttctgggtttggtgaaatggagtaaagctgctggaaatgttggctttgtatgatctaaactcttacttttccttgagcacatacttaggagtgggactgctggatcctggcatccttttaacttcagaagacattgccttgtgggtctccacagcgggaagcatccggtgtgtgcgttcgcggtgtgtgcgtttgckgtgtgtgcaggtccactccgcacaggcctgctcstgctgggccacgccagggttttgggcttrgctgcccccacagggctgtgtgggctgtgtgttgcgttttccagcgtgcggctgctggccccaacctggcgtcagacagttgctgtggtgctttctgcagcccccagccgtgttggcttgcacagccctctggacttgtggtcatcatggagttgtagccccttttccccacctgatttcccacgtatcgrgatcaaatctaagctggtttcgttttgcttcctctcaagtcttttgtctttcctcccttcctcctttttcattgatctctgttctccggtgactttagggaaagactgtacctcattcattccgaggcacgctccttgactagagcagagagcaagggctgagcagccacggtctcgaaagctccttgccgcctgggaggcttccacgcctgggactgggggctgggcagccagcgtgcagaggtggaggggtgcatggaggcgcctgcgggctctgaggcctggcttcccgagcccctctagtcttcatctgtgggacgatcacacagaccgcatggtgtggggggagcgaggggcgggcacagtggacgctcggtgtgtgtgctcctcctctctccctgtttcttctttgttcctcttgtctttaatttacttttcgtcggaggacttggccgcagcgtgccctgtggacttgagaccgaagctctcttctgctctttgtaccctgctgcttcctgatccgttcttcctcccctcacttgtgtacaggactcgagggagggatggggtgagagcagagcaagccagggatgtagtgagctttgtttggacaggaagggtttgcccgcgccgtcatctcctcggctctgctgggaaactgtgtttgagggagatggtggggtctgagcgcagacggctgttgtcctgtgagatgcagaaagcgcttcttatgggcgtgcaccatggaattccctgctcggaccgcactgggggcaggcggtgagtatcggtatagaagtagcttttattaattggtgaagcccgtcacagatcygaaagcatcttaatagtctgaaatgatggctcttcagcaagaaaaatttgatttgggacaaaagggagacacttgagacccaaaatgacttggctgtgttgaggatgggaaggaggccttcatctgccgcacgtctgagtcactccagagttttctccactgccagtgtgagtcagagcgaatcactgttgggttgtgacttcagaagaagtgaactctgtctcaggctgtattaatagaagtagatgcttcacaggagaggaggtgtctgtgcgagtcacagccctgcggggtctgatttccgctttgggcgtggcttctgagccgggacctcgaggcgccaagggaacaggagcagccgggcagctgctcgctyggttgtgcctgctgtgtacygaggcgtggggcatggcggcacggctgtgagcgcacagtccagccacagaaggaggcttcaagaatctttgcggtgctgccatctggacatctgtgtcattgaagtcacaggaggaggcttcaagaatcttcgaggtgctgccatctggacatctgtgtcattttgataacgtgtgtgagatcagtggaggggagccttaggaaaatcggctgtggtttaataaactgaacttcccgctgctttgagccggagcctcctggactggaaaggcgtgggcctcatggccacctccggcctgcgcagctgggtctgcactctcacaactgtgctgagcccacgcttgtgcccttactagtggcctgacctctgcgctgtggagaagggtggatattgtcgccaactctcagacttcttgtgtgtgttcagaaagtacccaaackgattcaaaggaataattagcgtatcctgtaagatatgaatcttaattcctaaattacatatttagcagattgtccaaaatagcacttgtaatggcaacattcaattagtttaaaaaatgtatattattgcaacactcgccatgagttttatttagaggtttctaaatataatgctataaaaacacagaagtgtttaaaactatttagacccacgcagccgcagtgagctcttgctaaacttcctacgttaaccagctcttgacaatcttggattgtggggaagtcytctgatgtagtccctaaagctgacacgccagagcatctcgaggctgttgggggctgttgctgggatcctgaggccgcacacctccctgctatgagttctgacgtttacaaacataggaagtgagttgaaatgacagagtccttggggccccactcttgagtgtcctcctggggttggcgggcgtggggctcccgctgtgccgggttcggctcctgtgttgccgtgttccctgcggctgctgcagccgcttctcgtcacctgattgtgtgtgcgcctccagtgctctcatgggctgcttaaggcagggactatccatgtggcctgaagaagaagccgaggcccggggaagttgcatgtaattgacaccagagggctggcctcatttcaggaggagcagagctcgggttttccgtctaggtgggagatgggatggtgatgggcccacaggcagggcctgtcctctgatgggaatccgaagtgggtgcggaggacccagagctgagggtgagcagctctgagctgcagagcgggtgcggggaggctgtgtgcgcagcacagggaggcgtctggaatggccgggtgggggtctggaacccatacttggtagcgcctgtttggtctgtcccgtgctcttcctgcgagccctcgcgggggccctgcacttccccaggagctgcctcagagatgtgccagtgaagaagggatggaactgatcgtggatcgggccggctcctggaggccacctgggcccatttctgacagccgctcctgccgcgtccctagctcagaaggagctcgaggctgagccgtttccccagggctgctgcctttgtttctcccattctgaaaggagatgaaagtttctactgaccttagagagaaagccagagtgaaaccccctctgccaacccctggctccctgtgaaaagccttcctggtaatcaagtgtttacagaggaaggctttgttcagaccctttctggggctctgtatgtttaaacaaagagctttttagacctaaacacagatgttcatttgaaaatgaaaaatcaaattaagcagaaccagcctttgaaagttaatgccctatagcaagtaaaacaaagggagaaaaacactgtgttgtaaattttacttaaataactttttattttaaataaagttttaaactaaaaaagtataatttgaaagccactcatcttcctctctgtcctccagtagaacatctgtgctgattctgacgcggatgaatgacatgaattaaaccaaaaccgtcggagcgctctttttaccataattacaccttgttcgtttgtgagacacaatgtggggatgaaatgccaattaagcctgctatgataatgaggtggggcctgaatagtgatcagcggacatgaatcccaccggaattcatttgctacagcccccaagtttgttctcttctgatgggaatgttatcgtacataatgaaaatctttagtgctccttgtatttaaaaatgatccattttggggtttttggtcagcaagttttaaaacaggtgttttccgagcacctggatgggtttcatgtccccactgagcatcctgttggtggggggtgggggggtgccggtgtctcctgycccctgcctggactcttctgtggagagctatggtgtcacagcccgggacacagtccagcgacatgtgccaggcaccatccccatgggtgcccttgcaggtctgggtggcagctgagaaaccattttcacccatcactgtgtccaagcatttaccatctccgaccctcaaataccctctaatgttttgaaacataggaagtgcgttgaaattattgaaagcactgtgaaggaaatgctttgggtgttgtggaatgacagggtgggaaagacgtcactgggggccaggcagggcctyaccaggaggcagcatctgagcagaggcctgagggcagccgggggctgggcaggggtgaccaagcgggacagacgagctgctgggacgccagcagggctggcacagtgcggggatcacagcatgattgcagcgggcagctgttgaagactggaagcgcggcagtggcatggttacctcacacagtcggaagagcgacctggagaaagaggccttcgggatggggagcaggaagtgtgtcggtgcgtgaggatgcaggggtccagcgargaggctgtgggtagttcagggggaggtggtggggtggcaaagaccaccctgcagtgaccacataatcctcgagggccagccccctctgccccagggctgctgtggcttgggctgcagcctctggactgggcttcctgccaccggatgctccggcagcgagacctcaccaactctgactgtcccgccccacacactcctggcttaccgcctgcagggaaggtgcttgcgactcctctgtgttgctagggatgttggccctgcctccttccacgcctcccggtgygctgccatcctcaggccctccggctgtcccaggcagccaggtgctgagtgatgctgtatgtgggtgcccttcctgtccttgggagccaggctgtggggccgggccctgtgagaacacacggcgtcaggagcctcctggctctttcacactagactacgctcctctaggggactgggccagctgcgttctggacccccgggcccctgcccaggtctgcactcagctgtctctcagccagggccaggagggtctccatcacgagtcctcctgggggctgaagggtgactggctcccagctgagagagccggctgcagcatggactcatgacagctggggaggggcagccctgcagaagggactgaatggtgactttcctctctcaggtttcgtggaggccctacagcccatgcrggacaacacgttccagtgcagctgcaggcgtcttttgcgggatgggccgagagtgtgacgggctatgctagcctgggtctggtgkgctggagaggagggaggcggtctcctaggagggatttgtgcccctggcctgccttctccccccacccctgggagagtggagctcacgtgtcctccttggtgttaggcagggttggagagggagcctcggagagcctgctggcttggcacaggtttccaggagcgcatgtgggaagggcagggtggggccgggcctgggaaagggggagagtgagtgacyatggccgtctccagggatgggcatgtatatccgatagagaaggaagggcagggtggggccgggcctgggaagtggggagtgtgagtgaccatggccgtctccagggatggacatgtggatccgatagagaagcggcctgccgtgctcgcacctttcacgcaaggcaccgacgcagtggaggggtgctgccgatgtgccagcactaagggcccaattcctagcctaggcgtaatggggcaagggccctgtgctgggggtgggaggcgggactgtgtgctgggcagggtggaggggcggggctgtgtgatggctggcgctgtgtgtgatagataggtctggggggtggggcttcgtgctgggcagaatggaggggcggggccatgtgtggggcaggggcggggccatatgtggggcaggggcaggggcagggctgaggtgttggtgccctttggttgtggggccgcagctggatagggctctgggactgtgctccagaaggtgttgctaggtggcatctgtgacgatgggggcctttcctgctgccctaccctggagctggggagcgsggtgggtgaggagcgttgaggaggagagagctggagctggtggkactggggttttggctgggygtctcacgtgcctggactttctggtctcatctggaaggtggtctcttactggaccgtgcgggggtgaggagacaggccgaggccaccaggtaaagcagggctgtggtgagagaggccccattttccctcagaaccttcacagtgcgtggctggccttggcaaggctgcatggctggtcccagggcttcctggcctcgttacttcctggcttcagggcagtgtaggagcagccacaaagcagacatttgggttgtcctttatgaatgcctcgggtgatgatccacgctccctgccttgccccagcgcaggctgtgcccgcccaccctcccgtggagcccacgctttgctctgcctgctgctgccaggccagcagagaccgccccgtagggcactgcggtttctgcggcctgttctgccctgagtggccttcctcccctgctcttagctgggcsccctcactccacctcgctgctggctttgttgcctttcaggctgtgaccacctgaagccagctcgtgtgttagtgccctttgttagtaaccaaccccttgtcggcagagaccttccctttctgctcactggaatatccccaagcaggacggtgcggtgtttgtggcctcagagagtgaggctctcccgggctgcagaggcacagccagtttcttcccggcagacctcttttcagaacagcccctcactgcggtgtccggcccctggggaagccgggctctgactgggtgggtcagccctcaggctgtgccaggaatcccatctccaggcgggctgtgcgtagttcccttcgtgttttaacatttaggaggtgagcggtttccttccctgagctccggaaagagtccccagggcttgcggggggacctaccctgcattgcacgttggaaggagaggcagctgcaggctgagcccacatggctgtgcacggcctggcgtgggagctgcagtgatttatgtgacctgtgctcagataattaaagtgggatttggcagtgaggtctttcatggcaaaggcrttagggatgtcacaatgaggcatgtaagtataaaacagttatgttttcaggttaagaatttaacgaggagtaaattcatttaaaccgaagagctggcttaaggggagctttcgtggaagatctgtagttgctggcatttcattccttctcatttgagcccagcctgtctctggtggcagagcgcgtgttccgagtgtccaggtgccgcagccgccccctgtaggcaccagcgtgtttgacatgcgggtcagggatctgacgcaacaggccgcctccacatgccagactgcgtcccccttggcctgctattgcgccgccgtgacggctctccttcgcggaggggcggggctgtgggggctgtcttcctgtgttttctctccggggcctcatctgccttcaggagcctgtgcagtgccactcgggctgagcagcctccgccagtgcacaggggactccgggcttgcctctgtggaggagtttgccgctatctgctctgcctttgtcctggttccccaaatggaggcccagcctgccgtggttctaatccaggtttctggtcatcaaagcagcatgcctttaataacagatatggcctgttgtgcagttggcccggagagctctgatcattacttatctgccacgagatgcttttgctcaaggcaggctgctgaggagcacactccttaccttcattgaatgatttccagacaccggctgcatatttgattctctgccatgtgtctgggggcctctttctccgacgtccagcggggtggagtgttgtatggcgtggcatcagaactggtggtctccccgcattccttgccttttcccaccccatctccagagtccggacaccacctgtgagactgtccctctgcctggggatgcggagggactccgtgcacagtggttcagggggtctgcttatgccacactgctgggatctgggcagggaggaggacagcacctgccctctgagtagccgcctccctggctcctcctcgtggccgctccctccttctcccctgtgggatcgagtctcagtgttctggctgtgctgcccggctcctgagaggccttcgcaggggctcccagggctgcctggtggtggkctttgccccagtgctggcccatctgcggttgccccgcccaacmaagagcacggtggtcgagagccccgccgctgtgcagtggcctcgggggcgggtgagatctgctgcactgctgtatcgcctcaccctctgtcctctcaggtgctcacccacttcttccaaacagaaacgtcatcactaggcatggcgatgtcccatgtgccgtctactgagcggcggggcaggcaggcccaggccttcactgagtgcaggagcgcaggtatgactgtgtgtgcagggcccgtcggggcagccatggcttgggctgcgacccggccctcagcgtggccggatggacggcctccctctggacacaccatgtgggctgagagctgaagcgtggtcggagctgcccctttgtagggtgcaggggcaggggagagagcccgttccaggcagaggcagcagcaagcgcaggggccctgaggtgggagaggacgcgcgtctccagcaggcaggcagcgtggccaggcctgacccagcgctgacccaggtgttggcagcatcacggaggctgcctcctctgagttgtggagctgatgtcctgagaggggacagtgccacctctgccgaacctgttttctccgtgtgccttatacacctgaggagaggcccgctttaggagtgggtaggagaagacgccatctctgggcattgtctctggagtgacaaggatgcgtctcatgctgaggatggcgtggagagtggtcctgagagtgctggtgacggtggagacggtgacggccatgatggtgcgagggtggcggtgaccgtggtgtcactgatggtgacagtggtgatggtggggacgtggtgagagtgctggtgacggtggtgatggtgtggagagtggtcctgagagtgctggtgacagtggagatagtgacagtggcgatgatggtgcgagggtggtggagaccgtggtgtcaccgatggtgacagtggtgatggggatgtggtgagagtgatggtgacagttgtgatggtgacggtggtggtgatggtgacgtgagaatggtggtgatggtggttattggtgacagtggtgagtggtgacagtagcagtggtggtgagtggtgacagtagcagtggtggtgagggtgacagtggtgatggtgacatggtgagagtgctagtgatggtggtggtgatggtgacggtggtgatagtgacggtggtgatggtggcggtggtgatggtgatggtgacggcggtgatggtgacggtggtgatggtgacagtggcggtggtggtggtgatagtgatggtggtgatggtgacagtggcggtggtggtggtggcggtggcgacggtggcggtggtgacggtgacggtgatggtggttgtggtgacagtggcagtgttggtgatgatggtgggtgcagtggcaggacttggcatctgttgagagtctgccctgtgactggtgccaggacctagcctgcgttttcaccttatcctgtgctctcagcctcttctgctggggagactcagycctgagtcagacaggagggtccaaggtcagcgaggctgtgtgatctgcccactcccacccatggcagattcagacctccagtcagggtcttcccagctgcagagccccctgtgtgcactggactgcactcctccttctcctgcctggtatgtgtttatccagcatgtgtcaggcgtgggccagcttgggctgtgatggtgactgagacagctgtggccctgtgtgcacggagccaacagtctagtgggtgagcagcatagaagctgttcactttggtgagcatggagccggtagtctggtgggtggcagcatagaggctgctcactttggtaagttgagggaagaagcgtctttgttctttactggctctcagggtccaggtgcacagcctcctggatggaggccctttaggaatggagccccagtctcaygccaggcacccggatggagaccctttaggagtggagccccagtctcctgccacccacctggatggagaccctttaggagtggagccccagtctcatgccacccacctggatggagaccctttaggagtggagccccagtctcatgccacccacctggatggagaccctttaggagtggagccccagtctcatgccacccacctggatggagaccctttaggagtggagccccagtctcatgccacccacctggatggagaccctttaggagtggagccccagtctcatgccacccacctgratggagaccctttaggagtggagccccagtctcgcgccaggcacagtggctgtggcccttccccccagggcagaccccatagcacaaaagcccgcatcctctttggtgtatgaatgttcccacagtggaaactagggtttttccagtcccttgtgacaaaggattatgagttttttcccattgaaggggagcaagtttctgagggtgggaaggaagccgttgaaaacaaattggcagcactccccccatcctcttgctgatggggaaagtggttaattaggtgatttttctcttcccctgacacgtgcaaatgaggcttcgttaataactgcactgttacagaaatgatacgactttaacaccaacgtcaagttgtcaggcgtgtctgcagagtggaggtggggggcactggaggcccctgcgcccctcccgacaggagtcatgctggagccgcgcctccagtcgctggggcttggccttgggcaacgagctgttcccctcccaccctccaacccccttcagggccagcttaattatttaaaactgatgataaaaacagaatgagctgccaagatgaagtgatgatttgcggccaggacctggggctygggtggacgcggctcccrctctccctgcttgctgtgtgctggcccagtgcggccgtttccaaggacgccttccggtttgcagccagggcccaggacacggacagcatctctgctctcaggtgtcaggaggcctgcagatggtgcagggcccgctcagggcttgtcctgccaggacgaggcagacgcgccgggtgggcaggtgggtagggtaaagcagaagcaaagcggcagtaccacagagcaaggcaccagcattgtaatgtctggagtgtggcaccccctccaggaagcaggtgcttcacgctcagaagcgcctggctgtggcatgcttcttactatytgtcagaaggctcaaggtcaaaaggccgtgctttctgccatagagtttcaagagtaaaggagaacgcggagatctagtcagctggkattcctagctctgctcagaaacaggctgggctttgagaccttttcctcctcattttccctgctggtctggaacagaaagtacttgcagctgactgcgctggccgtcgtaaagcagtgtgcacctgtctctcaaacctcaatggttgcctgggatttgcttctcacctatgtccttatccatcaacaggtagttattaaatgcccatgtccctgagacggttttgggctttgtgtggctgggggcgaagtgtaaggaatgacctytacctgtaaggagctcacagccagccccttggcttgagctgtgagaagtttgaaaatccatgtgctaggttagcccagatgacaccaagagcattggtgctggttcttctgagtcatgcctggggcatcgagggctgggctggtgggaggtgactcctcacagtcggcagccagtcccactggggatagtttcatggccagaatggcctaccaggggctcctccctgcagggttgagagctcacgcctgaggactgttcacaggaagccacggcccgggtgcttcctgggtctcgggtaggagtacctcttctgaaccacgtctaatgggttttttgaagagaagagaaatgaatctcccagtgctgacttctgagattcggctgtctcccagcccgatgcgctcacttccgtccacgctcccgcctggcctctgggtggcgggttgttagtacagtaaagattgctagctgtctcttttgcaaatctaaaatgagatttcatttttttaaataaaaagaaaaaagtgcttgaacatttgcagctgggagatagcacagattagaaacattacttatctctgctgcacaaaagaaggcagcgagagaggaataaattgctgttgaatgctaacgaagccaaggcggcaggggctgcgggaaacaactcctgttgaggaacagagcgagcacctgacctgcaccctccacagtgggccgggcgccggagtgcacagggcaggcggggctgtgggtccaggtgagacaggctgtggctgctgcatgttgacctggcggtcggggtggagtctggtcaccagtgttagcggtgcgttgggggatgctccttcctggaccatgggaggctgtgctaccactgygcttaggagcctcagtgaagctcaccctcttcagccacgtgcactggggtcacttgtgtttctgtcacccttgccacccatcgtgtcaggaggcctccgtgtccatgccagggtgccctccatccccagacattcyggcaccttcctgttgtttcctctataagaattcccacctgccctcttggcttagcaaattccagctcagcctttgaggtccagttcgagtagcgtcttttctgacccctttatttggccctccaggggctttccttctgttcctccatttccccttgggcccacctctggggacgccgggccttggtgcgtgatgcctggcgtgtggtgtgagccctgtggtgtgtagatcttcattgcctctggctcatgccgggcagctatcgggtgtggtagtgcgctcccttgggcctcctggagcagtggcagcaggcggctcttgcatgtgcygtgtcctccgtgaccagggctgtgctggatggacgtgtctgccgtgctgtgctccctgcccatttgtttgagggggccgtccttagcgtagccttcctgacttgttaaccaggcaagagaccatacacatgatggcttgggtgactgctgctgcgtacggcatggttggtgggaccccaggcagcargggagagggaccctggctatttggatctctgcggtgagtgggagggactcttgcccactttgtgtctggttgtcacagggtttagggcccgaggtctcttgttcctgtctggactgagcacctgggtccccgtggcgtgtgctgcgcaggcctcatctgtggacggagggtgtttgccatgcgccttctgcgcagaggcctggtgygtgactggcgctctggtgctacggggctttggcagaggacggcgctgtgcagtcagccccagtcctggggcctcaaagactcaaggtcattttgagtcctccaaagcaaggtgattccaagtgtgtcttcagagtctgaagtcgcgggcgtcctcactgatctgtcctctgtgccccgagaagacagagctgtgtggcatggagccgccgcatgagtgattccgctgccttcctcccgctggaggtgaagcttcctctcagttccgtcttactttgatccagtgcgacaccgcgctgctgagcgtgccctccccgttggtctgggagacctgagtgcagaagcctacagcaggggcaccccttctgctttcccggccctcgtcccttgctgaggaacactgcccaggcatgagcctcagaatgggctgagtctcgatgcaggcgctgctcccaggggtcccagacgcctctgcagcctcaaggcctcactgtctcccttccccactcagcaccactccctgctggtccgggcagcccctgctgctgctgtgtgtctcttgcctcatcccctgtgccaggggcgtgcccttctgcacctccagaggcctggtgcccgtggatggccggctgtggctgtgggtgtccgcacctcctgctgcctgggttctcaccctcatagcttctctaggtgtgagaagcactttctcwttcactgcctggctcccagcttgggttccttggcattctcggacccattgttcctcggccccattgctttctcagtggtgtggactgagatgaattggagcagtcgcctgtctgaggcctgggcggagtgagaccccctccccaggtgtcccggctctggcccccacgtcctcgctgcctgcattgtgctgctttggattttgggctggttttgagtcctgtccacttggtcttggctgaggaggccttagcggtcatctcctcttgtgtgtcccggaaacaaggaagttgaggcctgagtggggtgagcgcgtgcttgggtgccgtggggtggggtgtggcagagccaagaggggtgagcgcgtgcctgggcgccgtggggtggggcgtggtggagccgagtagggtgagcctgtgcctgggtgccatggggtgtggtggagccaggagcctggaggctgcccccttcccctttcacatctcccgccttgcagctggtgtgggggatacccgtggtgcgtttatcataaccatgtcaactgtggtccactgcttgctttctgtgcctggcagggtccccgggtgcgctgtcattcctggcagtcctggagggtgcccgcctgtgggtggcagcctggaggtacrgtggcagacctgctggccgggggtcaccggctatgagggtggggcccacgcctgggccagcgtcctctgctgtcgggctgtrccatgggtctgtgcccccagcctctgctgggcggggtggtggtggtcgtggggcagctgcagcctgccccctcccttatgtctgtggctgggcctcgtgaaggggcctgagttgacgagtttgcctgagacacatgcaggaaggttctctgaggctgagtctggcctcgttcctcctgtcctctgccgaggagctgtagggtctcgctgtagcgggggaagctgtcctcgaagtcttcaattcagatgccccttggagagctgtttcagtgcccgccccgccctgcccaatgcacacacagaataaaatagaagagtcccctggtcccatgaaggcagctaacaaattcaaagctctgtggaaaagcagcgtaggaggagacctggcttttgagagtgaaagccgagtccgcactgaggttcggccaggctcatgtgtgcccagagccagattgcaggcatgagccccgccacccccagatgtgtgcaggcgcagagggtcagcaccacagctctttgcgccggaggactgggtctttgtgtgagttctccctgggatcacagggccctttcctcctgggagcccttgtgtccgacgaggacgaccttgtggctggcaagtgtcctggaggctggtccctcaggaccctccctgtcctcatctggaattcacctttcttctgagcacagcctgtgtggcgtcgtgtgctctgatggccttacccagaggccaccttggccgccggccttgctttctcctgtttgtgggctgcgagctgtcattacgtgactgagtcctgatcaggcctgggggagcccgattctaacgaccctgaggctcatgagggaccccgtctctcctgctgtgtctccccgcggacccgcgctctccttccttcacagaagcaaagctcccttgagggagacacctcgcctctctccttcaggcacccccacccaccctagggctgccggcaagtgtgcgtggatgcactctgcccttccccttagagacggctggggtgtccggcctgcacccacagctgtccctattgtccttgccctcctctcctcacggcttccctgcgttggccccgccggctgagccttgtgcgcctgtgtgtccctgtgcccctctcgcagtaggcaggtgatgacagcggctcagggaggaagtgctgcctcgccccaccctgcccagcattgctgctgtccacctcgcctccttgcgttttctgtttagcaacagccacagcacgcactatctcccctctggttacgctgcccttctctttaacrgcgaccgcggcttcagcactgcccatctccgtttgcagcctgggagccgcgctaacccactcaggctgctttgcatctcttctgctatttgaagttaagggtgtgtggataaagggatgtgtgcttggctttttcttttcttttctttttttatctttccaaaaacattttattttaaaatatttcttgcaggctgggcgccgtggctcatgcctgtaatcccagcactttgggaggccgaggcgggtggatcacgaggtcaagagatcgagaccatcccggctaacatggtgaaaccccggctctactaaaaatacaaaaaaatgtagccaggcgtggtggcgggtgcctgtagtcccagctacttgggaggctgaggcaggagaatggcgtgaaccccggaggcggagcttgtagtgagctgagatggagccactgcacyccagcctaggcgacagagcgagactctgcctcaaaaaaaaatatggggagatatatatatatatwtttactatttaatgattgctcagtttgaaaaacttcattttgctcaygtttcactgtagtgtatgtagtgtgtatatagagagctgcacaaattatccatgaacacggcatcaccatcacccggtcaggaaacagcgtgatcagctgagtccctcctgcccccccacttcctgttcctggaactcccacccagttcccatcgcccygggtcacttttgccgtgtttggtctctatgtagatgggtcatgtggtttcgttggttggagtccttcccccttgctgctttgcacctgcgagctgtgctcctgccccggggcctttgcacctgccatccacgctcctgtcccggggccttctcacctgccagccccgctcctgccccagggcctttgcactggccagtcctctttctggagcaccctgtctggatagcagcagccttcctgactttccttcctgtctttcacaactgttacctcctcgtgggccttccctgcccacctgtgaaacatcatgactgtctgttccctgtcttgctgtcactttttcccgtcaagcacattatagactttggttttttgtgtcttatttctcatccgtcttgtcacttgaagggtagcgcctcctcagcagtgttgtgaacaggttccaacacacaggggtgctcgggcatcctctgtcgagagtgtgggtgagtgcgtgtcccgttcccgatgtgagagctgtggattctgcatccagagggattctgcatccagagggagtgctggccactgggagccctttagggacacactcctccacactgaccatgggtgggtccctgctcagcctcctgggagggctgycccttgtggctggcgttgaggccacctgttcccagcagctcagcaagggctgtgagtttgctcatggctgggcgtgtgctcccagcgggctccccactcaccagtgctgtcctccctggcctctgctttccttggccctgcaagctgcacagacgaccgtctgcgcccgcgtggcctgagagctctgtgtggatgctgtggctctgaggttcctgtcctctccctgccttgctgtcatgagttcgggagcagcttctgggggttccgactgccgacctgacatcgtcacctgaggcttttcagctgatggagcctctccttgtctgttgccccgtgccccacagtggctttgtctgcgttcctgggttccrcgttccgtgctcctctggctgatggagcgcagctgtggactctcccgtgcgttgcccagccagtgccagtgtgtctcataggggtggatgagacggagctgtcttgggggccacttcctcttctaggttcgccggatctgctttccccacattctgtgagctgtgttcccacacctggaaggaaggaggaggagagcgaaggggatgtcagcattttatttgaattcctttctgagtctgattacaaaagcaacacactttgattcagaacactcgagaatgtggaggagacagcaaagctgagaagaaaggtttcccgtcgtccctcttcccagggaaagctgctgtgactgttttggccaggatccttcctggcatttttatatacatggaacatgtttttctaatgggattttaggagaaaatactgcatgcactatttactgagtcatcttgttttgtttaatcttttgtgaacattttccatgttaaatattcttttaaaacataactttttggctatgtactgccctccctctgaattttttttttttttttttttttgacacggagtctctctgtgtcccccaggctggagtgcagtggtgctatcttggctcactgcaacttctgcctcctgggtttaagcgattcttccgcctcagtctcccgagtagctggggttacaggtttgtgccaccatccccagctaatttttgtatatatttttttttttgtagagacggggtttcaccatattggccaggctggtcttgaactcctgacctcgtgatccacccgcctcagcctcccaaagtactgggattacaggtgtgagccactgcactcggcccaaatgcttttatatgcattacctggttacccatgaagaaggccctctgatctgctagaggaagatagaggagcaaatctgtgtgccctggggttggacgatgagtttttaggtataacactgaaaggaaatccataagagaaaaaatttgataaatttgccttgttaaagactcttgctctgtggaagatactgttaagaggacgaaaagacaaaccacagaatrggagaaaatatttacaagtcagatatttgacaaataactggtatccagaatatataaggccttcttaaaactcaataataggaaaacaggcaacctaattgaaagatgggcaaaatgtctgaaaagacagtcactgatatccagagggcaggtgtgtgaggggaggatgctcgggcggggcatggttgaaaacacagtcaccgatatccagagggcaggtgtgtgagggaggatgcttrggcggggcgtggttgaaaagacagtcaaccgatatccagagggcagatgcgtgagggaggatgcttgggtggggcgtggtcatgcacacctgtgatcctagcattttaggaggctgaggtgggaggattgcttgaacctgggaatttgaggctgcagtgagctgtgatcacaccactgcactccagcctgggagacagagagagaccctgtctcagaaattaaaaaataaaaagaggatgctcaggagtatttgtctttgggggattgcaaattagtacaaccatgagacatggccrcacactgtgggaatggctaaaaactgtaagatcactgacggcactaaatgctggtggagacgtggagccacaggaactctcacgcactgctgggaggagtgcaaaatggtgccaccactttgaggcagcgtggcagctttttacaaagccaaacacggtcttatcgtatgacctgatggccctgtctgtgggctcttaaccacgggaattgaaaattgtgtccacacagagacctgaatgtgcgtgtttatagcaggtttattcatagttaactaaaaaccagaagcaccacaacaccctgtaacagaggaacagataaacaaattagtacatttgtgcaatggaatcctgttcagtgagagaatgggacaaggtatcgatcatacaacaacatagatgaatctttttttttttttttgagatggagtctcgctctgtcgcccaggctgtagtgcagtggcgtgatctctgctcactgcaagctycgcctcctgggttcacgccattcttctgcctcagcctccagagtagctgggactacaggcgcccaccactaagcccggctaattttttgtattttttggtagagacggggtttcaccctgttagccagtatggtctcgatctcctgaccttgtgatccgcccacctcggcctcccaaagtgctgggatcataggcgtgagctaccgtgtccggccagatggatcttgaatgtatttttctaagtgagaaaagccagaccccagccagacatcagcatgaactcctgactggctcaacacaagtagacagattcagaaggaactgcaggcagatgcgtctgtgtatgcagggctggcacatacctgtactgctgcggggcccggrggcaggcacacccagcaacagggagctgaccggggcccagagcagggcttccaagcactgttctcggtaggaggacctgggcgtctttggaaagatacctggttttaggactggggtaggaaatacacaggaggagcctggagtgtcttctagttccagaaagtaaggaaatgcagaaaacccaaaaggatggggcgtgtggatgggacacaggagccagaggaaagcattcctgtggctgaaggcgaaacacttgcagcaagaaaatgaagtggagtgacttataacccgacgcgtcaaataaacgygggtgaatcakgctgaccgaaataaatgatggcgtgactcaatggggcagatgcagctcctccctccggaaggattgcagataaaatggatgtagttctctgccctcaagagatggaacttaatccccctagggtaggccaggctccgtgacctccttccaaagagtggagtacccaaaaggtaacgttgcctgcctggaggggcctggtgggcagcaccttcccggagcgatgagggccccgcccgggctccaagggatgatggggacgctgcgtctgtggttctttacagacctgtagctccagtccagcctcaacacacacctgaccctgcggggggcctgcctgggccagtcctgctcagaactgccaagtccatgagaaacaaggaaaggctgacaaatgagaggagactcaggaggtgtggcaactaatggcaccctgatccaaccctgggaaggaacaaggacgctgaaggacagacacactggtgctgtccaggcagagtcccaggtccgttcgtgacaccgttccagtgcttgcactgggaggctgggttcctgggaactcactgtactgtcctgacaacttttctgtacacctagtcgttccaaaatcaaaatcaaaatttactttaraaacccctgaggtaaggatcattgggaggttttgaagtgttcaggacgcttgcctgagttccccaaagcaagcgaccgcagaaccagattcaactggcagtggacctggcccctccccgagcgccrgtgactcagtggacctgctttgtcttcyggcctacccttctctcacctccaccttagaaccccaggggtggtgcctgctcggcactagcctttgaggccccttaccgaccatttggatgtgtttggtgaggagtccctggcggtgaatgacttcttcctaatgaagttaaacacgaccatgccattcctgacaagggaacctgccgtttcctgtcactcttccttgtccgcctgccctcaaagctttcgttgcatagctggtagcaaaccaacatcactagggttggtgttccctgtccctggccggagctccttctgcagctcgaaaggtctggggagagcagcccttcagcccactctgatctcatggcaggtgtgtgttagcctggccttaattaagcctggccttcgagatggatgtcagaacagcatgattattggacactttgttttggaagcccgttcctttagaaggtgtgcacttggaagtgtgattaaacacgatgcacgtgatggggtgggccccggggacaggtgttggaagtgtgattaaacacgatgcacgtgatggggtgggcgtgtggggtgggccccggggacaggtattggaagtgtgattaaacacgatgcacgtgatgggtgggcgtgtgcggtgggccccagggacaggtgttggggcttggttgctttccctgtgtattagtctgttttcatgctgctgatacatacctgaaactggaaatacaaaaaggtttaattggacttatggttccacatggctgtggagggctccgaatcatggtgggaggcaaaaggctcttcttacatggtggtagcaagagaaaatgaggaagaagcaaaagtggaaagcctggataaacccatccgatctcgtgagtcttattcactatcacgagaatagcatgggaaagacgggcccccatgattcagttacctccccctgggtccctcccacagcctgtgggaattctgggagatgcaattccagttaggatttccacggggacgcagccaaaccatatcaccttggctgtggcctccactgtgcctgggactggccacagagagctgtgtctccgtggctgccttctccttgcctgtttgcgtggtctcgaggaagctgcacagcagggcccgagtcggccgtgtgagccgctctccctgtcaaagcacacccatccctgcctgctttgacctgaacttggtgaccttcaggccatcagtggagtggggcagaatgaatagcctgtcctggctcatggcagccaccgggtgaggcgcctgcatgcgtggctcggaggccttctgcaggcacaacccccaccgtgggcctggcagcttgtgtgggaggcgtgcgggtcggtggcagagggtgagcaccagccctgtgtgaaccttcacaactcctctgtggaccctggacttggcttcactgctggtgagaatctggtgtgtgctttggggcacccaggaaatggagttgagggcgtctaggttgtacttgagagatggcccggctccgtcggtgtccttccttcaggctgaagagctgcatggagtgtgacagatggcactccctccacccgtccccttgctgcctctcgctcatggccactgctgagtgctgggagtgccccaggctgtgccacaccgtcctgatctccccggcctcccagggagatggatgtgcacgtgcagtggcagctccagagctgtcatggtggcactcgaggctggggcggtgttccctgraggcaagcggggagcctctctggggttcagtggagctcagactgccatggtgggacggagcggggcrggggctrtggtgggaataggtggctcagtgtgggccagaaggttggagggctggcgcygacacggaaccagggtagcacgagaccaccgtgctggtaaccagatggcgcagcctgtgatgggggcctggattgtgttccagcggcaacaggcccgtcggcaggtttcaggcaggggtgtgaggaggcgtgaagaggcgcgatgtgtgatccaaggtcgctttgctgcccgacctcgtccactgttctgtggcyatgcacgtgggcccccatatttccactcagcctgtgcgggtgctttgtgtgtagacttttaaaggggagaagtcagtgtggtcygagtcccagtcttcttcttctctaactctcctagagcctcaagcctcgatctgctgggaaacggatccagttagctgtgagaggggaagtggcagctttgctgagtttcactggatcttctcagaggcaccggctgttgaattctgtttcctctccccacacgctgttgtggttttcccttcagctgctagcgccstgctgtcttggatgctaaggggcgcctacggtgttccatgaagctgttctctgtggacaggcaggatctctctaaacatacagttggcgctagctttctttcagctccccagtccctgctcctggccatgggacatcattccttttacaacaaagaggatcctgtctcttcccaagtaccactgttcctttgcgatcggcacaggcaggagaggtccgccctgccaggcctgggtcagyggagctgtgcagactgtggtatagaagctgccttcaacagttgtattccatttgggcttctccatttcctgattagtagtaktattaataatattattttcaagacggagtctcacactgttgcccaggctggagtgcagtggtgcgatctcggctcactgcaacctccatttcccgggttcaagtgattatcgtgcctcagcctcatgagtagctgagattacaggcgcgcgccaccaggcctggctaatttttgtattcttagtagagacagggtttcgccatgttggtcaggctggtcttgaactcctgacctcaagtgatctgtccgcctcaccctcccgaagtgctggagttacaggcatgaaccaccatgcctggtccatttcccgattatttattggtagtaaaattcactttgaggtgtgtggctctgtgggtcttgacagttgcactgagcrtcccccaccacagccatgattcagttccatcaccctaagagtttctcctgcctccccttggtcacagcgctcttcccctgccgccagcagccatgtgggtacgtttttaaagagaagagcttccatgaggtttgaagcccagtttctccatgcatgaccaccacctcctccatgctcttctcaaagtgatgttgctttttcttgttttaaaactttttcctgaactcagcttgtaactcttaggattcctggccacatctcccgtcttcctgcacgtgatttctctgccacccttgcttttagtcgcagaagataacagcaattgtgctgggcgyggtggctcatgcctgtaatcccagcamtttgggaggccgaggcaggtggatcaactgaggtcaagagttcgagaccagcctggccaacacagtgaaaccctgtctctactgaaaatacaaaaaaaattagctgggtgtggtggcaggcaactgtaatcccagctactctggaggctgaggcagaattgcttgaacctgggaggcggaggttgcagtgagccgagagcgtgccattgcactccagctctgggggacaagaacgagactttgtctccaaaaagaaaaaaaaagaaaaagagcaattgtggctggcctgtctccctgcctgcagcgtttacggctttcccatgggcagaggccgtgtgtggctccgtccccagccggctgtgctgtctctgtcgtgctccttggcactgactgactgacctgtctggagcctccaattaaaggtcactggcagcacttcccctaattaccatgccataaggacttggcaggttttgtggctgtggtgtgagcgagggcgtgcctgtgcttyagtgatgcgttacccagtgctgagttgttgagctgcaccttcctttggatgggatgcattttggggaggaggacggagaatctgagcttcttccctaccaggcatcttgtcctcactgggcctgtggggagggaggkgctcatccttaggagctcagttgcttgtctttaggagctccttggggctgctggccaggagggagggaggtgacgggtcttgccgtcctcccccgcagcgtggagtcctcccgggcagggtgggattcctgsgggtaggtggagctgcgcacggaggtgatgggtctcaccatcctccaggccttcatacatgcctgatgggcctgtgaagttggcgggagtgggcagtcggcgccctcgtacgcacctggtggtcctgtgaagctgcatctgccgtgagcgtccagtgggtcttcagaggttaggcggtcactggatgacccagcaacttcccttctaagtgcgcrcccaagagaattgataacatgtttgcacgaacactcgtgtcatcgttcatagcagcattgctcatagtagccaagagatggggccaacccaaatgcccctcagctgtgactaaaaacaacacggctgtccacccagcraggagttattgagccataagagatggaggctgatgtatgctgcagcagggactggccttgaagacatgatgccaagtcaattcaacagtatgaaaggccaccacctgtatgatgacattaatatgaagtgcccagaataggcaaagtcccgaactcaaagcagggcattcctgagacactgccgtggcmtcatgtgctcactgtgggcagaaatatcagagtggccactgccctgggagaaccaggtggccgagaggcaatggcggctgcaggcagggacagctacatgcgctgctctcctggggtgtgtactgcgtggctgtgcggcggggagacagaccacacggtgaggtgggagggtggagcttgttagcaggcaccgttacttgctccgttacacttgtcttttgttaaccttttctacctttgagcttctttgaggacagtcaccattgtgtctgctttgcctggaatggtggctgatacacagtgggtgcttgaggtgagcgtggagttacrgttctgagacccgtggctagcatgtgagctgcagtaacgaacagtgtagtcactgtcaggactgagcaagaccggcgttgaattcttgctcatcactgactgctggccctttagcaggctctctgatgtcttctcagctgggccatctcgtctgtaaaggacatgatgatagtccttggcttggggtggtgggaaacacataaacgtgacgatgtaygttcaggaaacgatgacggcaatgataaggtctcttttacccacatgtggcgagtttcttactctacaaggctacagagtcgcaggctcttcacctggagggttgggagcaccctcctgcccccgtgcttggccctgtatttgtcacggctccttcctttttctcctccctgccccagtctggctctggtggctcccagggttatctggggccggacatcaggacgttccaggagatgtccagaggtgcgaggcaagttctgagggaggttctccaatgcagggatcaagctggcggtaggtgacacattgagtggtgtgctggcggctgcagyggccgccaccgtggctcaggaagtaggttttctgggctaggactccgcactgagctgggtttcctgcctctaatctgctctccagcagtcaggcctgccagagcctggggacctccgtgagcacaggtacctgctccctcgtccccggcacgtctgcgtgggcgcagggccttctctggcatcaccctgcccgggcagcgccactcgcatgctctgcccccttgcagtgctctgctcccagcaagtgaaggtcatggcccttggcattcctggcctcgcgctgcccrtggctgtctctgtggcrggtccggccacacctgtggacaggccctttctgtcccccctggactttgaggaaatgaagtcagtattcaccagcacagcagagctttatttttctacacatacgcagaaacttccattgtgtttcctgaattattttgacccaagtcttccagatcctgcggagtgtccaccrcacaccctgccagcagtgctgccttggaatgcctttcgggtgtccagaggaagccgctggttaactgatagcgagaaagggaatggcggctcggatgtgagcattcttctccgagttgggtgcatgtggaaaaccggaccttcactgggtgggggtccatgcccagtctgcgcccgcttccccagtgccttcttgcccaagctcctccccaccccagggtctgactgcgctggaatcactgggagcatcctgcagccggcccacaggatgggcccagcagacactcacagtgaccaaccaggaggtcctggagatgggaacgggcgctcctgcagtatcaggaacagatctgtttcttcccaygtgcttttccctgaagaactgggaggaggaaatgttggtcttcttggtacacagcctgctgcaggtcagtggcggaggccgggtttcaacccaggtctcccaggtcttcctagcgtcygatgccgttgcctcttccatcttggccacgggggacatcttgcagtctgttacgtctggagtctcccgacagcccgccctgcgctggcctccacccactgacccaccttggaggcctctccgctgatttacctgcccgagtgctgagcgccgtgcctcgagactgggggcactcaccccgcacctcctctccgtgctgtgtaagccaagaagtgctcagtgattccaacaagcactaaccctgccttttaaaggtcattcctgtctttgtcagttcttaaagttcaagaggaaataaactgcttagagctggcatttctcaagtcaagtgtcagccctccaagccccccgcccggcacggaggaagcgaggttcataaatgagctgccgggtgactcagtgatgggcgaatgggtgccttcctctctccagctcctgctagaaaggaatgaaagggaaactaataattccgaaaatctcattttctccttaaagttttgttactcagcacggggaatgctttggagatgtttctttattggtcgagtgacagcgtttagaggctgtcagccctgggtacccaggacgtcacgcgcagggagggacggctcttccccctgggggcctgtgccacccgttcctgattgaygggcaggggagctctccctgcagcgcgagagacagcagaggccccatgaaggtgccacacctaacggggtattgacttctgtgctttgggtcaaggatggcaaaatcaatgggaaaataaacaggccgaatgtgcttcattacccaggtagcgctgaagcagctggagtggtcgtgcggcgcacaggcrtgggcggaggctgggccgagtgcaggcgccgggctccatcaattgtcatgggcactagagcctcagcttcagagctgctaattgggctatcgggtgattccaaagagagacgccacagagatcgctttgcctcttcttttaactatttgtctaatttgatgcaagcctcagttaaacggggtatgtgagccccttgatcctcagagctcaatctcctcagcctggtccttccacttggcctgctgcctctctagagtgctgcactcccacrccagacccggcgacgccggccagagcccagctccatgcctcacggctctgattcactggccacatggtgctgaagtcacggctccgacagcagctccgctgagctcccaggcccggctccttccctctggtctctccttctgtctctcccatctcccttgctgagctccccaggcctggctccttccctcctgtctctcccgctctctcccttctccctcctgcactctgtctcacacacggccccatggtccccgctctccttcccttccctccctccttccctggcttttctggtttcccgtgcagctgttgtgggatgtgcacagccccctcacactcacacatggcctcctggtccccgtcccctccccctcctgcctcccttccctttctctggcatctcctgcgcaggtgttcccgggagcttgttctccgttctttattcctcggtctctgcttttccttcttacataagttcttgtgctttgacatctcttcttgtcacttcagtgtggccagacttcagagtctctatctttggctccaacctctctcctaatctccrtgatcagattttcctctgtccctggaagctgctaccttgctgttattgctcctgaccttggggccatgtcaggcgtgccctgctgtctccccaggggtcccgtgatctctgttggccactcgcatgaaggcccagcctccccaccctgacggcaggtgtgtctcccgctttcccaccagctaggccaggcggccttcccctctctaacctgtgctccggcttttctccctcgcacttagctcctgccccctccgccgggcctgggccgttgtgctccgccgaccacgggggctggaacagtgacggcggacccctgtgtggaggacagagcccggaagagasaagtcctggggcctgctggctggtcgagggagtgaaggggtgcatgatggtgtcctgggctgcagtgatgcagggagygccccccgcctcctgtgtggggtgggttccggcccgatgyggggatttttggcagtccctgagacccacagtccctccacakkctggtgtcctccagctgagatgtgtcctgaggtttcccgggtcgcacgatggcgttctggaaattggagaagtgttggtggagtgggactgatacgtggatgctgtgattttcgttcctttacgcgtcagtttgagggaactcgatggactttcgctagaacctatgatccagatgaggaaggggcaaggagcccagtgtggcaaccctggccccaagygactcctctgcccacaggccgctttccaccaccggctcagagcctccccacctccccaccccggcccagcttgtctgtccatatctgtttccaaacacccttcccgctggctctgccattcccaccctgcgtcatycccagtcctgtccttggttcctggcctggctcctggaccatcacagcagctctctcctctctcttcctgggctcaggcatcttctcacccttcaggaacggggaaccagggagagggggcacrgagtctggaccttgggcaygctgagaggcagctgagggttaatgaggccaagatataatgtcacaaagtgcaggccacgtcccggcggtaccgcctgtgagccaggtcccctggaatgccactctcccccagcatttgtgtccctaaccgagaaatgaggcgaaaacgtctccctccctggcagggaggttcagggtgtgtttgaagaaatggcagttccctttgcccaaccacacgcatcttcattgggaaaatcyggctccgcacctcmtctgaatgcacggccctgtgcagccgacagcagggctgctctgcgacccgggagtttccagctgcctggggatggacttggcgtcagagcccagcgctgttctttgagtcctgctcccatttggaaatgaggggccccggaatcctgggcttcctaccagaggcctgtgatcgtgggggaggcgctctgcacatgagggtgggtgggtgggtttagtcagagggtggttattactgtttttgcctttgaatttgtgcatctgcagtggccgaggcggggagccggcaggagcttgctctcttgtgggggacatgcagtcgcccggcctcaggtgggtgggaactcatgtctttagttacccatgctagcgtttctaaacctcatatctgtggtatagggtagtggtatagggtattggttggtaacctttctctgtaaagagccgtatggtaaatacttttggctttttgagccacgggctctgtcacaggaaarcagccgtaagccatatgtcaatgaatgggagtgrctttgttccaggaaaactttccttacaaccataggtggtgggctgtttgctgagcagcagtgcagagaaagcccccagcctcgaggctggcccacccgcctgctgcctgcctgttggccatgtggccccttggggcttctgtcctgtgcattaggcgagcaggcagccagcgctgacrgggttgacggacgcacggatggtctccttctctctgacctcgggagacggtagatgtgtccaggacacctgctgtgcctctctgcgtcactccaggcaccggattatcttctgtggcttctcttttttctccaagtcagagctggagggcatggggcggttgtttagtagagcctggggaggtgacttgcccccttgtctctgcagttctcatttcctaatctccagcagcctggggcggaagtgaatttatggtctccctgcggccgtgcttgccggggctccccacccagcatttggaggagccctgcccaggcgattacaggttggtagctgatcagctaaactggattattcattatggttgggagtgaattgaaattgcaaagggcaattttccttctcacatttcaaggtcagatgagagtatttgccgtgtggcctctgtttatctgggaatgcaaattgaatttggtgattccaattgacgagatgttgggaacagagcgttcatcagaggcagagtcggggagaagtgaccgggaggccaggctgcagcttcagagcctgctcccctggccgttcctttgattggtaattatttcagcctttggtcttctcattctctggttttgtttccgctgtttggatttttatttttttcagaaaaatgtgtattgacacttggaggcatttaagattgggattagatagagtaaataacaacagctgcgtgccacgctgagcctgatgtcctggggcacctgccctctcggagtcccagccccttccgagtctgaacctgccccccagggaggagggcttgcccctctctttcacctgcaagtgcccacctgtgccactgagtgcggctgcccggccccadcctcatgacggtgtgggggctgagctggccacgtggacttgaacccgagtcttcagcgaggcattcaccccctcccaaccgctggctcggccaagcccctgcacttgccctcttctgagagacacatggaacgtgtcacctgtgtggcagtgctgttgcttggcccgactggggcatctccccccagccctatgggggtgcccaaggcacggccctggagaccctggaggtcagtacagtggtgtcctgggggacacggtggcttctgagcccctttgtccttggggatgtggggactggggccggtgctgccgctgtcctccyagattctggtggagatttgaacccaagtcctcagcgaggcatgccacctctgagccccttcctcctcagggatgtggggtgggggtggcgctgctgctttcctcccagattctggtgcagactaaacgaggtcatgtacccaggagcaccccctgcagccgaaagctgctcgggcgagagtgggaaactgctcaggaggctcggcctccgagttcagacatggaggggccctggccgccagcctcctctgctttcttcttcagtcctgggtagatgagaagcataaactctgatctgaatctccagcagctcctgatcagggagcatctcctggctcagccgcggaggccccgtgagcgtggggcaggggaggaactgggacctcttgatgctctcgtgcttcacgacggacgcacgcgtctgatccagtcctcccctgcccattcgcagcgaggggcctggtggcctcagttccatccaagaggaaggagaaggccagaggtggatggagcgctcagagcctccggatagtgggktgacgtgggggatcctgcaggtaggcgggaccctctcaaccctgtaggtcccagggcagttgtttccctgcctctctgcagaggcagctattgattcccattctcaggcggctcctcagatacacaaggagcctgcgtctgtcgtgccggtctccaggcyggagctgggggcttcgatggcagagacggctcctctctgtggtgagtgggggcccttccccggtgttccctcttagcaaggagcgaatgtggatgcctgaacatgctcagtgttgcttctgccctgtctgggaaccctggccttccgggagagtatttctgaaaccagttcgtgctccatttaaaattttgcctctagatccaggctgctgcgaggctccccgacgggcgcctgtgaacacagctctgtgtacagttcttgtgactggaggacgagcacgtgtggtttgggaggttgttctgtccagcgatatcctctttcagaacctgtgggtgcttccggagcagagcagggcaggctgtccactggggctggagcctgtcctctgctccctgctagcctcctggatccttgtctcctgctcccgcgcgcctcctgcagarcggcactgctttttgtctcgtgtacctgctccaggccaccagttagarttcactgctccccgctgggtcgcagccctcccaaccgctggctcagccaagcccstgcacttgctctcttcctgagagacacatggaacgtgtcacctgtgtggcagtgctgttscttggcccgactggggcgtctccccccagccctatgggggtgctcaaggcatggccctggagaccctggaggtcagtacagtggtgtcctgggggacacggtggcttcatgctcatgactcagtcgctcaaggcttgaatttactcatctgtaaaatcgagatgattaaaaatcatacttgtgggtgggtcttgatctatgttcctcagatagctaagaataaaggtgcttttagagattttgccaaggttcgaatacaattttattartattttcctagtttcatgccagacgtcatcactgaggatcaccgtgcatgcggctgtgtttacatcttaacccttgaggccactggcaggctcaccgtgctgcgagctcaccatgtcgtaaccatctcgggctcaccatrccgcgggctcaccaagtcgtaactctgtctygggctcaccatgccgygggctcaccaagtcgtaactctgtctcgggctcaccgtgccgtgagctcactgtgtcataaccgtctcgggctcaccatgctgcgggctcaccgtgccgcgggctcactgtgccataactgtctcgggctgaccatgctgtgggctcactatgtcgtaaccctgtcttgggctcaccgtgccacaggctcaccatgttgtaaccgtctcaggctgaccgtgctgcgggctcatcgtgtcgtaaccatctcaggctcactgtgccgtgagctcaccatgtcgtaaccgtcttgggctcaccatgttgcgggctcaccaagtcgtaaccctgtctcagggtcaccatgccatgtgctcgctgtgtcatacctgtgtctcgggctcactgtgctgcaggctaactgtgctgtgggctcactgtgtcataactgtgttggggcagtcatcagcccggaagcctcggtgtgaccccatgcccatgtgtgaacagtgtgtctgggcgttatgggttaggagaccgtctgtgttcgggctcacttaacaaagtaccatagtcggggatctgaacagacgtccgtttctcacagctgtggagctgaggagtgcaggatggcagtgccgggtctgaggagggctctcttcctggtttgcagatgaccagcccctgtcctcacagggcagagggagaggactcgagctttgtgctgcttacaacttgcgcatcccattgggagcactccgccctcaggaccgaatgccctctcaggggcccccgtttggtcaccatcacattggggatctgggttttcacaggtgaacttgggacgacacaggcattctgtgcactgcccaaaacgtgctggttttgccctgggcccgggcgtggctgtggaggcgtcttcataccctgtggatccacactccaggcaccactcagccttgtgactggggcgggaacagccgcctcataccatcccaagggtcggatcaggtcccgggagcacacaactgcttcgccttagaccccagcaccacctgtcctggcctctctcagagcctgtctcccgcggtggccacgccgtgggctcctgtgctccagagccccatggtttctggggagagtccagtgatgcctgtttgtgcgatgcctgcccttgccttggcgggtgctcacagtgggctgggacttgggagaaggtagacaaagagtgtgtgggaggaatgggtcgtgcgtggaagagctggctcagcagtgtcttgaggaaggtcgttaaaatgtctcctgccactttgggatacattgtgtcctttcgttgttccttgaaagtcggtattcttaggccgggagtttctgatgaagatcacattaaagtggccggcagtggctggtcacagcgcagatggatgctcagaagctcagagcttgttctttgagtagaggctggctcagagagccattgattgataaacatgccyggcttctccttgaggaactaagaacttcattctgaactcccagaggctcacrgaaatgccagtgacctcagagttcagtccaagcatggaactagaggcttaattttttgagttttctcttctgtacctcagaagaaaggccgggattgaacagagagaacatccccaacaggggagagcccgccgtcgctggtgccgctgtggctcagcgtgctgggtcccggtgccctgcagggcctgaggggtgggaggcagaggccatcttgccggagcgcctctacctgcacgcckgggtgggcagcaccacttgttggcggtgtctgaaacgctagatggggggcctttaggctgcactctggggccgtccactttgtgccggcccttcctgcacctccagggcttggctcctaattgccacttcctcgggtcytcaggacagggctgcctctgctggaccttcccctcctctcgagacgccggcacctcatggacacatgccagcctgctccttgccttcctgcccctctggctcagcccgctctccacgtcccgtgcagaggccgttcctggtttgctcgtcctcttgtgaccttgcccattgctcccggttggcccaacctcgggcccactgggctgaccacgaatgagcacgccagctgcccattggaagcgtccccggctctgacaccgcctgtctctgacaccacaggctgtcccgccacccctccccgagggcccccccagcctccggtttcccctccagtgtcaggaggcacctgcttgctggtttgctgatggcctgtcttctgcccattgtggttactgagttgttgcctcgcagctccacactcccttctctgagccctactttgcggtgccagggctgcagcccacacctgcgcttcgccagggagtgcctgtcctgggggcgctggagagggcccggggtcagcctgcaggcaagtggggcagctctttagccgctggccttgccccctcccagcagcctgccagcctgcagattccgtagcgcctagaggtgccagctccatgggctgctgccctgttctcagaggcctgggtccaggccctccagggtccccatgcagacaccagcatggcctccctcagcagcctcagttcctgttccatggggcccatctctgagtgtctacattttaatgatgtcagcctctgccccgtgttcccacagcccaagggctgggagctgcttcctgaagtcactgcgtccttggcgcctgagggtcttccttctgctctcggtgacctcagtacctgcacccgccgtgagattctctgctcatgccacacgcgtggcttctttgcttgagattcccaccccagtagaatggaggcccagcgagcccaggctggctgcggtgttccgtgctgccatctctgctgcctggaacggcatgtggccgtcctcacccacatcccgtgtgctgaacagactgggtagactcgcctgccagtcaggtgtgagtggcaaacatcccggacatggttcttggcgagcattccacagtgtcgtctccttgtcacgtcttggtgttggatttttacagtctagttctgttgttcagaagatttcagtgtcagccatcaggccttggggatgtggccctgatgacgcgggcccgagtgcttgcacctggacggtcctggagtgggtgtctctctgctgcccacgccgtccctcagccgggaatgtgtgttgctctggttcacttctcccrtctccgttcatgatgtggatttcacygccaggaaggagaggtttgcttcacaacctggcggatgagcttttccagcctgkgctcagccccacgcccctatgcctctgtctaccctctggggtgctgcrgaacacacgcttcacgctacatcctgcagccactgcatttcctcagaccgggtctgtaaggaagcccaggttcagctgctcgatgcttgacagccagacacgagaggcgagagtggcggaggaagagcaggcgtattcggggagccagcggatcggggagatggtgacctacagtcacaaagaccatctgaagtcagtacagatcccaggctctagttatgctaagggtaggggcaagaggagggggttgggtccaagaggtgaytgacgatcgtagagatctgggtgccagcaagggtccgaggggtcgggaactgctctgtccttggccaggccacagcactcctgcagatctttaacaaagcctagttagctgtttccacacttcccctttgatcccagagtgagtttttgcattattactctttgctatttttgcattattatctcagtactctaaaagctaggagtaggtaaagaccctttaagcagtggcggagggatatgctagttctgctgagccactgttacaggccgagggccgggcttggggcgcctcggtgcctgccgtcctgcctcaccgaggcggcytaggctgcagagagtgggatgtgggcctgagggaagcagctcaggccacatccagttcctgggacccagtcttggcccctggctctattgcactgagccctggtcctcaagtgccgggagcctgggctctgaagcaagacagccactgtcctgtgggtgtgcgttactcacatctgctctgcgtggyrgggggactccagccccacatgtgcccccacacagatgtgagygcaccctcactcaggatgcagggtgtgggtttgctgggcccccttcaaggctgcccagccatcctgtgctgagctgagggtgcttcccagcgcagccccttacccttctctctggccagatgcctgtgctgtgcctgtcacctgaaagacagcacctgtcacattcttgcctttgcacattctggctttgaagcagagtacagggaatggtggcgttcttctagttaaatgaccacacggagccgtgatttaaagcacttgtgaacgttcccacctgaattcagtgattcaagagtagattttacagcccttgagtattaaattggcccatsagtagtttaaaattgaactgggtcccaaagtagcctcataatatgtgtttcccatgagctttgtgcctgctttttattttgtcttgcgtttttggttatggagcgcctggagggggcaggggggccgctggccagtgctgcacctggggccagtgtcagtgtagggctttccgaggcggctgatgggataggaaagactcagaacggtttcctctgctctcacgtcgcagcagtcaacacagaagactctgaccagatgtggggtgtttccccacccaccaagcaagcagttggttctgcctgggacaccagccgttcagctcagtctcactcagttctgttctgacactgtctacctggaggtgctgtcagaccctgggtgagggctcagtccccaccttctggtgctggtcgcgagccgcaggtgtgcttctgaccggccagctgtaaactggggttcctaccacccagttgggattccccttgggtttgataaatttgctggagtgtctcacagaactcaaggaaacgtatgttyaccagtttattatgaagcttactgcgaaggatgcagatgaatggatgcgcagggcragatgtgggggaagggtgcagagcttgcgtgccctccccaccctccrggaacagtgggagctctcccagttcccgtgagaagcctttgggttttgatggaggccgccaccctccgggaagagtggaagctctcctagctctggtggaaaacctttgggttttgatggaggccaccaccctccaggaacagtgaaagcgctccctgctccggtgagaaacctttgggttttgatggaggccttgtcaggcggacataattgactccgcccctgctcattggtgaaccactcagccttcagcccctctccttccccagcttaggggtggggctgaagtcccgagcctctagtccggcctcgatcttcctggtgtcccgccccatcctgcagctgcccrggggctgcagccaccgtcagtcattggcacatggaaggcctcagtcgggaaagcccgagggttttaggagctgtgttctggtagatgggttgacgatcagttacatatttcacaagatcacacgcggctgaaatgagacgcccgcgtcctggacgccagtacattggccccagtctgtgggcttgtgtggcttctgctggggccggctgagggtggccaggttggggttcccgccatgcttggctgggtcaggaccgccaccaagtcccttctgacgttctgtgagtgttggattcacattcactttcaacttatcctttatttcaagacttctactaagttacagttaaaaaccccgtattcacttcactcaaacatgagtccagtggagaccaccgcccaagaaagtgccatccccccagccccgggatgaagctttcccttccccaaaccaccgcccaagaaagcaccatccaccagccctgggatgaagctttcccttccccaaaccacctcccaagaaagcgccatccaccagccctgggatgaagctttcccttccccaaaccactgcccaagaaagcaccatccaccagccccaggatgaagctttcccttccccaaaccactgcccaagaaagcgccatctgtcagtccagggatgaaacttttcctcaagtcatgcaactaaggccgagcagaagcaatcaatggctgggaaggtgtgaacgtgagggtggaggtcatggccccatcccacattcctgtttccaagcagcctcctggctctccctgatggttgcctcacagggctgtggtccctgttagcttttctctrtcccagtgctgtgttttatttccttgagatttagttaagatttcctttggaaagaagtttgtggtactcaatasagtcgtgtgcagctcccgtgttccagcgccgttccrctctgcgcctgcctgggctgtctgagtagggatgggccctccctccgcggactcgcaccctccccggtgtggcctctcttctttcctggctgtgtcctttcctgggagagctctcgtacctcactgtggagtcctgactctcctcctctcgggcggcctctcatctctcctggctgtgtcccttcctgggagcacctgtgtcccccggctgtcccatgtggggaaggtggagtcctgactcaccctctccctgggacagcctctcctctctgcgcctcactgtgcccttcctgggagcccctcccrtgaggaggtggagtcctggggttcccggaatcacagaaagccgttgcatcatgggtgggttctgcagtcagggtcagtggacgctgtcatttgtccggtcccaagtcagctcctgaaggacagagagagaggggcaagatccaaacccctgaggcccgctactgccaggccacgaactcggaagctcaccaagagtggttgggagccaccaaaggcttaaaaatcgcatgacccagcccctctctgctgtctgaggagacagcttggtgcccagtggcagaggggtctagtgagagccgttgggaggctattgtggtaacgtaggtgacaggcaacgagcacagggactgaggcagtggctgtggggaccatgcagggaaaagggaggtttcaaaagcagaattgaaaggaaccatcagccacccgaaggggcggacagggagaggcctcttgggcagcctggagttggccctgcctctggcgtcggcccacaggaggcctctcgggttcccagtgcttagcgccaggctgggctttcaacctcacagaatgtttttagaacaggccccccaaccaggcgcctggcgcttgcttccccgcaccacgctgcacatctgcggtgattcagaggggaagcgctggctctgcaatctcgctcattcagaagtcccgtctcctgaagggctgcgtcgccgacaatttttcccattgtgtgtggagttgagctcccttccccctccctgccgtgttctgggatcaccctgggagtctatttgaaatccagaaactcctgaaaggcmttaagtagctattcagcagtgcggaaatggcagtgagggggttgcacgtgcagctctattttaggatgtcctggtgggctcgttcctggggtggggcggggcttggtggggtggtcaccccaggcttcattgctttgccctcttgtctctcccatgcagcgcccgggggctggagaagrccaggcagcagctgcaggaggagctccggcaggtcagcggccagctgttggaggagaggaagaagcgcgagacccacgaggcgctggcccggaggctccagaaacgggtcctgctgctcaccaaggtgatgtatgcccttacatcttgatcagagtcgcagggagctgcgggtcagtgcacacctggttagctggatctcactgtggaggcaggagtgctgcagccgggtcagggttggcactttggccctgggttgccaggagggttctgggaatgccagagagtgctcagccccggtgctccctgtgggactctctgggcctgctgcgtgccccacccttttcagttcctccagcatctcagtgtccacccctggcctggtgctgagctctggagagggttccctgtcactgcggaccccctgcaggctcccacgtgccttgcagtcagcaccctcatgctttcccatccagtgatgccatttacactgtgtgggtcttggcctgggcttgggatgaaggctgtcacctgcttccaggtgtgccccacctgtgggtggctccatggcccgactctaagcctcagtgcctgcgggggttctgatgcctggcaccgtgagcagaggtcgctggagcatgaaagacggtttttgtgagttctgtttaaaatgttccttgggcactgaaatttcagaagacaaggcgggaaagaagtcaatctgtccccagatgctctctgggccagggcgggtgtccagtttgctgggcggagactccccctgcctgcctccagctagtgctgagtgggcggagggctgtgccaccctggcccaggatgcatgctgcacctgtcaagtactgggagttgtgcctcatggatgtttacctgttcttgatcgtttttgatgaaaaccaagcctctttgctgctgggacctcttggttgtggagcttttagaaaatgagtaacatttccgttccaaagatgctgttttacagcttctccagctcgctctgggcggctccatgctgtctcctaaaggaaaagttcacatgggcctaggtccctcgggcactgactgtgtgggcacccggaacacaggctgagctggcccctgcgcatagctcagatgctgaccccaaagccctggctttgcaggtgcaccccagacaggggacactccaaaatgttctcacatggcttttcagccggagctgtctgctgcctctggcagaggggacacccagccctgctgcatggtcaggcacggtacgtttctgtggagcaagctctcgaccttcctctgtgttcccttctcttccacaccgtgtctgctagtgtgtgagcttctaagcaagatgcgtgaggtgcacgtggcgtggatgtgtgggcacagcccttggaggattcgctcttctagcggggccaggcagtggcaccagaccagcacctgccacgcacctcaacagaggtggacgccgtggtggtgccgcagaagggcttttctcaggaggtggcattcctgtggggacccaagaatttcccctttgcgaaagtgtgtgtggagaaccacggcggagggagagaaggcaggtcatcacaaagcgctgctgcagtcacctcgaggcctggagcgggaggagacagcggcttgggcccacaggccacagcacgcgggctgaccactgcggkggttcgggctgaccactgcgggggtttgggctgaccactgcgggggttcaggcaagtgcagcccgaccctgccgccgaggagaggcccgggaagcagagggggcgacactgtgttctttcagagtggcgggacaccttagctcggtgatctttgggtgcgtgatgacgtgctgtggtcccgtgatgctggaagctcagagcttcctgggggaggaagagtgggagggctgggctgggagctgggcctttctctgggatctcagatgtccctcattctctctgggtctcagttctcctttctgctaaactttgggctcaggcctgatgaccccgrgtgcctgcgaacgtggcctgatgaccccgggtgcctgcgaacgtggcctgatgaccccgggtgcctgcgaacrtggcctgatgaccccgggtgcctgcgaacgtggcctgatgaccccgggtgcctgcgaacgtgctgtgttcgggtggcacccccttgagtgcaccttgttgttgggcccagtccccgattctgggtcggggctggggagtgacatcggcccacaccggccaggcgggcagcactttgggttggtcctccatgcgtggcctgggtcttggcctgggctacaagtgtggcccccacaggagggcagcccygcccggcctcagctgaggctcatcccttgggaacctcctggtttcttaagtgaggccagcggttggaagctgatgggcagagttcccttgacaggtcacgtgtgggcctgagtgttcttgtgtgctgggtctggcctgcagcctgtgacccacgcgacactggtgctgctgcccacaccctcttagtgccagggctcccggccgtgatgaggagttacatgcagtcactggatgtctggtgtggttttcatccctgtggggctccctcatggtctagtggagccccgcagccttctgggaagtctgtgcccggcttccttcctgccgttgctctttgatggccaccccggcccgctcagggcaggaagtttctgttcttctctgctctgctttgcaggtggagagcctctggcactttctggcccgcgccagcctcaccccgaccctgctgtgctcgcgggcctgctctgtgttagcaagaaggtgggtattgatcgccgggcatggactggttgtttatcctgacgaaggattgatcccagtcgcccgtgtagccccaggccagggatgcaggatccgtccagccagccgtgatgaagctgttcactcagccatctggagggagcggcgtgcctgctgctctgggtctgtgtgccttggtgtcggccagtgcccacctcagctctgcatggcagcccgcccagctggggtggtcgaggagcgccttctctcaaggcgcacccaggagggctgcgagcctccggctggtgggggctctgggcctctgcttcccattggaggctctccttgtgtgcttgacattttagtacacggtgcttggagtgtgyggttttatttcgagacctttattaaacggctctagtctaaggatttaattgttactgatagctaagagtataattaccttggtaaaatatcatgactattttaagcagttgaaaattggcttctggaactgggtgaacacaaaccattttcctgtttgaaatgagccgtttctccagtgccccaagcttccgcagtatggctgcagagtcttgtttctggaatatcagtgatacaagctaacttttagcaagaaacttttcaaatgacagaaaagcctccgcttcccaccccttgttgtctgcactccaccctcccgccctgtctcacagcagatcagttactggaggccccaggcttggggggagcagttgacgctgggtgtccagcggcgtcggactcacgtcgtggctgctgagcacagactgtggttgtcatggtgacaccctgccctgggaacccgcacactgggaaagacagatttgtgtcttctggagttgttgagggtctgagtttcgagctctgggctggggtgttgggtctgggctggctgaatgagcacgttcctcggccacctcctccgaagctggggttggtgacgacacacattcccctctcccacgtcctcgctgcctggggcatcagatctgcccactgccataaagttccttttgtcaatcaaaaaaccgtccacaaacattcctgatgatccacggtctcaaaaccaacgtggctgggcctgctgtgggattgggagcggatgagctttaacaggagggctgggaccctggacacggctgccaccctcagygatgggagagtgtggagagctggtgtctgtattcgctgggtgcagtttaggccagatccatccaggagacagctgaaggcagatggagactgggcccaagaaggcgggggctgctgctgtttaagaaacagttaaatagggggcagaatgcaggaagtacaaggggggacccctcagaagagttccatgttcttcctgcctcacatccagaagagagtcctagaagaagcctctgtcctcccttgagaatctgctgtcctcctgaaagaagcctctgctctcccatgagcagccgctgtcctcctatgatcagccactgtcctcctggaagaagccaccatcctcccgggagaagcctctgtcctcccttgacaacctgctgtcctcctggaagaagcctctgtcctcccatgagcagccaccgtcctccctggagaagccgccatcctttgggagaagacactgtcctcctaggagaagccgctgtcctgggagaagccgctgtcctgggagaagcctccgtcctgggagaagccgccatattcctaggagaagctgccatcctcatcctcccaggagaatctggtatcctctgggagaagccgctgtcctcctgggagaagctgccatattcctgggagaagccactgtcctcctaggagaagcctctgtcctcccaggagaagcctctgtcctcctgggagaagctgccacattcccgggagaagccactgtcctcctaggagaatcctctgtcctccggggagaagcctctgtcctcttcggagaagctgctctcttcctgctatgttcctggcccagaggcagctcttgtgagcctgagccatcccagcctcttacaggggccagagccgcttcctgaggcctcctctccatgctatggtgccttcccgagggaatctggggcaggggagccaggcttagctcagggacccctgcgcgttctcagttgactctgccagggcctcctctcttcttgggggtcgtttctgtgcccaggatgctgtgctggagtctcccatgccctttctggtggagggcccgcctggatattggtgttgattgttttgaagacatgttgctcttcgtgtcctgtgtattcactcggctgcctgaggctgggctcctgtgtgctccctcgccagggggttgctgggctgcatccccagcctccttggattcagtgtctcggcagggttagccgcgaggccaggcccagaacaggacatgcgtgttccttgctgaagctcagtgtcatctgtggagccggcctgctacgggagaggctccaggcccccttctggtccatcctaggaaggcagtgcagtcctcgctgggattctcccaggcctggggtttgaggaggcccctccatttccttctgactgtgtctcttctcctctgcaggattgtgtgtgctgagggcagagcgagggaggctggctgccccgagggagctgaggccacaggtgctcagggtcagagtggcccgtggatcatgaaggagtgtgttctggtggccgcaccctggccatgacaaaggcgggtgtggtgcccacgggaagagggcagggcctcgctggcaccgtgcccaggctgcgcagcgatttagaaatgggcccacgttgctggagtgtttttatttttgaacaggttattttcatctctcctggaatagcacggtggagacacacctgatgcatgtttttgctcccataggacgtgtgggtggaagggacatggagcagaggcaagcgctgttgtttattttgtgttcatacagcttgggcagcttccactttggagaccaccccaacaaggttaatgtagctcatgcctgtcccagccacagacaaggccgctgttcctccagctgagtgccacttcaagtcactggcttgcctttatttcaaagccctgatctyccctgatggtgtctgtttaagtcctgggatccggcacagcctggagtgaggacgcggagccagggactcccaggggcccaggactctgcccactcttggatcagagagcaagattttggcgcagtgaggtcccacccaccccacgtccagtctttcttttcactgttctcgtgaaacacattgcgtgtgcaaagatcatatagaacatatacatacagctcaaagaatacagcaagttcccgtgtctcagtcccagtgtaagaaacagaacagcctccgctgtcagacggagccgtgctctaaacgtagagcagtcccttccctcatttttctttctagtttaattgtgtgtatatctttaaacattgctccgcttttcccatttttatgttttctgtacatagagccacgcttctgtggcttctctttgtttttatcttagcgttatccttttgaccttcgtccctgggaatgcagcgtgttcctttttgctgctgttgtgatgctgtgtgcagggagtgggtcacggtttagtgacctgacgtgtgaggtgttccagttttgccttcctgcggtgggtgctgcacagtgggtgtggctcagccccacctcgggaggcttgttctcagtagtctccgtgttgaagtttagtgtgcacaaattacagacccaggacagactctagaagagcaggtagttagcaaccccagcaagaccctcgtgcctggttccagccgctccctcagctccagggcaagcgcctcctgacttcacttccctgttttttttttgtttgagacagagtctctctttgttgcccaggctggagtgcagtcgcgtgatctcggctcactgcagcctccgcctcccaggttcaagcaattctgttgcctcagcctctcgagtagctgggattataggtgtgcgtcaccacaccgggctaatttttgtatttttagtaaagacagggtttcaccatgttggccaggttggtctcgaactcctgacctcgtgatccccctacttcggcctcccaatcccaaagtgctgggattacaggcgtgagccactgtgtccggccttcaattccctgtttttttttttttttttttgtcgttgctgttttttgaaatggagtctcgctctgtcacccaggctggagtgcagtggcgcgatctcagctcactgcaacctccgtctcttgggttcaagccattctctcgcctcagcctcccgaggagctgggatttcaggtgcctgtcactatacccagctaatttttttgtatttttgtagagacggggtttcaccatgttggccaggctggtcctgaactcctgacctcaggtgatctgcctgcctcggcctcccaaagtgctgggattacaggcgtgagccactgcgcctggcccacttccctgtttttaagcgtcacatattggaatcacatacctgtactctttagtccctggcttccattacacgttatctttgtgagagtcatgtgtgttgtgtatagctgagatttgttgatttttcttaattactctgttaagttttccattgtataaaaataccactttttaaaatrcacttggctgtacccgacatcggatggtttccagcatgggggtgttgactcttgctgacgtggacgttttaacacgtgtatgacgtttggtgatcccctgggtgcccttgcgctgggcatgcccaggtgtggcatagggtcagttcccggggctgccacccccgccagagttactgtgccaggtggcactcctgttggggtgtggatggtgctggtccctccgggtcctcacctcctgcctttggttttctccctggtgggggcctgtactcgaaagctgttgttcttactttcctgaggcttggtgaagctgagctgctttttacatgctcactggccggttagacaccgactcctgggggcacctggacaggctttctgttcctacccctttgggcttttatttttattttattttattttaattttattattattttttgagacggagtctcactctgttgcccaggctggagtgcaatggctcaatcttggctcactgccacctccgcctcccgggttcaagcaattctcctgcctcagcctcatgagtagctgggactacaggcacgcgccagcacgcccagctaagttttgtatttttagtagagatggggtctcaccatgttggttaggctggtctcgaactcctgacctcgtgatctgcctgcctcagccttccaaagtgttgagattacaggcgtgagccactgtatccgtcctgggcctttaaatgattgtttgccttgttcttactgagttgtagttctttactctggatgtgaaagtcttttgttgaaacgtatttagttatcttctcgtagcctgtggtttgctttttcactctcggaatttctctgttgatgttcatgcagccagctcaccgacgtttgctgatgctggtgcttttgagtcatgattaaacagtctttgcctgccaaagttgtgaagatactcagtggttttcttctaaacactttattgtttaccttttatatgttgctgcttttgttctgtgaaacatgctgttgatctggcagcctctattgcaaggccgccttctccccacgcgtggcgctgccatggccgtggcccggggacccctcgtggccgtccacttcagggctttctggtgtgttccatgggctctttttttatttgtttacgattccatgctgtcgtcgttgcctcctccttccagtgtttccctgtgtccaggtgaagcacagcattagcttatcttggcattagcgtatctcgacattagcgttatctcggtctcggcattatctcgatattggcatatctcgacatcagcgttatctcggcatcggcgttatctcagcatcggcgtatctcagcatcagtgtatctcagcatcagcgtatcttgacatctcggcatcggtgtatcttggcatcagcatatctcgacatcttggcattggcgtatctcagcatcggcgtatctcgggatcggcgtatctcgggatcggcgtatctcggcatcggcgtatctcggcatcggcgtatctcggcatcggcgtatctcggcatcggcgtaacttggcatctgcgtatcttggcatcggtgtatctcggcatcggcgtatctcggcttcggcgtatcttggcatctgcgtatctcgacatctcggcatcttggcttcggcgtatctcggcatcagcgtatcttggcatcagcgtatcttgatacctcggcatcggtgtatctcggcatcggcgtatcttgtgaaccatgaatgccacatgttccaccatttaccttgatggcctttaatttctctcagcaagtttgatggattttagggtagattcttacatgtcattagactttctgccctgcgtatttgaacattcgacgcagttttcatgttgtcttcttggactttgatcttctatgtatgtgttcctggcctgtggatgtaccattgggtcctgcacattgaccctgcacatgacaaccttgctctgatgctggtgtttgacgtgcacactcatactctctgagagatgctggccatgcttccccaccaaccccatgcctctcttctcccctggctacgcttccctgccagccccacacctctcctgtcccctggccatgctccctctccagccccgcgcctctcctctcccctggccacgcttccccaccagccccgtgcctctcctctcccctcccctggccatgcttccccgccagccccttgcctctcctctcccctggccatgctccctttccagccccgcacctttcctctcctctggccacaatccctctccagccccacgcctcttctctcctctggccacgctgcctctccaaccccgtgcctctcctctggccacattccctctccagccctgcttctctcttctggccacactccctctccagccccatgcctctcctctcctctggccacactcccactccagccctgcttctctcttctggccacactccctctccagccctgcttctctcctggccacactccctctccagccctgcttctctcctggccacactccctctccagccctgcttctctcctctggccacactccctctccagccccacgcctctcttctcctctggccacactccctctccagccctgcttctctcgtctggccacactccctctccagccctgcttctctcctggccacactccctctccagccctgcttctctcctctggccacactccctctccagccctgcttctctcctctggccacactccctctccagccctgcgcctctcccctggccacactcccactctagccccgcgcctctcctctcctctggccacactccctctccagccctgcgcctctcccctggccacactcccactctagccccgcgcctctcctctcctctggccacactccctctccagccctgcttctctcctctggccacactcccactccagccccgcgcctctcctcttctctggccacactccctctccagccctgcttctctcctctagccacactccctctccagccctgcgcctctcctctcccctggccacactccctctccagcctcaagcctctcctctcctctggccacactccctctccagccctgcgcctctcccctggccacactcccactctagccccgcgcctctcctctcctctggccacactccctctccagccctgcttctctcctctagccacactccctctccagccccgcgcctctcctctcctctggccacactccctctccagccccgcgcctctcctctcctctggccacactccctctccagccccgcgcctctcctctcctctcctctggccacactccctctccagccccgcgcctctcctctcctctggccacactccctctccggccctgcttctctccatgcccctttcctccaggtgcagtgtcatggaggaatgatgacagtaggcaccttgtctccttcaggctgtgacgggcgctttggtaatccatcagtaagcgtggtgtgtgctagatgttctgtgtgatactctttactgaattaatgaaatcctctccaacttgtgcttttctaagagtctttgtcacgaaggcctaccccataaattttgatgcgggttgtttttgttactgttgagttcaaaacattttctgatattctctgtggatttagaaagtctggccttccagcaggatttaacgcatacaaagcatataatacaggtggactggccagctgaaaagggattgagaaggagaaacccagactcagttcactcactcgatcattaatgtttcattccccaacttcttctttttgggggggcggtggggggaatggagtcttgttctgatgtccaggctggagtgcagtggtgcaatcttggctcactgcaacctctgcctcccgggttcaagcagttctcccctcagcctctgagtagctgggactacaggtgcacaccaccatgcccggtgaattctttgtatttttagtagggatggattttgccacgttggccaggaacttctcacgtcaagtgatctgcccaccttggcttcccgacgtgctgggattacaggcatgaggcaccgcgctcggtcattccccagattcttactgtgcgtctcctgtgagcctggcacatttaggtgctgtggaaaacagcagggagctgcacagcagactcggagctcaagggcccctctctaggtggggctggggcaggtgtcagtcgcgttgaggcggtgatggctgctgtgaagaaagggaggcgctttagggctcgtgtgtcagggagggtgtgggaagccggtgaacaggcgcccttgctgagcccagaaggtcactgcggggagagctgtgtccatctgccgtgctagaccgtggtggggcttggtttgtggtaatgatagctgcacgggtacttgggaaggttgtggggcgaggtgccacgtctccccggcttccccgtggcaatgccgtaggtggtcgtggtgcagtgggaagaccaggggctttggcgttagcacagcctgtgttcctctccgcgatcggccgcttgtgtaggtttctgtggccccacaacagtccccctgggctgcctcttggagccacaccaactccttgtcctggttctagtgttgagtaggacttgtccttcacccctctgtgataatgggcgctgggtgggagcccgtgggagctctgtggtgggccttggttcgaggtgagcaccgccctcgctcacgtgggtatctcctgggtcgctttgcagatgggtcgtggagccagtcttgtacttccttccacgtctttcctggatagccattctgtggtttcttcctctgccccagtgggagcctaaatctggctgtgtgctcctccctcccctgagggtgtgagatctagccctctttccctagagcagagcagagcagagcagagcagagggcctccatccctcccacagaagagcctgcgcgagccccatgctgcttctgatcgccgtctcttctgctccacacccctctttaggtctgaggcttcatgatcggcacgatttctcttgctctttcttttttaatactgaaaatttttggtcttaggtagcactgaagggagtatttataacacccagtacctgctgtgtcatctggaaagcatcatcctctgtgaccctccaggggtttgtgtcagacagtcatcatgttccctgtggcgcccgctgaggcgtcggggggtcagctctgtggccccgttttagcccagcaagtcgaggcttaagagtggcatagagactgcccaggccatgcggccagccttgatgctagatttgtgttttttatttatttatttatttatttttgagatggagtcttgccctgtcactcaggctggagtgcagtggcatgatctcagctcactgcaacctctgcctcctgggttcaagcgattctccagcctcagcctcccgagtagctgggattacaggcgcctgccaccatgtccagctaatttatgtatttgtagtagagacggggttttgccatattggtcaggctggtctcgaactcctgacctcaagtgatccacccacctcagcctcccaaagtgctgggattacagctgtgagccactgtgcctggtcctagattttttttttttttttttttttgagacagggtctctctgtgtcacccaggctggagtacagtagtgtggtctcggctcactgcagcctcgacatcgcaggctccggtgattctcctgcctcagcctcccgagtagctgggacttcaggtgccaccaccgtgcccatctaattcttttgtgtttttgtagagatcgtggaaatctgagtgtgacttggtagctctggggtgcagcctgcggtccccatgtctcaccggttccctggtggcgctcctgtgctgctccgggccagttctgtcaggggtggcagaggcctggatcgtgccctacgatgcgggccacaggggccgggtcacacagctgatgtggatgctgctgactggccctaggcctggctcacccccagctccctctgaagaccactgcctacctgctgtcctcactgtctgcctccgagaggacacacgtcctggcgtgtgctcattcactccctgctttctgtcagggtttgtggcgtgcctctgcctggtgctgtcgtggcacgcaccgcctcgctgtgctgcctgcctagtgcctggagggaggcttggccccgcttcctctgtctctgctgcccccgccctttgtgacaagctctgcactgtgtacgtgaacacaggacagatggagttcgggccctgccgtcgtccctgagtcccggccccaccgctcggctcctcctgctactgtgacccatgcaacccatcttgtctcctgggctttagcctctggggatgtccaaggagcagccctgagtaccgcatgtgttccccgctctcccatcactgcgagggcacggcccagccgagcgcagctcaagttcagcttcagaccttgctttgttcatacttaaagcacatccctccacgtacacctggatcggtgcaaagcctgcaggaggggccctgagacgctggccagcccggcttccagggtcgtgtttgctctgctcagtgagagggcctcttccctccacagataagcagggttctctcggctttggaatttaatttccaggtgttaatatatcgccctttcccattacctttctagactgacatttctattacatccattcaggaaagaatgtccactttgttatgggacaaagccatttgcacagttattagaaagccaaccttgtcacagacactgctgcactctccctccgagagggagctggacctggctgtggcagaaaaaaattccagggagaaaagcaattttaggaaatacggtgaaatcaaaacaatgcattttacccgtctccagtgtgaagatgatgaaggttgggttgtgggagcgtggaccgcctccaccagcccgagccctccacgtgcgcccgaccgccgtctctgcctcaggtgcgtggagtttggaggctgcgttacactggattcaggtcacccatctttactcttggctctttgaaaagaccacagtcctgtccccacccgcccatgggtgggactttctggacagttccaggtgaggctgtggaactcctggccctttcagggagatttgaggagatggccacagcactgtgttgggggaggtgggctgggagcagcagtgctcgtgggctctggccctggtgggagtgccctgtctgcgggcacccgggtgcagccctgacccctcccgccctgcctccctctgcagaagggtgctggtggcaggtgtgtcatcagaaaccccgatgasggcatttctggatggtgctgctgagataaggctgtctcctcgggtctccgtgttgagggtggctagaatcgggtgcccctggagcactgtggaagccaggtctactttcttttttgaggagtcatggcctgcgtccacttaatggtggcaaatcacacttggagagctcggtcacaggagcctactgaaacctgcagcccagaatgcagggcctgggtcacaggctccctggcttcacccaggggctgtccctggccctgtaccctgttggcctggggcacccccataacccgtgtccccaggccctggctggaacgtgctgtgcggggaagatgggccccacctctgcagcctcctctgcttccccgttgctttcctgccgcccgccagggccttggggccttcacacagcttctctmcttcccggaacccagatcatccccggcgtccggctcatagcattgaggcaggcccttttctcccttgttcaccggcggctggcacagttccttgcatacagcaggctctgagtaaatgcctggtgaatattggactccttcacctacaggaggtgctgargcctttggagtggccagggagcagctctcctgcctctgcctcacctgccctgtgctctgcccccgcccggaggactcttggtcccagcctcaccgtctgcatgggcctccgcggccyccaaactcaccggttttcaggaagggcctgctaccaggtagcagatcccgaggcttctgcttctgatgcctgagctaatgtcagcaatgtggaagagggtgttacttgctttcaactttcccaacaaccaaagtcgcaagacgtgtagctgtcagtggcagagcaggagggtaggcagtggctgggagcaggtgccagggcagggacggctcggccttcagatgcaggcactggaggcggcacccacccgttccctcctcaggctggtggaggagcctccgctgtcccgggacttggggcagctctcccttctggatttcctcctcccacatgtcctgctggggacacrtggcttcctatctccccatggccccggaggtccagcgcctccctcccccatgctccaggctggggccccagctccctcccggttcctctgtctgttccgggcagcagtctgtggcgcyagggccatgcccatgccagctgccgtagctgtgtcccagctgtttgctccaggtttattttgatggtgtacccctttataaaaactgtggaatttgcacactgatacgtgcatatttgtttaaaaaggataggtatgacctgcggccaataatgaacacacccatttatttgtaagatataaggacttataaacgtaagtagggtttccactgtatacctaggccccagggagctgtcaggtgccctccctgggcaccgtgcccgggccccagtgagtgtccagccccctccctgcctgctgtgcctgggccctagtgagctgtccggcgccctccctgcctgctgtgcctgggccctagtgagctgtccggcgccctccwgggtgctgttgcttgctgtctgttgggcattctgtctgtgtggtcttcctgaggctgttaccaactgtggtggcggcaggcctggggctcctactacgccgctgcctgtgctctgttgctcacatgaaggggccagggaagcctgttggcatatggagtcatgccatggctggctgtggcggrgctgtggctgtgcgcgtggcgaggacgatagggttctgcccttgtccgtggtcaccctgctcctgctctcgcttctctgaggccagcccctcctctctgatgtgtgcggagcgtgggtcttggcctgccgggggctccttcgtggaatgcagggggtgcacaggtgttgactctgcatgaatggttgtctttccgcctggctgtttccctgcctgacgcccctgtaaacatccattcccaacacgcttcccagaggacgcttgcccttggagtactcctaacaaaagacttcccagtgaaatcagtttctggcaccccatgtggtatagcctgacacggcacctgctgctcagcttgtccatggctctgaggagccctcaggggccccaggcagctggtgggggatggggttggggggtggacagcaaggtgacctggcgggcgcagggcagctggtgggggtggtggggggtggaaagcaaggtgacccagtaggcacagcgcagctggtggggggttgggggaggtaggggacagcgaggtgacccggcaggcgcagggcagctggtgggggggtgggggaggtgggggacagcaaggtgacccggcggatgcagggaaggcccagtcttcatgtgcggtttcaatgtctcgttcctgggcttttctgcattaagtgtgagtttctaacataccacgttgaaacgtcttggatcttgcctgctgagccacgtggctcttcctgaaggacaaggtyagcgcccccctcgccaccacttcatccagatcccaggagccccttctgtcctgtaggccaaggctccacagcaccacgtgggttatggacgagaaacctggagtgtcctgctaggagagaggctgtggaattcccagtccccctcagctttggaggtttataccagagagaccgaggcttagagaggagcccagggaggctcctccagtgcccaggccaggcatcatccagctggcacaggtggcttyagcccagcctcggggggacacaagcagggcctgcagggtgtctgggaagggctggagggaccaggcccggaaccttgtcctgcctacccaggctttggcctgacattgtccttgtttgtgctttaaaatcccctatcctgtttggtagagaaacatgctctctttaaactcagtttcgaagaaatccaaatctttgaataaccttgatcttgaaaggaaaggaagttagctgcaggtgaaaattgatggtcatgctcaaaggcatggttccctgccaaggaagcctcttgagtctttctactaaaaatagctgcagcatcctggtggtggtgtctgaaccctctctaggcccctcctggagacattcagagatgttaaaggtgacagccagcctcacctggccgttccgcacaggtgtgtttgctcctggcctgtgaggcacaggtgggtgggcctgctgasgactgagccgccctcgggggtactgggctgctccctccgcagcctctgccccttcagttgtccttggtgtcacggcacacccaagagccttgtaagttccctgcaccacagtctgggtgggtgcctgggtccctgtgtccatggtcctgggagaggtccctggcctcagtcagaaggtgtgaagtgtctggactttctccaggccggtgataggccactgttggcttgtggtctccatggttctgtgggtgcttcaacggagctgccagaaaggtcaagccacagcctgacaccagccagagtggaggcggcccaggaaccccctggctcaccaccctcagcctggtgcttccgtctgcccgtgtgggtgtggacatgggtctgaggcactggctaggggattccctgcttccagcaggcgcgtgaggttccatcctggtctctggtttctggtctggcctcatacctggcttagctctcgtaggagtgcaacaggtggaaggggcggtgatgcccgcagatgctgggtgaggtgccccgtgaacgtgtggtctggtgcccgcagacgctgggtgaggtgccccgtgaacgtgtggtctggtgcccgcagacgctgggtgaggtgccccrtgaacgtgtggtctggtgcccgcagacgctgggtgaggtgccccgtgaacgtgtggtctggtgcccgcagacgctgggtgaggtgccccgtgaacgtgtggtctggtgtccgcagacgctgggtgaggtgccctgtgaacgtgtggtctggtgcccgcagacgttgggtgaggttccttgtgaacgtgtggtctggtgtccgcagatgttgggtgaggtgccctgtgaacgtgtggtctggtgcctgcagacgttgggtgaggtgccctgtgaacgtgtggtctggtgcccgcagatggtgccagcagatgttggatgaggtgccctgtgaacctgtggtctggtgcctgcagacattggatgaggtgccctgggaattacagtgctcgatagtcctcctggacactggtgctgatgaagcgagtctggccacccacgccaggcagtgcccagtgccccttgggtggctcctgccctccagcaagacatggggatgctgctggacccaggtgtctgtgaggtccaggcacagatcttgcttctgcaggaggcccctgggcggactaggtgagtccttcctcctaccgcctctttgaaaatctgtgtgtgtttaaactaaatttcttgagtgccatcagaaggcccgtgagctggtgagctgcccccgagccttttgccacccatggtgggcatgagccacctactgagtcggctccgagtcagcagaggccatggagtgggggcccccactgtgcagggagagggtctgaccctgggcggggcaccgggaagggaggtggaggcctgaggccagccctgctggaattcctctcttctagggggaggaagcctaggagctggaatcagaaaacctgttagaacctgagctctgtcactctctcacttgtgcctggcgccagctccctttccctctctttgcctttgcttcctctctggaagaatgaagcatgcacgcctcaccccatctgcacggggagccgattcacagattacatgagggaatgctttgaaaatatttttaaattgtaatgttcaaatatatgtgtgaggtagttcatcatcaactcactcaacaaacatatggttagttctattctaaggtgatgtgtgttcctaaaagtcaccctgctacacaaaatcacattaaaaataagatgggaccctgatgaaaatggcagcatggttgacgcggtcagtggctggacacaggcaagtgtgacaatcggcacagctcttcgcctcgagaaggcctggcgctggcttggggaagtgggagtggtggcttgtgagtcactgtggagtggggagagcacctgaagctggaggggtgtggcacagggggctcagccaggctcgggaggctcccatcacagctccgttcagctgagtgcggttttctgcattcgtcttggaggaggttcttcacagaggggcggagggggactttttggccatcactcaacatcctatgggacagccccttcctggctgacccacctgcctgccctgtgccaggccttatgcagtgtggttgatgcttattaccattcatcaaatttatttcctgacaaatcctatgttaaatacctggcatgggacctgcagtgagtgggcattcgatgtatagcggtcactgctggcattcgtcagagtaacttctcatttcattaacatccctctaatcatctcacttaaaactcacttggagaattctgagctcagatttggaaatcccgtgtttgtgcaacaggaatttgtcgttggatgagatgaaggaacttgcctgggtgaacaggcaggattcgcagcccaggtagctgctcattctccgagtccctctacacctaccccgctgcccgactagggtgctggagcatggtgtctgagagcacgcgtgtgcgtcagtgtgcacatgcgtgcacccgggtgttcatgaacacacccgtgtcggtgctcagtgtgcatgcatgcacacatgagcattactgtgtgcgtgtctgtgctgcatgagctctgtgtaggagacgtgtgtgcatatctgtgttgagtgctgtgtatgtgtgtgtccatacgtgtgtacttgtgtgcgcatgtatgttgtgctgtgtgagttctgtgtgcacatgtgatcatgtgagtgtgcacgtgtgctttgtgagctgtgcatgcacatctgtgtgaactgtgcattgagcatgagtgtgcatgtatctgtactggtgagctgtgtgcacgtgagtgcacgtgtgtgattgtgcatgtgtctgtggagtcagctctctgcatatgtgagtgcacgtgtgtgagtgtgcatgtgtctgcagaggcagctctctgtatgcatgtgagtgtgcatgtctgtgctgtgtgagctctgtgtgtgcatgtgtctgagcatgcacatgtgtgagtgctgtgtgcgcacatgtgtgtgcatctgtgcttaccattctggaacactggttcttttatgcattttggcttcttttcccacgagaccctcatggaacattaagcccagcagacaaggccagccccaaccattgtgatagttattaaacagcaataaagcaggatctgtatttacagacccagagtgtgctcagactgggaggtattaaacatcatccatcatcaaatggaaaacagtcagatgcagggagtgtagaatggagttaatattcttttggttaacttcacccataaagagctaaactgcccccaataaaacaccaaggggaggaagggaggttcttccagacggaagcaatcatcggcacggtctgcagacaggcccccagggtttcctcgtgccggtgggttttctgcagcttgttacgcagctgcggctcagagcaagcggtgtctcagggtccctttccacagttctcattgcctgctttgccttaggtcagctcatcagcagccctggggagctggggtgaacggaggaaagacaytgacttgtagaacctgagaatctgggaagggagggccttagccgaagactgtttgcccaggagggtggcacgcagtaaacagttcaacccaggagttcaacccrggagctggcattggggcatggatgtgcgcgctggtggccattcattactgatcctccagtttcctttgtcgtctgtgagtgggtgcgctcagcccagggggtgttgtgtgcgcagcgtgtggtgcagaggtagcacctgggacagggggccgggcactgtgcgtgtgggcacagggagcgctgctcctcctccttagacctgaggctcctgtctgggcaaggtctagccctccacctaggagcttacggaatcttcagtggggacagatggtctggaaaggactcacctcttttcccacccttggttgaatgtggccccttgggcacaggcgggcagcgctcacccctttcctacactaagacgtcctcacggcttagtgtagggcaggcgggtgaggcggggtttgtgtcgcttctgatctggaaggggtttagcagctgaggagatgatcgccacgcagagttccgtctccagaaaaataagaggatttgcacagttcttgaacttcacccttccaaagttttcacctcttgtagactagaagttttaagtgagcttctgtgtgtcgaaatcatttcatgggcagtgccccagccggagcctgtctggaggggagggttgggtgggcacgggcgccgggcctgggaggaggaggacaacatgggtttcctagctcgctggacggccctgaggttgtgggggcctttggtggctgaaaggggtcttgtatttctgtgcacattgaaaggcgatcttatttgcctgcgctgccgtccagctgaggacagggacatagggtgcctgtgagtgcaggcctggaaagggatgggactcccctctgtagggagggcggggcttcagtccacctggggcgtggggcctgcgccaccacccgcatcccaggagaggcactgattgcagggctcggcctggggcttacatgggaccctccttgactccctagaggcagccgaggtggccactgcagcactcagctggtcttccccaggaagtccttcccttacagggcctccactgccgcctctgtcatgggcaggccctcagggagcagggctgtggcggcctgtggtgcaggggacgtgtgccatgtctcctaaagatgatggctcagctccatggggggccctcggcagaacgtttggatttaaggactacttggggctcaccatgtgctccgaggcttagggaaggcctgggacgggccctgaagtgctgtctggctgaggctgggctcctcaggtgagaaattggctcccatgtcccgctcccctcccccaccccactctccttccttcaaggaatcctgttagacttttcactttgctccacggcctccaaatcccactaagcgactgtcgcttttccagggcatcgtcaggtgctgtactaagctttaataaagggctttatccacagcttcagaaaagtctctaaataaattagatccactggttagcctccaacggtgatttttattaacctccagttaaagaaatattgctggttacagaagcacaatttatttctgtgtaagccaggctggtgtgaccctgcgggctcccgagagggatagtgctatgtacacgcagagtgctgggctggccatgagaggcacctgagagggcacccggcagcctgagggctgggagtcactctcacagggacacagagactctcacagggacatgggggactctcatagggacgtggggtatctcacggggacacagggatacgaggactctcacagggatacgggggctctcacagggatacaggggactcttacagggattcacagccactgagacacgggctggtgctcctggcctggagcagagaggggtgtggaggccgggtgggaggccggagcctttcatgtcctttctggcccctggtggcagcagctcccttgctgaatggcttcaccctgggaggtgatcagaggccggggcttgccgtcagggcgccctggctcagatcgtgcctctgcggccgtgtggcttgggcgtgtggcccctgtcagagcctctgcttcctctgtgaagtgcggagaatggttgctgctgctcatcagagtggggaggtgacaggcctggcccggggctcgggttttgttcatgctgttgcctcccctgggctcccctgtctacaccactggcacaggagctgagagggtgtccacgccccgggggactacgccatactgatggcctccatttcttggggtctgtctcactgagctgggactccagttccagttcttgtcatcctcactgaatctcacaaagctgagcgggaaacacgtgggctgtgctgagtcgccctcgctgtacaggaagagaaaccgaggctggagcagtggagaggcttgtgtggtcgatcgcctggggacttcatgtgtactcaggacccagacctcccggccgcacccccgtgctggttctgtgccctgctgaaccatttgggaaattgtgttatcatctcacacatgctgcgggctcctctgggattcactgctgctgtttctaaagcactgttcccagtgtgttcacagcgtccccaccttcttccacgtgcgccgggcagcttctctttggcctctcacacctgaggtgctttgtggcaggagcgtcctctcaggagcctgggtgcgtgagttcaaatcctggtcccaggtgctggctgtgtggaacccagccgaagtcattcgtctgtgtctcagtttcgttgctggagagagcggagattgtcccagcgtgtcctcacagtgttgttggcggactgaacaagttgggaggaatgagcaagagtgacccttggatcaggacctgtagtagctgcctctgtcctgtgagcattcgctatgatttttattccagaccgttggctgctccccttcctgcggcgcattgtggccgccagctctaggcagctcgtcctcccatgctgctgtctcccctcctctctccatcaggcctttgctgtggttgctggagcattgctgccgccgtccattgcgtgtgctctcttgacgggacgggcacccatctgtgcttgagtcacgtccgagcccgcggccgccacccacaccctgttcctgcacggtgaggtctgccacgttccaggggcaggctttgcccggccctccctggccctgttcagtagccctgggcccagcttatgtctatgttgggcagtgcggggtgttgggaggagagaatgggcagaggcccctgcctcagggctccctggggcctggcaggaggcctggggtggtgctgcccccacyctcgagaaaaaggctggcactccgcagggctgtttgtggtgggaaacaggcgctcagccagtctggatccccagcccccccaggccctccgcgtgcctccactctgcagggcacccgtagcctccagagaacagtcatgacccagcgtccttgtaggcacggtacccgggcatcacgttcccaagcccgcccattccggccacctccagcccacaggatgtgccaggtcgtgccgagggcctcctaaggagcgtgggattgtcagaacagattgcagcatggatttttggaggattaaagttaattaaagagctcttccttgctttcacgtccttgtgtctgccagctatttacatgctaatgctgccctgacaccgaggatgaggggtgtctgccgcactgcactgcgctgtcaggaggggaaccacaggagaaggaggggagcgcagtgctatgtattaccctgtgcccctccgatgggacaggggcgtggatgcagacacattcgaaagtcagyggcagggtcgttttcttgtatttcctgaagtgtcttcgtggctgacttggatgttctccattcaggcccccccttacactgcataattgaatgcattctgcgtggaaatatcttcgcataagcaattttataaataaagagattgtggagagtagggtctgaagtttctaagtgcagggctgtgttttccagaagcccatccttcttggcgaaggtgactttcagcttcacggggtyggcctgtggcagcgtcctctggccctcagcagcactgccttgatgtggacgtggacgtggatgtggacgtggacgtggacatgtgtgtgcgtgaaggctcctcaggtgtattagtccgttcttgtgtctctataaaggaatccctgaggctgggtcattctgcggactgtacaggaagcacagcgccggcatctgcttctgctgaggcaccaggaagcttctgatcatggcagaaggcaaggagcaggcacgtcacatggcaagagcaggagcaagagagacacttgaggttccagaatctttccaacaacactcctcactcgggatggctctgggccattcgtgagggatccgccctcataatccaacacctcccaccaggccccacctccacctttgggaaacatttttcaacctgagatttggagggagcagacatccaaaccatatcgccaagtatttgttgaatgaataaatgaacgttgataccatcattgggtgtattttagctgcagattctaaacgccagggttctggggtggctggagtgtgaaaaggtcggtggtggcagttaggaatgccgtgtgcatgcccttgtgcctgtgtgcccatgtgtgtgtctgtgcgtgtgtccgtgtgcctgtgtgtctgtgcacatctgcgtgtgtctgtgtccatgtgcgygtgtgtgtgcatgtgcgtatgtgtgtctgtgtacgtgtgcrcatgcgcttgtgtgtgcacgtctgtgtgcgtgtctgtgtccatgtgcgtgtgtgtgtgcatgtgtatgtgtgtacatatgtgtgtgcatgtctgcatgtccgtgtgcatgtgtgtctgcgtgtgtgtgtgcacatgtgcgtgtgtggatgtgtgtgtacatatgtgtgtacgtgcatctgtgtgtctgtgtgcatgtccgtgtgcgtgtgtgtgtctaagtctttcttggatggtcccttgctgctttcccagggagctagttctctctggccttggctgggtaggatgcaggctctgctcgcctctctggaacagagcaggaggtgctgcggggagctgggtgcagcgtggccaggccaaagcaggcacctgagtgagttttgtgttcagtatccctcccccctgtgggctgccatggtgagagttgacatttttgcagcgtggaagtgagactgtcttgtggagttttctactcctctcgggcaaagagagggttagtgacctgacacctgatggtatgccttcaaagctcttcctcatctggtttcattcaactcatgtcaagcgtcagtcgtgacccatgtcaaaggtatatgcagctggatgtaagttaaagtggagaaaacagattttattcagtcgctgctgacagcaggggacagagctgagctcctttcaggtttgtgcagatgtgactgggcattttaaagggagtgtggggaacaggtgcccaaatggagtcagggaagtgaaaaattacagaaagcagcaagagggttggktagcatgaatgtgatgagctgactctgctacgagctggcaggttggggctggcagggatgggctcctgctccccttccccagccccagactaggagacaggcctgttttcctgatgattacgttccaaagggttggctctcggtccttgagaaggacatcccagagctgtaggaggtgcgggcatgtgtgtctccaagggactgaggaaggattcacagttgtcagctcggattttctgaagtaactgtgctaggaaggggaggcagggcaggggcctgttgtcaggtgtggtagaaccaagggcaaatcctcctgacagccttgagctttttccgacaggaactctgggggtgctgtagctcaggcttcaggaagtcctgctgtggtgggcggtgtctcagtgcagggggtaggatggagcccttgtgtgctgagagctcttctgtggttctcagcagccaacagtgagagacacacgtgattgtgaagccaggcttctcagggcagcccctatgacggcacacatcacgtagaaggtttaaatcagcattggctgaatgagcgattccaaagagcagccaacacctctgtttgcaggaagatggagttgacgcattttctttgatccttctgttaagtataatgaagagtcctggacattatctatggaatgagcatagtgagcctctgcgggatggaggccaggggccttgggcctcggaacagcctggcggggagctgcccaggtttcctcgtctgcctctttcatcccagacttggagctaaggaagcacatccccaaaatgccgacgctccccagcaaaggactaggtaaatagcagctgggaagacagaaaatgtagttaatgcctagcaataatggaaagaaaaacttaatggatataaggtcagcagcagaatggaggcgacaggagcgcgttcgtgaactcagagatggaccgataggaactgccyatctgcccattctgaacagcagagagaatacgatggaataaaatgagcaaagttcccgacaccgatgagacctgggaatacgatggaataaaaggaacaaagtccccggtgccggtggggccacaacacaagatccagcattccagttgtggggatctgggagggtccggaggagctgagatggagccgcagaggcagcaggcagcgtcttcaaaactaatccagtgtctttgctgttctgtgggtctactcaggttgtctgtgtttctcttgagtcagttttggtagcttttgtcttttcaggartttgttcatttcacctccgttattaattttcggcatgcagctgttcgtagtattcctttacagbctttatctctggaaggtcagctagtgtctctttcactcccaactgcagtgatctgcaccctctttcttgtttccttggttggcccagctaaaagtttctgtcaattctgttgctattctcacagaaccaactttaggcttgaccgatttcttttattgtttttgtgttctttatttcacttatttttgctctaatatttattatttcgttccttctgcttgggtcaactgaagttggactccatcaagattaaaatttttgccccgtgaaagttcctgtgaagagatgaaaagacaaggtagagataaagaggaamtatttgcaagcttcatatctgacaaagacgatttgttatctgtaatagatgagaaaactctcaaaactcagtaatagaaaaacaaaacagacacacctaattagcaaacaagcaaaagatatagacagacctttttaccaaataacatatacagatgacagttaagcccgtggaaagatgttcaacatcattagtcatgagggaaatgcaagttaaaaccacagtgaggtgtcactgcacacctgtcaaagttcagaaacggamaccatcagatgccagtcagtgtgtagagaaactccatctctggtgccttgctgatgggagagtgacagggtgcagccaccctggaaccagctcgagggtttcttaaaaactgcactgcagctcccatatgaccagcagtcgcattcctgggtgtcgattccagtgaaataaaaccgaggttcggacaaaacccgacagaggactcttcctagcagcttttgcataatggccaaaaactggaaagaattctgatgtccttcggtggtgatggttaaacaacggtagtgcctccgtcacacagagtaatactcaggactaagaaggaattcactgtggataaacatacttgaatagatctccagggagtttagcggagcgaagagcccagtccctgaaggtcgtgtgctgcatgatcccatttgcatgacgttattaaaaggctgaagtgatagacagcctgtggatggctgccgtgagttacggagacgcacaggaggaatcgtggctgtgaacggacaacccgaggggtttttgtggtgatgaaatgtgctgtatcttgactgtatcattgtcggcatacgggttgtgatactgtgctgtagttgtgccagatgttgctattgggaggaactggatgaatgctacttgtgatctctgtattattttttatagctccaagtgaatctgtaattggatcaaaataaaaagcttagatcaggcacagtagctgatgcatggaatcccagcactttgagaggtcgaggtgggcggatcacttgaggtcagcaggagttcgagaccatcctggccagcatggtgaaaccctgtctctactaaaaatacaaaaaattagtgaggcgtggtggcacacacttgtaatcccggctacttgggaggctgaggcaggagaattgcttgaacccagaaggcggaggttgcagtgagccaagattgtgccaccgtgctccagcctgggtgacagaatgagtgagactgtgtctcaaaaaaaaaaaaaaaaaaaaaaaaaaagkcatcagcttcattatctcctaacagcatcagcttgtcctctgaaactttgaaggcagggatcgacttctcctctgtaactgtaaaagccctagacggcatcttccagcagaaggctgttttatgtgcactgcaaatctggtgtttagtgtggccaccttcattggtgctcttagctggatcttctggagaacttgctgcagcttctccgtcagcacttgcggcttcaccttgtacttttatgtgatggggactgcctcttaatgtaaacctcatgaacccacctctgctagcttcagacttgaattctgcagctttcccacctctctcagcctcgtggaacttgctctgacttaagggaatgttggggctggtttgatctatccagaccactcagacttctccgtatcagcaataagacagtttcactttcttatcgttggtgtgttcagtggagcagcacttttaatttcctccaagaactttccctttgcattcacaacttggcgagctgtttggcacgagaggcctggctttcggcttatctttgcttttggcacgccttcctcactaagcttaatcctttctagcttttggtttaaaggagagacatgcgactcttcctttctcttgaatgcttagaggctgttgtagggttattaattggcctgattttaatactgttgtgtcgcccagggaatagagaggcccaaggagagggagggagggagatggctggtcagtgaagcagccagacacaagcagcgttggtcggtgaagcttttgccgtctgaggagcatagtgtgtggcgtcccagaatcaatgacagcagtaagatcggagaccgccgatcacagaccacaacagacataacagtgatgcaatgtcggaagtacagtcaggacgtggcgccccagaatcaatgacagtagtaagatcagagaccacccattacagaccacaacagatataatagtgatacaatgtctgaaacgccatgaggattaccagatgtgacagagccgtgtagggagcacatgctgttgggaacatggtgcctcgccgaaggcaggacggccacaagccttccatttgtaagaagcacagtatctgtgtagtccaggagagcaaggcgtgcctgggtccatgctggctccttattgtggccagcacactgtgctcgtgtaagatgttaacagtggggcacctgggtgtggaatatgtgaaaagtctctaccatcttctccattcttctaaatctaaacccgttctaaaaaaaaaaaaaaaaaagaagagtctattaagaagacaaagaaggagccgaaatttccacgtggcagaaggcactggaaccggtgagatctgatgtgtacctgggcctgatccacgtttgctgcatggctggacaccttcgtgggcgcgtggaagctcatgctgtggggggagctgtgggaggagcatgcggcaggtggaggtcttctgcgcgtgggtgggcacgcggaagctygtgctgtggggggagctgtgggaggagtgctggaggagccctgggaggagtgttcaggaggcggagcgtgcctcgtgcgcgttggtgggtatgagtggcgttggtgggatctagctgaccacctcccacctggttggtctgcatctgtagacagcttagttcttaggattctaggtacccagtgtcatttccgacacctgcttgggctccctgtactgccagggctgttgagtctttacagcacctctgatcaggagccctggccttggggaggtgggacaggcacacgtctgggttgctgggttgcctttaggggtaagctcttccttttgtcttctgttcaaaagagggcccacagtggattcaggcctctgatttaccactgcctggagcttggggaatgctctccagtgacaacctgggcttccgtgggatttaattttgatatattggcctttgtgtgtaggaagagtccaaactcacgaccggatggattgtcctcctcagactagacacttcatccagagaggactctgagccaaccctaagggattcaggctggagctctggttccccgcacggaggtggcgcaggaatgcatcgtcctcccctgtcctgacttgtcagcgctcctgcgctcatgcctgggagcctggaccccagctctgtcccgacttgtcagtgctcccgcgctcatgcctgggagcctggaccccagctctgtcccgacttgtcagtgctcccgcgctcatgcctgggagcctggaccccagctctgtcccgacttgtcagtgctcccgcgctcatgcctgggagcctggaccccagctctgtccccacttgtcagtgctcccgcgctcatgcctgggagcctggaccccagctctgtcccgacttgtcagtgctcccgcgctcatgcctgggagcctggaccccagctctgtcccgacttgtcagtgctcccgcgctcatgcctgggagcctggaccccagctctgtcccgacttgtcagtgctcccgcgctcatgcctgggagcctggaccccagctctgtcccgacttgtcagtgctcccgcgctcatgcctgggagcctggaccccagctctgtcccgacttgtcagtgctcccgcgctcatgcctgggagcctggaccccagctctgtcccgacttgtcagtgctcccgcgctcatgcctgggagcctggaccccagctctgtcccgacttgtcagtgctcccgcgctcatgcctgggagcctggaccccagctctgtcccgacttgtcagtgctcccgcgctcatgcctgggagcctggaccccagctctgtcccsacttgtcagtgctcccgcgctcatgcctgggagcctggaccccagctctgtcccgacttgtcagtgctcccgcgctcatgcctgggagcctggaccccagctctgtcccgacttgtcagtgctcccgcgctcatgcctgggagcctggaccccagctctgtcccgacttgtcagtgctccygcgctcatgcctgggagcctggaccccagctctgtcccgacttgtcagtgctccygcgctcatgcctgggagcctggaccccagctctgtcccgacttgtcagtgctccygcgctcatgcctgggagcctggaccccagctctgtcccgacttgtcagtgctcctgcgctcatgcctgggagcctggaccccagctctgtcccgacttgtcagcgctcccgcgctcatgcctgggagcctggactccggtttacatttctcagcgtgtccttgggctgtgtgtggtctgcgtgtccctggggttgtctgtggggtcatgtggcccctctgggctgcctggtttccttttctcccacatcgtgtctggcatttctttattcagaaatgaggcatctgttgttggcttccctgtggagtttgtgtccctccctgagctcccgcctctgtggggccagccccagtgtggacttgtggccccctgtgctgctgggcctcaggtttgggtctgcggagtacatgggtgtgagtgctctgaccactggactcttaaaacatgcagccctctttgactgtgacactggacatgtgcaaagcttggggactgatcaaaaagtataaagaggccattgaaaaagaccttgactcctgcacccagaggtagcaccaagaacatggcatgcatttcatctccacgtctcccttctctcctttcctcccctgttcattcattcagccaatctatcagccaaccagtaagcactcacggacacccacgtgcgcaggtgccatggaggcagccgagtgtggggactgctgtggcaragctggcagccttgtgtgcttcctgcacttgtgacattttattgcagccagtgcctgtgccattaagcattccttgaaaataaaatcttttttggctgtacgatgtttcttcgtgtagacataccaaaagtaaactcttggccggctgcggtggctcatgcctgtaatcctagcactttgggaggctgagacgggtggattgcctgagctcaggagttcggaccagcctgggcaacacggtgaaaccccgtctctactaaaatacaaaaaattagctgggcgtggtggtgtgtgcctgtagtcccacctactcaggaggctgaggcaggagaatcgcttgaacccgggagacaaaggttgctgtgagcctagatcacaccattgcactccagcctgggcgacagcgagactccgtctccaaaaaaaaaaaaaaggagactctttattggaaatttagctttgtttttaattttttcatgattattgctaatgtgtgcaacatccttggactcagtgctttccccatatctgattcatttgttatttatttatttgtttagacacagggtcttgctctgtcgcccaggctgcaatgtggtggcgccatcttggctcactgcagtcttgaactccagggctcaatatatcctcctgcctgagcctccccagtagctgggactataggtgcatgccgccccgcctggctaattaaaaaaaaattttttttgtagagatggggtctcactatgttgcccaggctggtctcaggtgattctcctgcctcggcctctcacagtgctgggattgcaggtgtgagccaccgcagtctgattactttttaggcaattgttactgagtggaagggtgtgaacaccttcaggacccttggccagttttgctgactcgttttccagaagcgcccgtgactgctgtcccagcaggtgtagcgtgcagccctcatggcctcactcgtgctgagtgttagcattttacttcttgccactccaggtgaggaacgggtcttaatgaattttgtgtttgtcagttacgtttcttctgttgattgttgatttttcccagttttctattaccgtgttagtgattttcctattgatttgtaaaaggttttcatgtatttgtggcacgttttccccagtttgtcttttaccttttgtgtttttaagtggcgttttgggacccacggaggtgttggtgtggcgaagcgtgctggtctttctctgtcattccttccactgcttcggggcccacagcctttcagggccttgctccatggagtatccatcttgtttcctttagttctagtgcagtgaagcaggcgagggcaggggtgaccgggtcatctgggctggttcaaactggggctccgcacccaggtgttctgtgcccccggggtgcgttactcacacctgcagcacccgggctgtctctgtgagaatgggatgatcgaagggcccacctcctggccagcacagggcctggcacgtggtgcctggctggcgagtgtatgagtggggtgctgggctgggagcgtgagctctcggagttctgcgtctgtttatcatggccagtcagtggcagcgtcagctgggtgtcctcagcccacgctgctgtaccccaagaaggcagtagacacgtgataccagtgggctgggggcrtcttctcagctggtgccctctccacgtccttctgcgggggckccttgcccccctgccccatgcacactctccctgtgtgcagagtgggtcttccttcctggtgtggggctccctgagtgccctgcctgtcctcgcctgttcttacagtgctcacgtctgcctccctctccaggctgagttctgggagagcaggccggcgccacccccctcaccacttgctaggagctggcctgaccctggtgggagcccacagccctgggcgcgaattcaaaatgccagaagcagcacagggtccctcgagcctggtgggaggtacttcccatgggcgagtcatcttgttttgaattctcctcatgctgatttctggccccactcagcccagcacagctctgaaggagacgaaggcaaggccagctctccccagctgagatgagctttcagttgaggaaggaccctgatgtcagagctgtttgggtaatggcctgcccctggccatggatgtgcaccaaatcttttcaggactcrtggggtcactgctgcccgggggctttaggtagctattagagcccagggctgggcaagcgctttcccacctgcccgttagcatgatggccaagagcccaggctcggcttcacggaggctggagacctggggcgcgcgccttcccctggagccttgtcctcatctgaaagggaggactccagcctgcctcaggaggtggttccgaggactgattggctgatggtttcactcgttcattttttaattgaacacacagttcctgagcacctgttctgttccaggcactggacagggactggggccgggcgtcccgcatgaatgaggggtcagggagctgatgcatggaaactccttggcacaaggcccrgagtgtgccyggcaccctgggcactggctgcctgcctgttacccgtcggtggagaaagccacctagactttgcagcactgtaagatttttgaactgtagaagaccaagtccatctaattccctgttttgctgataggaacgctggaggcctagagaggaaaggaacccgtctgactgctcaggctgagtagtggccccagagccrtgactccactgtgctgtctgtttcccacgttgccctgctctcctttctccctgtcctgtcaaataaactgcactcaaaatagagccatgcggcacagggcctgtctcaggcccatggccccatatccgcgtgggtcaggcatgctggckrgaccttgcgagggtcacgtcctcctccctggtgaggggccgtctgcagccactgtggcttgggtatggcttcctgtcaggatggtcccagtgccctcccagatgtgcrcggcacccacgtcgtcatagcgcaggtgtgagcagctgctgtaacaaggctggtgctggttcaggtggatgctggggaatgcatttatacagcgaacacaaatgaagtggaatttgtcatagagcagtgtgaaatgtaagtaaaattgcctcgggaaatcataattgattccactccttcctacaataggtgttgtagagctttttatcagaggttgaaattgtaaaaaccaggcttgctggtggggagcccagaacagccccttttccccctcccccacagctacacgtgggtggtggaggccagtggggagggtgtgacggcaggaagccagaggaggagctggctgagggtaaccccaagacagctgtggggcagggaagggagcgtgctctgtgtgcctggtgcagctgcaggcagaggggtgagtagtgggagaggaccccgtgcctcctctctgagcggcctggtgttcagcctcctgctgccttcaggagagctcgcgtaggtgcagttcatggagaatgcacagctggctgctggagggaggatgctgctgaaggctggggaccgttttttctcctgggggctcctccgaatccagtcgcccagcagaaatagagctttgtcaacagtaaaccgggtttattggtcagataagataaccttgtaatgagacttgtggaacttgaggcaaaaatgaggaagaacagagaggatggaatgggaacaagggagagacatggtatcatcaagctctgagcaaggttggccgagagcaccaggcgcaggttgggggctgaggaggacagaaacgcgtctgacagcagggcgcctcccacggggccccggaaaccctcgctgacccacagtattgcccttcaaaacctggtcattggtgcccattacagagaaccctttcatcgggaaaagagaccgtttctcctcattctcagtttcctctgccggggcggcgtctggtttgttttggaggcattttcgtcaagcgcagatgggcaggttccactcctgcggggtccggccacctgtcactggcgccctggcttacccaggggcctctgcacatcaaggctgttcaggggcccgcgtgtaacaggctctaattagcgtaagcaagtgaattagccttatctgttcatgaaagaagtgaagcaagaaatgcatttggtgacactttgtcagtgctttgttcgagctgctatacggaaattattaatagtagaattgcattctgttacaatcgccctctaattcagtcaccatccattgaactggactttttacccagttagcaaggtaatgagtttggatgactctgaaaactttgtgacctccaccccgggcgtcactrtgggctgggggaacctcctcaggctgtgtgtggaccttccgyggagcgcggggcggggcgtagcggacrtgcacctgtacacagckctgggttccgcgtttctggggcrctctctgccagccaggggtgccctgcagaaatgaggctaggattacacggggagcagcttgggccaaagactcgatttccatctgctccctgaatgtggtgagcccggtgtccacaggactgtgtaggaggggacagccagcatctgccctttccagagacctttctcctggcactcgtgtctgggcgctrgggatgatcttgtttctgttccttggatttttacttctcttcagctccatctgaagcttttcccctctctcatttcattgtaatcataactcgcacatcaacctcaaattaccctctatcaatcactctcttgcctagaaacttgctgggctcctcctcttctgctgccctgggtgtgtcatgcagagtgccctgcgcctgccaccaactcccaccgcccttgctctcccactgccagaaagttaggcctccaggcctctggagtccgagttgggctcacggttccatctgagtgtgtttgccctgagctgtttgtaaatgggacttacaaccacagccaagctcttcaaattatggagttccgtttaaaaaaaaaaattactgccttttaatctttttattagagcataacagacatacagaaagtgctttgtcctgagagtacatcttagagggctatgatgaaatcagtccatccatgtctcagctccacggtcgggaacacggtgtcaccagggctcccaagttcacctgccggctcctccacctcccccaaagccctgccttcccgattctcacacgccagttctgcccatttaaaaatgttgtgaaatggagccatgcagcgtgtaatctttcgtgtttggtttctgttgctgtgttatttcatttctatcttatgggtatatcacgtcataatttttaaaattttctgtgaatgggcgtttgaatttctttatttcttggctactgtgactaacactacagaatgggagattatatcatcttttgttaggtatttgtatttcaaatgtctcctctcattctgtagcagcttttcacactctaaacagaaattcttaatttgaatgaaatctaatttatcaatctttacctccctttgtggttgtgatttgtgtgtgtcctgtttaagaaagcttcgccaccctccaggttgttccagggtttcactcctgtcttcttggtggctttgcttcttcacactgaccgtggcactgcgcagccttgttgccctgcgcagccttgttgcactgtgtgaagccttattttttttttcatttttcttgtcaacgtgggtatccagtggactcagcactccttactgcaaagctgctccttccgcctgtgccacagtgctggttacaccttcacgtgaggtggctctgtctgtattggctgtttctggaatctgtattgtttcgttggtgtgttcatctctttttggcaaaaccacaagtttcaattcctgagaatgttagagtctcgttacctgatagggtggccctctctgcttgtctgcatcagggctgccctggctctacctggccatccgcctcttcacgtagattttacagctcaacctgtcagtctcaccagtggacttgctagagtttttattgagaatgcattgattaaatgacatctgcacaatattgaatcttctaatccatggacgtactatatgctaacatgtgtttaggtcatacttttttttttttttttttttgagatggagtcttgctctgtcgcccaggctggagtgcaatggcatgatctcggctcactgcaagctctgcctcctgggttcgcgccattctcttgcctcagcctcccgagtagctgggactacaggcgcccaccaccacgcccggctaattttttgtatttttagtggagacggggtttcgccgtgttagccaggatggtctcgatctcctgacctcgtaatccgcctgcctcggcctcccaaagtgctgggattacaggcgtgagtcaccgcgcccggccttaggtcatacttattttctctcgaaattgtttcataatgttttctgggtggacatatcatgggttttgttgttttgaataataatgtttgtgctttgaataataatgtagaaatctaattggactttgattattaactttggtcctgcagcattgctaaatctacttattttaataatttatttktagattatattgacttttctatgttcataattgagtgatttaataatagctttcattgtcttcttgatcttcgtacctttcatgcctcttcttatctgtggcttagcatagccagtgctgctttggacagacatgctgatagctggtgtttgttttgcatcatcagaagaaaagctttcaacatttcactgttaaagatcgtgctgacgactttagtaaggaaatccttttcagattaaagttctccctattcctcatttgccaagagggttttgcttttgttttgtttcatagtttttatcgtgaatagatgttgaattttaatcaaatgccttttctgcaaatattgagatgatcatttgattttcttctatattttgttaatgcgcattaaattaattgattttcaaatgttaaaccaaacttacattccaggaataaatgagcatggcctatgggttatgctctgtgtgtaatgctttatttggtttgccagtacgttaattagggattttgcatctgcatttattggggagaaaggtcattacttttcatttctcagaatgtcgttttcaggttgtgatgttatggcttttctggccttagaaaatattagcaagttgtcttctgttgttttctgtaatcgttttataaggttggtgatatttcttctttaaccgcttggtggagtgtaccagtgaaagcatctgggcctaggggtttcttgtttacaagattttaaatttgggcttgatttattttaatagctttgaaacatcagattttctttttttttctttattcagttgtggtaaaagttagtttttaacttttaaaacttcattttatcaaaactttaaaattcatttgtgtaaagttgtttattgtcatgtttttaatatttttgtgatctctagttatgtctttttcaatattgttatttgcttattctttgtaatctgtctcatcaagagtttatcaattttattagtcatttggaggaaccatcttttggctttattgattttttcccatatgtattttatttcattaatttgttactttctttgagtctaatttgatgttattctaacttttgagttgtatatgtagataattgatatttatcctttcttgtgttacagtatatgcatttaaggttgtcaatttagttgcataccgtacgttttgatgtgttgtattttccttatcattgggctcaagtcatttatcaatttccattgtgatttttattttgaccaatgggctattcagaaacaaatttctcaaattcccaacatctggtgattttcaggtatcttcttattgatttctagcattatctccctgtgctcagagactatcctctgaatgaccccagtcccataaaacttaccaagaaatgctctatggccccatcggaagtcagttttgtaaatggcccatacacacttgaaaatagtatgtattctgcaattgttgagtgcagtgttttgtaaatagctacatatcatttgttaatcttattcttcacatttctttaatgatgttttttctcagctcctgcaagagttgtgttgaaatttcccattatgattgtgagttttgtctatttcttcttttaattttgtcaattattgcagtatgtctttggatgctgttttattaggcacatataaattgtgaattatcttcctggtgaattttgccttttgttattatgagacattctttatctctgcggattgttttgatttttaaatcycctttctgggatattaatacgggtatgtcagcttccagtgtttaatagcattggcaccttttactttttcacttttcattttgagcattgttaaattgtttcattataaatgtagtatactataaatatataagtatttatattcagcgtaaaaatcatttcttagtcgaaatatttaatctaattgtaactgatgtaattaatgatacatttgcattgaaattaaccatcttaatagttgcctttagtttttattcgttttttatgaaaacatcttaatcgtagaataaatttttttatgatcgttatcttgttatgtgtgcttttatgtaattttagtggctatgttggtgattataagatagactattattatatacttaacaaagtctaataaaattaatacttcttttccttctagacaatccaagggtcttaaaatcctttcttctgtttacattttgctccattcgtaggctattgctataaagtactttattcatacacttacgtgtttgaaaagatactgtttttgtatattcatttatatgtacacatttctaaccctttttattcccctgtgttgcaacctgtatctctgagcatccatctgcaatcgtttttcttctgtctgcaaaataccccttgtttcctttgatacagatttaatgctgaggaattatctaattttcttggggtccrgaacatatttaattcacttttatttttgaagaacagttttgctgggtataaaatcataggttatcaatgcctgtcctatccaccagcctacaaccctttgaacctatcattccactgtcttttgactcccattggttctgctcggaaacaagctgtcagtctcactgttgcttcttttaagttaatctgtcttcctctcctcttccctagctcttttgattgttctctttttggcaggagaagtgttgttgaaatgttcctctagatctataattttttaattaataaagtttgttttcgggagagtttaaggtttacagaaaaactaagaagacagcatagagctctcatatgattctttccacagcacagttttgtctgttactaaagtcttacattactgtggtatatttgttacagttcatgaaccagtactgacacattatttttaaccaaagcccatagtttacattaaagtttactctttgtgtggtgtctttctatggattttgataagttcataatatcatgtttccctcattacagtgtcatacagaatagtttgcttctattctctggaagagattttggagaattggtatcatttctcactgaagtagttggtagaattcatcagtgaagccatctaggtctggtgctttcctttttgggaggttattagtgatcaacttaatttctttcatagatacagcctgttttttttctggctgaacccagggctggggtcgtcgccaaagtgactgtaggaagtgcccacaagggatagccacaaacccgcctgagatggggctggctgggattccaaagagagaagcactaaaccctgagtgatcatttgaagcgtttattaggggaacttgcctacagagggggcagcagcttccttgtgaccacagcaagacctgagtatgtctacagggaggggtctcattgtggagtttctatgggagttgaaggaaattggctcaccgccaatttctatgtgacagcaacatgctgatctttctgtttcaggcagtaatggaatgctcaagcccacaggggaagtatgcagctgcctggctcacatggtggtgaaggccctctgtgtgtctcagtcaggaaagagaaagggagctgggggtgggcaggccactagaaagaccgattcatgtgatctcttcctcctcatgtgagttttggtggttcgtgtctttcaaggaattggtccatttcatctaagttatcaaatttctgggcgtagagttgctcataatgtttctttattaccctttagatgcctataggattagtagtgatggctcctctttcacttctgatgttagtaatttgtgtcttccttttttttattttttttttttaatgttggttaacctggctacagatttatgaattttaaggaaccagcttttggttttgttggtttttctctatggagttcctgttttcagcttcactgttttttattgtaatttttattatttattttgttttattttatttttatttatttatttttttgagatggagtcttgctctgtctcccaggctgaagtgcagtggcgtgatctcggctcactgcaacttccgcctcccaggttcaagcgattctcctgcctcggtcttccaagtagctgggattacaggtacctgccaccacgcctggctaatttttgtatttttagtagagatggggtttcaccatgttggccaggctggtcttgaactcccaacctcaggtgatccacccaccttggcctcccaaagtgctgggataacaggcgtgagccactgtacctggccaatttttattatttcttgctttaggcttacattgttcttctttttttagtttcctaatgggaagcttagttgattgattttagatccttctttttttctaacatttacattcaatgctataaattttcctctaagcatggcttttgtttcatcctacaattttgataggttgtattttcattttcttgttcaaactattcttaaacttctcttgagacttctttgacccatgcgttatttacaagtggattgtttagtctccaaatatcttgggatttttcagttatctttctgttactgatttccagtttaattttagtgtggtctgagagcttactttatatactttatattctttttaatttctttaggtgtgttttatggcccaaatgtggtctgtctaggtaaattttccatatgagtttgagaggaatatatattctgctgttgatgcagtgttctgtcattgtcatttagacccagttgattgatggggctattgaattctgctgtgtcctcactgattttctgcctgcgggatctgtccgtttctgataagagggtgttgaagcctccaactgtaacagtgaattgagccatttctccttgtagttctttcaggttttcctcgcatattttgagacactgttgttaagtagatgcatgttaagggcggtcatgtcttcttggagaaatgacctttttatcggaatggagtgccatttttcattcctgatcgtttccttgttctgcctgagattgatcaagctgctccaccgttcttttatttgggcttagtgtggtctagctttcttcctttcctttcaaagtgtgtttatattttaagtgggttccttataaacagcatataattgggtcttgtttttttaatccatcctgaccgtcttttaattggtgtgtttagatcattcacattcgaaatgatcgttgatactgttaatacctgccatgtttgttactcttttctattgggacacttgttctttgttttttttaaatcttcttttctttatctgctttgtttggttttaactgagcatgttatatgatttaattttttaattctgttagcacagaattttttttttcttttggagacagagttttgctcttgtcgcccaggctggggtacagtggcgtgatcttgccaccatgcccggctaatttttgtatttttagtagagacagggtttcgccatgttggccaggctggtcttgaactcctgacctcgggtgatccacctgcctcagcctcccaaagtgctgggattacaggcatgagccaagcacagaattatcctagagtttgcagcatacatttagcatgaatctaagcccatggtcagatggcctttgaccaggtcacaggcagggtgggcgcctcccgcagaacacgcccattccccttgcctcccgtgccacctgctgcttcatttcacccatccctgcaccatcgtcaccccacacattgctgctcctatacttcaaacaatcgtccattagatgaacgagactaaggaaagtaagctaggctcagcggctcacagctgcagtcccagcgacttgggaggctgaggtgggaggatcacttgagccccagaggtagaggttgcagtgagctatgatcacaccactgcactccagcctgggcaacagagtgagactctgtctcgaaaaaaacagatgaataaagtagattttatttttccttatttgttacttctctgctctgtctttccacatagatctgagtttctgacctctcatgggattctctggagaatccacctcacactgcttacaggggccagggctgccaatgaccaatctcccccagttttcgtttgtctaagagagtgttttttgtttgtttgtttgtttgagacagagtctcactctgttgcccaggctggagtgcagtggtgcgatcttggctcactatagcctccacttcctgggttcaagcgattctcctgcctcagcctcccgagtagctgggattacaggcgcctattaccatgcccagctaacttttctactttcagtagagacgaggtttcgccgcattgtccaggatggtctcaaactcctctgacaccagaccatctgcctgccttggctccccaaagtgctgagattacaagtgtgagccagtgtgccccgctgagaktttttctttctgcttttcttacagaagatcatcttgctggatgcagaattccaggctggtgctgttttgtttcagtacttggatacctccctcccctctctgctgcctgagtggcttcggtcaggaggtctgatgcatttctcactctcttggttgataatgaagggctctcccttctcaggctgtcttattttccacagttgaatatgatatggctaagtgtggagtttttggtatttttcctgcttgatgttctctgagcttcctggatctggggtttagatttgacaaatctcggccattatcacggcagatacttactgtgttcgctcctcgcctccttctccttctggttttcctgtcatgagtaggttccaccttcacggtcatcccactgttcttaggtcgcctcttcttttgttttcattgctttttcctcagtgcattttagtacgggaagtttctgtggacctgtttttacatttgctcatttatgctctcatctttatttttattcctatactttctgcatatgttgttttgttttttttcattttttatgttggttagttagcttgctactttcagttttagcctttctactctaaccattaaattaatacattttcttctaagttattcattcttgagattgtgccactgcaccgtagcctagacgacagagcaagaccttgtcttaaaaaaaaaaaaaagtattctttttgcttaggccgctgtcgtctcagatgaagtttctcctgtcttgtgtgtgtttttaactagtgcctgaagtccgtccgatgttttccttcgtctctgcccacagccaccgggtcagcctccctcccaggaggcccctagactccgggtaccagggcagcccgggcaggtgagagaggacccagggagctggctttgctctcacagaggcggggtcctcatggtgttctgctctagcttgttcccatgatgtcagggccgggcgtccccctgcggctcggtctcacagctgccgtgtgcccatggcgttccgtcctctgaaggctgctgggaactgcagggtcagagccgcaggaaggcaagggtgggggccgcatggtgccggggccgggtgcacgccttgatgggaatgctggggtcacgctggggctgtggatagcgatctcgggcctcgtgagttcctccttccggcagcccagagcgggggttagtgccccccccgatcatggagagccacttccagtggtctcaccagtgaggctgtccatggcactgcctccccgggctgggcgctgaccccgggactgtagggccgcagcctgggcggctcctctgtttgcagcaccagccggggctctgcccctccgtggtctgagcgacagggcagccacaacagctcgcagctgctgagtcctcttccctcagccctgtgcctgcctggcggttctgaagatcaaatgaggtaacgtgtgcttaagtcatatgtagcattagcatgctgtgctgatgtcaccaattaaaatctgcctgagtgaatcatacttgaaaacagtcagttgtcaaraaaaaaaacctcgtttaggggcagcaggcccaggaaagagaagcgagggacagacaggaggcgaagcgttctgtagttggttgkgggggccagggcatccggcccaggagcaggcgtgggccgagcacagggacgccgcctcatgtgcactcagcactgtggcgtggcgaggcrtggccttgcgttgggggtggtgaggcgtggccttgcgtgggtggagggtggcgaggcgtggccttgtgtggggggtggctggggctgggccgggcagcccgacccccacccccaacccctgtggccgtaagtggccctccttgctgccctttccattgacgggtgctgtctccatgtacttattaatcctggtgcaccttttaagcactctttggggcattcgtgcccccgttttgcacaaggagggtgggttcagagacgttaggtcccttgcccaagggtgcacagctggtctgtgtcagattggagcgcaggactgtctgacccgcgtgggtcctccgaggcgcttattactgccgctttcgcctgtcatcatgttctcgatgggccccacggatgccagagtcctgctcatttgggaaacgaccagctgggatgagggttccagagagaggcctcctgcctctcccagcctctgtcccagcagggccttctcctgtctggggcgatcttgctgctggggtcacagcagacctgtccaggctggtgactgggggtctggggaaagagtgggcagaggactctggggaggcgggtggcagcgaggagatggtgccggcgtcagtgggcagagccgtgtctgcagccccacgttcccgcctgaatctattcagtttcttgtggtggctccatgcgtcgggagaggtaattagaacagggcttttcagctatttatgaycatacatttccttttctaaaaaaaggagaagttgtggagtgactcagagttgggtggaggtggctgagctgaggtgggatgggcttgggaagaggccctgcagagaatgtcgcatgtgcagaacagccttggagcccttgcagagtgggcctcggccttgggctggagggggcggagggagggaggcaggctccacagcactggtggcagaggccgggcgggagtgggtggcggaggctgggtgagggaggaagatgggtgaggggctgctgcttcattggagggggcacgcggtactcagcttacttctgggcttctctggaaagtgggggttggtgctggggctctaaggaggggcctctgcatatggagctgcctgcctgcctcacacagccccttcaggctgccactgactcccaggagggaagccctctgtgtccatggtgtggacttagggagtgctgggcgcctgcctcaccaggcgtggccatggccagaggctgtccccatcgtgcgggacgcgcctgccccacctgcctgctctcctggccatctttcacgagcagctgtagtcatagtggaagaaccaggcagacagcagcgaggacagaagtgaccaccgtggctgccgtgcattcatcgcctgtgtatgcgggttccgtgtgcctggttttctgtgccatgctgcatttgaacttcrcagtgaggctgaggcgttctctgccctctcctgtgtggttgagtgtcctcacactcagagaggctctttgtttttcccaaggtcacacatctagttacggtccaggcaggatgtgggcttcgttgggtgtgtgtgttgggtctgacttgggggctggcctgggcatgcacacctcaagtgaccgctgcttgggggccacggggccggtctctgcccactgcggtgcctccgtccatatctcccctgccygcagcacctccaacagggccggcgtcctgcagtctcccgctcctgtgggtgctctcaccacccgcagccctggtctctgtctcggcttcctggtctcgctgctctgatctcccctgcccttcccaagcccaggcccaagggctgtgccctgggtttcttcttccaagggcactgggccctattctgcccactgtctcagcccctgctgcccaggtgtcctgccccctgctatggcgttctcagcctctttgggaatctgtctctcattgcgtgggaatcatcggcatgcttggggcttatactcaaaagctcygtggtaattagcgcgccggagcacctgctgatgagggaatgagcgtcattatctctcttgctctttcgcaagggtcctctgggcgcctactcaacgctgttccctctgattggagtgcccttccccaccgctgcctcccagggcgcccagatccttcctgcagcctccctgggtgagcagcccctctgcccgactatcgcaggccagggcagagccgccctctactgctgcccccggcccccatcggccggtgtatccagggcaccgaggccctgtcctcagctgacttcttccaggtgatgccgactgctcaccttctcttcacatggccgttcgttgcatgatgagcacattctattccttagaaccgggacgtttctgtacctaaggaggagcagccagtggacaatgtaactctgctgggtgcttcttaaagcgagtctgggaygcccccgtcagcactgccagccgcctgtttgttcagcagttaatcaccgcatttgytgaggtggaaatgaagtggacttgcccgcaggtggagtcagctgttaaaaagtcatagcaagtcacamccacaccgtgcctgctgtttcactaccggtgacaaaacaggttcttgaaagggtacaaacaacaaactttctaatgcttttcttctgtgccagccagtgctagcctggagttaggctgaagagagccgtcacgaagagaagctctcagagatttactgatcaataaaagagacaattacagcttgtttaccaagggaagtcccccgccccggccttgcgcggcgtccgcgcgttggtactgacaactccggtaactggcttgaaacgataaaagtcaatgggaagatataggatttcaataagattatgacacacgataaaccttcckgtgcaaacaaattttccacagatacgtgacccgttctagttggatttgtaactttaatttctcacttattgaattttgaattttttgtcatcarctaattatgaagtccacaccagggtggcacctgtgtccctggctcaagagacggcaggagagccccagacgtggcggcctgagctccagggtcttctgagagagcaggccggggtttcctsagcccctgcagcctcgccctcctcgcctgtgggggatagaccgagggcctggcaggggccaggcagtcatcagtgctggggagcactgggtcggtctctcctaggagccaggcggggcctgggcgggggctcagcttgtgtacgtgcagactcaggaggccgcacggaagggaccctggcagttttgtgcactccgcttctgggtgggggtcttgctccccaggctgcctgagtgagcyggtctctatcagggccatgaatttgccctttcagccagtactggtgggggcggtccccacagctctcctgccctcacctggtggggagcacgctggccacaactcaatgaggtggtgcagggctgtgccggagcattggccccttgcgcagcatgtgtgttgggaaggggtgtgggccagtggagaccgyttcccgggtttgtgaggtcctggctctcgcttcttgagcacctgttgtttccagggcagctggctggacagttcattcctgacagcatcagtcttcayggccaccccatttcccatcttatcaacaaaggaactgagacttggggagggaggttgaatagctggcctcaggacagagctggggcttgaacctgcatcttatagatacccatccgcttcttcctgggctctactaccccagcatcctcatcctccatctctcaagaatggggcagagcccctcagcagaggctgctgagagcatcagttagatgtccctggggcacatgttagaagggcagattcccaggcccaccctgaatctacgtccagggcatccagatgcccgtgaagatctggaagctgccctcccgcacacctgggtgggtgtctggagggctggctccctgatcatgtggttcctgtgggctcacgcagggcggacaggcaggagaaggtcgccagcctgcgcctggaatctgctccatccagactcagcgtctgagaccagaagggtccgggggctgtggttcargcccacacctggggcagggagtgcaggcaatgggaggccagagggaagaccacacttccccgcagcagcacgtcctttttgggggccatcttggcagctcagttcccgacccatgggcacccgcagggtctggaggcagcacacagctcccggggcccctgactggctggcaggacacaactgagcaggggtttctgcccggctctaggaatcagccctgacactgtggtcagtgtcatcccaggaagctgagccctgctgggcctggctgctctgtagggatctgcgtgtggcctccgacatcctgggagctctgtgggaagacaaggagctccccagcccagagctgaaaagcggggactcagccttcccgagagccctgggcggttggacgagcgatgggtttcctgtcccattggaacgcagcagcttcctggtgcacactgtcccctccctcgacaggtccgggcagaggtcccaggaagagggggactcacccagctctgggcctgcccactgtcgtttccctgggcccagtgtgactgggactcagaggagtcacgcagacccaatagaacaggctggggtggggaacctgggcttctgcccactgtgcgccctcgccttgtgtgtgctgtgtccacaggggcagaggcgtctgctcccagccgaccccatagccatactgccggtacgaggtggagcccacacccgctgtagtgaaggcctgacgtggtcagagcgggtgccgaggcaaagccagggctgctggcatttactgggtctggggatgctgaactctggggccctcttcactttggtgggccctcaggggtgggctctgagtgctggcctgggtcctcacgagggagcccccgcgtgacccagctctcgtggggccttccctgagccgtctccatcattacctcatcccccgtcccgggtcctgatcagctgccctctgtgtccacaggagcgggacggtatgcgggccatcctggggtcctacgacagcgagctgaccccgkccgagtactcaccccagctgacgcggcgcatgcgggaggctgaggatatggtgcagaaggtgcacagccacagcgccgagatggaggtgaggggccgcgggcgtggggctcacgtcgccaggtggggcttcttcccggtgggccttggcagagcctgcggcggggaggtggaggtctggaccccgcctccccagttcccggctggcaggtgtctgtcagggagggtgtccacgggctgcttcctctgcatgtggatccacgttaattctcacgatggcacctgcagcatcctccgctgtcagggtgtctcaggtggtcccagcctgcaagcggatgacagagggacagtgcccctttgactggttaggaccgcctcatgatgcctgccaaaggggcactcaaggtccttcccctgtgagkggcatctgccaaggagacctggtctccgggtgctcagagttgttgccagggctctrgtccccgctgctggggaggctctgctggggcctgacgggcagggtgtgaggcccagggcgcccagctccctgtggaactgggagaggtgttcctccttgttgcagcctccaggctgcatccctctcctggctccagggttctcccaggagaggtggcctcagccttggcttctgccttttccctgccccatgggccaccgtgacgctcygtgcccttgtctagctctgagcagctctcacctgtgcagtgggaagaaggagctgggtatcgcagggcctgggcggaggccacgtccacactccccatccacacttctcatctacactggggccgggggctcctagcacaccgttcccagcctggagcttgaaaggcccgtgttctcctctcaggatttgcaccacttctccgtgggcacagtgcagccccgcctgggcgtggtgggatacctgccagggtcttctggcctcgctggcacacgccgccgccgggtgccttaccattctgctctgcctggcccttyacctgactgctcagtctcattgtcaccgtatcctatggagtgggtgccgttgtgatccgaatttcgctcacgaggaaacccaggcctgggggcgtcaagggacatgcccaggtcaccgagctggtgtgtgacaccgccaggccacatctcagagggcctgggcctgtggtgtctgcgagcacagctgaacagccgagctctgtgagctctttggtctcaagggtcactgtgtctgggctgggccttgatggtggagactgcggtgagatggagatgcagatgatggcatcggtgtggcctgttgccctgttgtaggctgctgtgtcctttcctcattcagccagtgaccagctggaagatgacctgggtcccccgatggagagccagcctcacaggcgtgaccacagccaccttccagccgggctgctgagcacacacagcaggctgggccgtgtgccagggaaagtctgacagagcctctggcccctggagccgagctgctgggtaggggagacatttaatgaacaaacataattcatgtgggatgttaggaggagctgaatttctggagaaaggattgtaatggagggtctcagggagctgcgctgcatgggcgtcccagcagctgttcagggaagatgggagaaggaggtcgccaaactacatctagaaagctgcttggcagatggttcagtggtttagagggggcgtgggcacagaggctcaggcactggggatggcacttggcgagaatgacaggtcccagcccaggaggccccaggcccagggcccacatgcactcgctaccccttgctcacatggaggccacgccgaagggccctggaactatgccgtgtccccacctatgggtgagccctcaaccaccaccacgcttgacaagagtgaaccctgggtgtgagaccaccctcaggcactggtactgccccctggtgtgttcttctgatgccctgccccctctgtccatcctccttcctcccgctcctggctttcctttctgtgtctagccatcccgtgcgtgcagggcctgctgcggagggctgcacactgaccttcagtcgtcacgggaaaggctagctccggctgtacctgggagctgtcgtaaacctaagtgcgttaatagccatctcattgcaacacccttggctccctgtgaagcattaatgaagagagatttgcggggagggtctctgaccccttctgccgtccctggcgttttccacgttgagcgatttctccagcctgtgcttgccctctgcactgtgattggctcgtcacgggcctggccgtgggcacatccagagtcctgggttctggtgttttgtgtgttaaggcgatcagggctgtcagggacctcaggactcattgaccagatgctggcactgtttgggcaccgtgcttgcccccttgccgggcagcttggagcctcagccctcaccctgctagtgggatgtatgttgcggaccttgcccctcccttcccatggtggggtgtgggggcaggttactccccttcctgtctgtctcctggggtttcaggagaattaggcacatagaagagttgggcccagcwgggctagagcagggtcagactccaccagcactgactagtcctcactgtgggagttcacacggctggtcctccctgagccctcacagccttctctgcccatccccctgggtaccctccagaagcaggccagcacctgcagtctccccccaggaccccgctgcactggcctgtctgtgttgatggagacagccacggtatcggctgctggcacagattccagagaggtcttccaggcccctggctgttccctgagcctgtgcaggtgccactgccctctggggtctgtggagcagccaccaccacatcctgcatgacagcgtgacctgatgccttgcctcatcagagggggcacctccgcgtcagctctttcctcccaggagcctgggagaggtgtccctgcctttctgcctcagcgggaccaggtcacctgcggagcctgtgccctgcctttccctgaagtgacagtcgggtgggaggctgggggtgccgccagctcctgggctgggttcctgcctcaggggagcatctgctgggggctccccacctcctcatggatgtggcgcaagttcgggagaacgtggccccaactctgggaactaagcatgtttgcaaggtgaaggcgggggcccagcaggagtgctatgctccagggaaggttggggcgcggctgcacatgaagtgtggcaagggtggctgcaccctctgtgcacagggagcccctggggcagggacgccagcccaagccagggatgcccccgtggagggccaaggggctgctctggagaccctgcacatgccgcgtgtctctggctgttggtttctgtgaagggcccgtctcctcttctcctcacggtcggggggtggggggccgccatcgccccagccggggagggctcctgaccccacagagcccaggtgctccccccgaaccccctgcctccctctctccctgctacctccacccggtttttcttttctttctgtttcccgtctccttttcccttcttgattttctttctgtcctctgcacgcatgtctgatagttcctgtctccatctttccctctcccttggcctctgttcacccctctgtccccccctcacactcctatgtcttctgacctcgggcctcgcaagccttccctggaagcttgcccggccctgcgcatgcccctggggaaggcgcctctcggggcaggtgaggatctgctacctgaccgccaggtgggctcrgggtagtcgccagcgggaggatgcagcatcgctctgagagtggttcccttccacccacccgttagctaaaccagacaccagtctgttctcatctggaccatgttttcattctagcagagacgttgcaggaaaacagtgttgagttgggagaaccccagacccgtctggtgaagttttgccgtcttgcacggtgttatttattccatttaataaagcggctgcgggagcccgtagcatgtgtcaggagtcctctgtggatagagctataaatacgcagtgcacgccaccttgattcaacacattggcctgatttgtgtttccgatttatttaattaaaagcgattactgcgctgctggccgtgtggaggtgtgtggagaatccccgtttcaggttgcagggactctgaaatagttcctaacgatttaggcagaagtggccgtcacggtgtttccgtcttcccttcctccccgtgacctcccagaggctcgggcagctctgcgggtgctgtcacttggctgccgtgggtggtttggctccaggagggctggggagagcctgatcttcagggcctcgggttgttcaccaggcccaatacttgtgagtgtgttggtgatgtttccctcattgaaagaacttgagatgactgtactgtacgaagcagagataaagccaaaaaaaaaaaaaaaaaaaacctgttaaaaatcatgcagtgaagaaaagtgggccaaggggtttatggaaaccaccctggagtctgggctgtgggagcctctgctgtgtggccacaggtcctcagtgggaatcgcgaggtgctggctccattcccagaacggggcgtctgtgcagtacagaactgcgctgagccgggctccccgtgacacgccggtgccacccccggcagcacacacttagagcaccgctgcccagcacaggagctgacgttgctgggcgtgaggaataagcccagggcaggctctgtcctctccaccatgggaggacctgctgccaccctcagagcatcccccagggcctgggcgtccaccccctagccttccttgcatcaggggctgcagtggagcccctgaccgtgcactgactgcctgttgtgtgctctgtggccagcgctgggctcacagtcatcctcagacctccacccacagggagagcttctgtgtacagcctcacccaggggcaggtgctggggctgtggcctggttagccctgtggggaccctgtggtgtgccgcctcctgcttcttcacgttgtgtcacaagccacttggagacctggccaggaaggtggaggcctgagcttccgtcccatccttttccacgtgaccgtgaccatgaccaccggtggggctgccttcccctagctccagcctttgtaccgtgtgtggggtctgtgcctggtgccctctggtcctcctcagtccggctgtcctgtggctgctggggtctgtggctgcctgtcctagccattttctgccatgtcctggctggcaggagtgttggatcacaggcagcaacttctcacctcaggataaaaatagcccggctgaggcctctgtgcagcacctcggtggtgccaagggcgccagggcccggggctcgtgtctcagcacacgtagccacccgggacacgtggtcccacccggaaagagctgtgtgtgacccttcagctgcttgggtggaggcagctccctggtcactcggtgccagggttgcggggccggggcgtggctgcgctgggggcctgctcgtactggttttcccgccatgtgatgaaaccctctccccacagcctccgcacccctcagtgctccctggtgtgtgcccctgaagcctggctccgagtgggcttggcctctcctggggaacccgagcactgcgtcaggtcgtttgggatggagccgtgttccttcccacctgagcttcctgcgtgtctgcgtctgaggctgtttgggatggagccgtgttccttccccccctgagcttcctgcgtgtctgcgtctgaggctgtttgggatggagccgtgttccttcccacctgagcttcctgtgtgtctgcacccagcccggggtgggctgtggaggaggggctgaggctggggaagtgcctggcctgcctgcgagcaggcttggcatctggtgttcccagccgtcagcccagccccgaccccgggccttgggaagctctctctccatcccaccatctccgcatcagaacaggctgcaccctacactgccttgcggagccarcctgagcttggggagctcttgtctcagaggtgaggacgctgtggccagggcctgggggctccacccggtcacccagagagtgagaggtgtctgtgtcccccgaaggtgactgggcagccccacagtcagtgctaaagtgcactgtccagggtgtttccacagggggtgctctgccgcccacccactgcctccatcacagatgcggtttcctggaggaaccctaccgagaccagcctggagttgcgctgtctgaggccctgygggagctgctctccartgcacacacgggcygtgccagctcctcgcccttgtgagtgtggttctccccgagctctggggattccatgttttaaaggcagccttattgaaatatgatttatactcagtaaaatcccccagctttatctgtatgatttgatccatgttgaccgtcagtttcctgccacccctggctcgtrgagacaccggtctggggcctgtgactgttgttttgggctttcttggaacttcacgtaaacagagtcctgcagttgctgtgtctgtcatctctgactgagcacagagcttttgagacccatcaacgttgtatcagcagttcatttacttttattacaaaataattctctatcckgagactctaccaaaatggtctcgtctgttcacccactgaccaataccagggtggtttcccattcttgccagctgggacagagctgctgtgaatatctgcgtgccagacttcctgtgaatgcaggttttcattcctttgggctctacatccaggagtaggattgtggggtttaactttttttggcggggacagtgtggggacagagtctcgctcagtcgcccgggctggaatgtagtggcgtgatcttggctcactgcagcctccgcttgccgggttcaagtgattctcctgcctcggtatcctgagtagctgggactacaggcatgcaccaccacacccagctaatttttgtatttttagtaatttcaccatgttggccaggctggtctcaaactcctgacttcaggtgatccacccgcctcggcctcccaaagtgctgggattccaggcgtgagccaccgggccgggccctaacttcttaagacattgccaggctcttcccagcggccataccgtggcaacacgcggggtccagtgacgcgttactgcacaggctgtcggcaccagagctgggagaacgctccgctgtggcactgtcggctttggtatctggatccagcggggcagcagcacatttagccctggcttcaatctgtgtgtctccagtgactgacrtgcccagcgtttcccgtgcttctccacctcggcgcctcttctctggtggcgtctgttcaggtcccttccctctgtctggtgctggcctgccaggcccagctgcccatctgtgcctcctggagttcccattcctctctcctcacccagcaggcctgctgggctctgtctgtggcactgccccggcctgcgtcctgggggactcaccccatcccctcccgcggctctgagctctgagctgcctgccctccctcgcaggaatcccactgttccttgtgttgtatctggtgtctggggactgaggtggggggtgtgtctgtgctggttcctacagcttgtccagaaggagaagttctagcgcattttggagcccatgagagcctgtcccccaaagcttcctggtgccccatctgggagcctcctctgcgcacacagagagcgtcgtcttgggtctctcgggaccccaatgtcctgcctcgcctctcctgtgctgggccgtgcgggtttagtgatgtcctgtctctcctgtgttgggctgtgtgggtttagtgatgtcccgtctctcctgtgttgggctgtgcgggtttaatgatgtcctctctcttctgtgctgggccgtgcgggtttagtgatgtcccgtctctsctgtgctgggccgtgcgggtttcggtgttttctttgtttttcttactttagctgtgttcttggaacaataaggtgagggaggagtggacgtttgccaaatgctcctcggtgctgggactctgctgtgagcttctcacaccctccctccacagaacctggggaggcccaggacaggcacgcattgtggctgacaccccaggccacagccaccttcgttctcccaactccctcctgccctgtccacacccgctcccatgtaaaacattcttttttgttacttggaaacttcatgtctgaccacttaccctgttggagctgcagacagcagtgtgtgtccttgaatggccacagggcctgctcgtctgtgttctctcggtgttccatggctctgttcttaggagcacccacacgtgtcttttcaggttatgagtgagaggtggctgaggtgtcctgcacccacaaaccttgtgctgtagaatgtctataagccagacctgagctccctcctgcctccctgccgctcccccatctccatgcccatggagcgtgctctccatttcacactcctggaattccggcccctctgcgtgctgagcttctgtctggtggctgctctgctgagaaccctccgcctggagtcacctctgactcagggttgtgcagtgtcccatttggccatccatttgggaagatgcagccggttacaaacgaactttttttgttttgttttacatcttcgtttttgtttttttgacacagggtctcactctgttgcccaggctgaagtgcagtggcccagtcatggctcactgcagcctcaacctcttggtctcaagrgatcctcctgcctcagctccctgagtagctgggaccacagttgtgtgctaccacacccagctgatttttaaattttttatagaaacaggatctctgtatgttgtccaggctggtctcgaactcctaacctcaagcagttgtcctgccttggcctccctaaatgctggtgtcacaggcatgagcacggtgcctggatgaaaccatttctctttatggtaacagaaccgyccttcttttcctccctaattcgtcccccagggtgctagagtatatgttttaatggaaatataacacaatacaccaaagtgcacagattgtaagttttcagcctgtcggacgacagagcgagtgtgtgtgtaacccccctaatgcaggcgaagacacagaacttcctgggtcacacaggaccccgtggatgtctctttgcagtctgagtgacacctgtgtgttcagtcttcagtgaaaggtggctctcactgtctgtaagccgtctgtcttcatggctggatggctcctgtgatgccctctgctgtcctggtcgcctcctggggagcactcagctcgtcgatgtctgccttcttgaacccagggccctgcgtgtgagccgagccatagctgctcctgctgacgtgcggtcgtcctcctggccgcatcccggggctgcactctcacgggagctgctccaagcaggccctgcccaggtacccgagaccagtgcgcgagtctgagttcagggctccttggctccgagtcacctttcgccagcgactgtggctttgaggatgtatcagaaatctcactggtgtctgtgtttccaggccctgggtcatgtgaggatttcagatgcatgcgttctgttttttccagccatcgatggaagtgctaggctgaatggggctggtacggaggtggacgcctcggcctcaggctgatgagccgcttgtgaatgaacttgtcttcagacacacatcactcagtgctgtcctcacagaaacctgatgaagccttcggaaaatgcctgcagcctgcccgcgtggcgccggaggctgtgaaggctgaggctgctgtggcctgcctggcctcggcaggaccctgggctggccaccgtggtcacggctccaccctgcagtgattctgtgtcgggaggcacaggagagcgtggttggtccgggcctcgcgcacagctctcagccctgctgcttccggacgaccctgcctcttctaagctgctcctgtaaagtgcctttgaccttgsaaggttgccatgtgaactgatgtaaatggggatgacgatgtgcctcacctgtagctgtcacctgaggccggtgcccatcgtgccagccgcctgtgtgcccaggacagtgtgccgggtgtggcggacatggacgggctgccaggggtgtgggtggctctaacgggtgcatctcgctgcccaggccagctcagagctttgccaggggtgcgggcagctctcatgggtgcgtctcactgcccaggccacctcagagccttgttgtcgtcccccctgtttgggctgctctctggcctggtggcctgtgggtgctggtagacctgggcggggtgtagggctgcgtgaggagagcctgagtgtggactgcagctgcctcccatgtgctgaggctctgcccaggggcatggggtgccctggatgccccgacccggctccctgtgcccccgggagtgcccagggctgcagctcggtgaagtgcgttgtgtctaggcccagtttgggggatgtccctcttccatctgccgttcccagtcccagctgctggtgaccccagcagtggccggattatccagggttcagctggctgtgaggagggcagtgtgctgctcctaggcctcgaggcaccaagctttccagtgtggggtccacacagcccagcgtggccacggccacctgcctcctgatgacagtggctaggctggctccagggcctcccccagggcagtgtgagggcagcaggcggggctggtcatgggcagagctcaaggccttcccctcatccacaggcgttgcacaggggtgttgggcaatgggggtccctccggtggccccactgagtgaggccccacaccagaggcttgggaggctcaggtgctcacacctgcagcctccacgggagcacctggagctgggtttgactctgctgtggcgtccagaaccagcaggcaccaggatagcccgtgggaagtccagagcctggctctggctgggcctgtaggggagcttgggggcccatggtctgcagagcggacaggttgaggactgtgggctgttgcctcagccactttccccaggctgtgtccccaggggctgtagtgccttgttttctgtgtctccaaacatacttcccccatccccaccacatgtgcacatgccacacacaggtgtgcatatacatacccacacttgtgtacacgcacatacacacgcctccccgcctctctcccgtttctcctggtgacttgcctggtggtttccagttgccgctgggccaggcatctgcctgcctctcgatttctccctcaccctcaggcctgctgggcctccaccccgcagatcccacaccccaccacagccacctgcctcactcctgggctggccctccatctccttcccggactttcctgtgtgctgtggcctgggggggtctcacaaggccccctgcctcgcccttcctcccaggttctaggacagagccgcaatgtgtttaggtggtgggggcagtggggagccaagcggggtcgtgggaaggagtcaggaaggggcagagggagaggatgtgggggaaggtaggaaccgcaggggcagaggcccagggcgggggtctccgaggtcctgagccccatgcaccgtgcaggtcatgggtgcagggtcactgtccccagcagggagctggactgctgacatcctggccccacaaccagacccagccttgctgctccatgaggcctgttaggaggaggcggctggcttttcattgctggcttttctacccttagtgtggggtcaagcctggtgccctttggggagtgtgtcggggcaggagacccttcctgcctgggtcggggtcctgcttgggggtggccgtggtggaggagatgctctgaggtggggcctctgcctggaaggtcacctgattctgttctttaagcacgagcctgccagggagagtgaattgatttcctctgactgaaagtcccatgctgaacctttccctccgtctctccccagttccacagtccctcttgggcccacccctgtccaccccattcacagtcagtttcctgaggcaggttttaggaatggaccttggttctgtgaagcctcccgcagcccactcggtcttcgtctccatcagttgtctccatcactgggctctcggcctcgcggggcagccacactggcccctgcccaccctctggctgcccactkcccagctcctgggtcccgttgctccccagagagtggaggctgcggggtggtgggggttgtgttccctgcagtcctagaaatggggcctggcccaccacagtctcaggccgaatcctgtcttgtcttgcaggctcagctgtcgcaggccctggaggagctgggaggccagaaacaaagagcagacatggtgagtcagacgcgggagtggctgggattcagggcacctggaccctgggtctgggcagggaygcctgtccccataagcctttaggctgcaggcgccagtgcatggctgcctcttctgtcgtcggaagctgcgttgagcggggaagggtgtgtgaggagcctgagtcccatctstactagtgacaggtggcatgcgccggsggggagcacagcccctcgggccccaccaccgtgtttgtggcagggggccagtgacatgtttgccgcaygaggccacggtgtcggggcaaagcaggtgtgagagcctacgaggggtctgtccagcagcgaactggacatcagtgctgtggcttcatggacccctgtcccgaccacacaggacccgagtccccagtgggacagtgcctcagccggggcttgggcgccactcagcatgggtcctgaccaggagagggacgtctctagtgagtgcttatctgccctctgtgaatgcagcaggcgtgcttttaagctgttttctcctcagcccacatgggccccactctcctggctgcctccgagcctgggtggggggcccgcagtgtgggcccgtgggggaccaggcaggctctcctggtttctggacctccagtgtcaaaagcttcccactgttttagggaacaaatgggctttgcttttgaagcgttttggcctaaacaaagtgtaggttccctccatgctgccctggccttggccatgtctgtgaaggacaaggacggccctggggcatgcgtgcgtgcgtgtgtctgcatgttctgccctgggccatgcgtcaggctggcctgggtcacaggcagagctgctgtcggcgttgtacggaccccagggcctgcagcccaggtcgaggctcccgtcgggcrtccttgcttgccagctcgtgactgtgagccggtgtcctggctctcagggcctcagggccttcctctccacccggcaggggtgtgctgagggttcattgcttgacaggctctggggctggcrgcacagcctgtggcggttgtgggtgcggccatggttacaggcccttctcatgggacagggttggatggggttggaaatcaccgtcttgagaggtacgggcaccagggcctaggctgggaatgggcgagggctgtctgcagaccctggaagaagctgcccagcggcgcagagaggcaacagcagggcaccgcgcgggtctgggcagagctggcatctgcaggaccaaggccaggtgggctggcaacagctgtcctgagcctctggaatggtcgctgttcactcagcagctgcttaaggacattcttcttggtgctggggacgcggcagccagcaacacaggctcctgccctcctggaggcacactgttgccaagtgagtagtcagtggcccataggagagtgaaagacagaacttccggtggtggcgaatggaggagccgcattctcccggggccgctctgcagagcgtcctgagccaagcctgggggacccgactgttggtggtggaaatggtggggcaggcaggtcccggacccaacagtgaggttaggggtgacagaagcggggtccgcggtggttggtagtccaaccttgtgggccctgtgtggtcacggcagggctgtggtttcatgggtggaggaggtggtgacacaacctggtgtccattcgtaaaggatgcctggctgctctgtgcagggccgcaatgggtgggaagtggcaggccggggtgggagacgcaggtgccctgggctaggactgcaatggcgtgcggaggcgtggtccgagtccgctgcgttgaagggagatgcaggtgaggtagagagcgtgagggctgggaatcaaggacggcttcggcattccgccccgggtgggctcatggtatggggtggggagattgagggtgaagtgtgggagtctcacgcctgccacacgttggatgcacagggctggaggctttgagtcggtgccctggggtcagaggtgcccatctgctctgcatggtgtttctgttgttgggaatgagtaggtagcagagaagtcagaactggaggctcaagcctctttggggcattccagcatcctggcakctagtcttggggagcagccatgagttggggtactccgtggagggcaggtgcattcacagagccctggagaaggaagtgttttcaggggacagtcagactgcagagaagacccggaaggggagcagaggattgccctgggccctgcggccggcgtttcattgatgagaggagaggcccagaagggcctggtcaggggctgggcctggagccgggagggaagattcgctttaccgatgggcagtgggagagcggtttatgctgaagggagccttactgtagtgacgggcatgatgtagggctggggcagtggaggggcatcgaaaggggctggggccagcaggttgctggagcttcctgtctcctcctgaagtgggcatgaggcgcactggcctgtgagggtccccgcagtcccgctgaggtttgtggtgtaaacttggagccaggttgggcgtcaggcttctgtctgccacgctcaggtgcttcccagcagacacagtcatggggaatggggtttaccagggcgggtttgccaggggagcgcagtggagggagggaggcggagatgtgacgctttgctcagcggagggaaaatcaggctgttgggggctccaggacaggcctttctcaggtctgggttttaaaattggagaaattggagtatcaaccatgtttttctttaggctgtagaaatactggggggtggggttgttgttttgtttattttcctctctgtgttctgctgtgacctttcattgctgatgtagtttgcaggggaacccattgtaactgtattgtttaatggcaggtctgagactcggtttccattcctctgccctcatctgagatggctcagggcaggcctgaaagatgctcctgcttcagtgagcgggttagtggggactctgtggagtgtggggtctggtgtccagcagtgtgtggggttagggggctctgtggactgtggggtctgtggactgtggggtctggtgtccagcagtgagtggggttaggggactctgtggactgtggggtctgtggactgtggggtctggtgtccagcagtgagtggggttaggggactctgtggactgtggggtctggtgtccagcagtgagtggggttagggggtctgtggactgtggggtctggttcccctgagtgcaggtgttcaggaaggatgccagggtcctcttctgcctgtgtgggggcttggcggggggttggcagggggttggtgggggacacacccagagccttcctagttcccagccctgagggctgtcggtgcttccttctcagtgactgagctttctggacccttcagtgaggacccttttcctgttgcctctggaacagcctggggtgggtggagggatgctcccatctgaagatgccctgtggagaccctggtgttctgtgtgtcaacacgctggctgcctcactgttggcctgaattgaaacgtgcctgggggccatgcttctgcatgtgcaggaggccaggagggttagaaatggagttgtctgagcacaggccaagccctcggcattatggctgagccacctgcccggcacctgcagctgccctggagcatggactccccatgtccaacagaggcacggacgcctcggagctggcatcttgacccgggcatcggcccttgtctggctgcaggtggttttggaggagctgctcactccagtcctcttttgtggggagagagacagaaactggtcttgggccctcaggtggggtgggtgtggccgcccctggagtgctggcttctccagatatctggttctggtcagggggctgtgaggtgcgcttggtgcagygctgggctggaggtttggctgcttttcaacctgtgttttttctcttttttagcccatataatttctgttccttattcatcgtacgcagcaccgtttaagcgctaatgcctgggccccaagctgcagcatttgacttcgaatttggtggtgggaggattgcccccaagcagaatcatgattttacccctccctgggttgagctcctgttcctggccccgtcctttgtttggagccgcagggctcccgagggacgagaggaggggtctcgctggctgtgtgcccctcttgccatgcaaagcccttcagaggaggtcctggggagagcagtgccaggcaagggggctacagacaccgtggttggggctggcccctgccaggcatgcctgaaggccagtggcctccctcccctgccccccgccaccgcactgggctgtgcagccctgggctccaggttgccccttctctgtgtgacccagagccctcagtgtcatggcttcttcccgggggttacaggtgcatgttcctgtctgaagggggtctctgggctgcgggacagcctgactcccttttcattttatggtggaggaacctgagcgggagctcgccctgagctgggatggctggagtcacccaggtctggctctgaggcccctcccacccagttccctgtgactggctcggcagtgggtgctgtctggggaaggggctcccttgtccctggaaaggctggggcctaggtggtctgcaccctcagggcttgtgtggagaagccacattctaggcagggctgactgtgtcactcacgccttctgtccacagtggtctgggacatggccctagtgcccgtcccgtctcccagcctgcagctcctttacctgctattttccaacccaaagtcattttgttatttaggaaatgagaaaagagagaaaaaagaaaaatttaaatctttagttaattgccaatgacaagacaaaggcactctgactttcttattattaattagcaaacccgtactaattagtaagcataagtacaattcatgtttttttctttaaatgcaattaatatcgcaaggagagatttcctgggccatcgtcgtatcattagcgaacccccctaattagctaggcccgcagtggctggagatgggagtcttttgattacagctctaaaatatcctctaatattttatagactttggggagtgaggagtgaagctttattttccgattcagagggaattacgccgctctcagctctaaaatatcctctaatattttatagactttggggagtgaggagtgaagctttattttccgattcagagggaattacgccgctctcagctctgattaagcagcatcttccttgattgctgatttccctttgtggcccctctgcgcctgctccttgctcccaggggcaccctgtgccaagtctgcctcaccaagggccgtggctacagcagcactgaggcccggacaggctgcttcccgtcccccacccttctttgtccatctctgaaatgggaagggtgtcgaggcccactctgagtcgggcctagcggcaggtgctttacagacagattctgaaatctggcgaccgtgagcagggcaggtcccgtgggcccatgaagaagctctaggctctctggggtctcccgtgcaggagcctgtggtccgtgtggctctcagagcctctggcttctcatgggaggctgaggacaccggcggagcttccctgaagagactcccagtgaggcatgtgtagacccgggggaccctgcccgcccaggagccgtgtgtagacccgggggggaccctgcccgcccaggagccgtgtgtagacccgggggaccctgcatgcccaggagccgtgtgtagacccggggggaccctgcccgcccaggagccgtgtgtagacccggggggaccctgcccgcccaggagccgtgtgtagacccggggggaccctgcccgcccaggagccgtgtgtagacccggggggaccctgcccgcccaggagccgtgtgtagacccgggggaccctgcatgcccaggagctgtgtgtagacccggggggaccctgcccgcccaggagccgtgtgtaaacccgggggaccctgcccgcccaggagctgtgtatagacccggggggaccctgcccgcccaggagccgtgtgtagacccggggggaccctgcccgcccaggagccgtgtgtagacccggggggaccctgcccgcccagcagccgtgtgtagacccgggggaccctgcatgcccaggagctgtgtgtagaccggcagggcccggcacacacgggaggcgtggctggtgcctctatattacactggtgctgctactgaagatggaccaggcagctgtgagcccnnnnnnnnnnnnnnnnnnnntgattgctgatttccctttgtggcccctctgcgcctgctccttgctcccaggggcaccctgtgccaagtctgcctcaccaagggccgtggctacagcagcactgaggcccggacaggctgcttcccgtcccccacccttctttgtccatctctgaaatgggaagggtgtcgaggcccactctgagtcgggcctagcggcaggtgctttacagacagattctgaaatctggcgaccgtgagcagggcaggtcccgtgggcccatgaagaagctctaggctctctggggtctcccgtgcaggagcctgtggtccgtgtggctctcagagcctctggcttctcatgggaggctgaggacaccggcggagcttccctgaagagactcccagtgaggcatgtgtagacccgggggaccctgcccgcccagcagccgtgtgtagacccggggggaccctgcccgcccagcagccgtgtgtagacccgggggggaccctgcccgcccaggagccgtgtgtagacccgggggggaccctgcccgcccaggagccgtgtgtagacccggggggaccctgcccgcccagcagccgtgtgtagacccgggggaccctgcatgcccaggagctgtgtgtagaccggcagggcccggcacacacgggaggcgtggctggtgcctctatcttcactggtgctgctactgaagatggaccaggcagctgtgagcccctcgtcagtgctggtcctcatggctgtgcccagcccggaatctgtctggtcacatccagcagcatggccagtgcctgcagatgaatgatcatgagagcctcctggtgtggtaactgacagtacctcatttcaccttccggacccatcctgctccacgacgaagtgctacttctgactggagtgcttcgtgcttggcatgctggaggggcttgctgctggcaccggggttctgtatggctggtggcaccggggttctgtatggctgctggcagcctcctggtccctggaaacctgttcagttcacgctgcaccagcatgtatgtccccgcgcgcsctggtgtgcaggtgtcctgagcttggagaggctctttggggccagggatgtgtctggggcaggtctggggaatggctcaaagtctgagactgtgtccttagctcactctcctcctctccagccctggaggcggcctctcctgggccccccgcctggggctcctgcgcccgcccttccatcccacacaactggtcccttccctcagccacacctgtcacctctcttgctgtgtggccacaggcaggtgcttcactgcctggtcctcagggtggagagaggaagcggggagcctccctggagtctcacaaagctaagtgagttcgtgtgctgggaagatccaggctgttctgggaagtgattctgggtgagaacaggggcctgatcttcctcagcagccccggggctggttccaggctcgctgcccgttcaccagctcaggtttccctgcgtccagcctcatcctcagtgcgtgccccgaggtgccccccgaggcttctccacagagtggaaggaatcgtgctggccacagcaggtgtcacatggagcaacctttgctttaaatgcctcttgcattggagggaagttgtctaattcagcaagcatttgttgagtgcctcttctaggctgttgtctgagggaacagagaccctgtggctgcgcgtctgtctattcagctgccctaacaggaacaccgcagactgggctgcttaaagtagcagatgttggccgggcgtggtggcttacgcctgtaatcccagcactttgggaagctggggygggtggaaatcttgagcccaggagttcgagactggcctgggcaacagagtgagacctcgtctctgtttaaaaaaataaaataaaacaaaacccttgcagacatttgttgctcacggttctgcaggctggaagtccaggatcaggaactggccggtctggtgtttgctgaggcttcctggttccagatggcgccctctcactgtgtcctcacayggtgggaggggcgagggagctctggggtcccttttatgagggtgctaatcccccccccgaggctccgcccsgtggcctcctcacctccccgggctccctcctaggatttcagcatgagagcgggagcacacagtccatggcatgggcccacctccttcctgctgtgtgagacccggtgggcgctcactgccctgcccagtcctcctactggggggtctctgcctggtccctcagtgcccgatgggcctgccctgcctacggtgatgtccccaccctctgagcacatcttctcacgcccttccaagcaatccctgtgctgctccccctctgaagatgtcttttcagttcagcggagcctcaggccccctgggaattgagctggacccgtgctgctgcccctgcatcgcagacacgctcttccctccctgccttcacggggcctgcaccttcaccatcaccgccaccatcgtccctgtgctgccctgggtgtggcggtggcacgtgcaaagccagtgtgtgctgttgctcaccatgtcatgagtacacacttgttgtttacacagattatscccctgtgatcctggcagcaaacccacaagctggttgtggccccagatactcagacgaggaacaggggcagccaggattagtgacctgcccgtgttggcaccggcagtggtggagagtgctccagggttcacacccaggcaggctgaccccagaccctgtggccagggcagttgcaggggcttcctcatatcaggctgtctgtgaaatccaccaggacaggacccagggctttctggggctccagcgttagcccagggccaggcattcagctggggagtttaaagcatctgccgagtgctgagtggggacaggtgggaggaggatgcttcatcttccctctgtcccctttcccagtgtgaggacccagccttttcagtttttaccagtttgcaaagatcttatgagaagatgctggtgatttaatgtcgttaccttgtaaggatcatctgcattttagaaaaagtagctgagaagatggtttcttcgcccagaaaatagatttctcaggcataatgtctgagccttggttgtagaggatttggatccctgcttctcctccaaaaaacagaagaaaatctcagtgcagagggaaggcgtaagcttgttttctatctgggccagtgccacagtgtgtgagctagcagagcctcagagtgtgtctgatacgtcgtgacctttgtgttattttctctttcagaatgatcttagatattctccaatgttttttccggtaaactttagagggagcttgccaaggttcctgccagtcctcttgcattgccttggtctgcggactgacatgggaaggcaagctggttgcattgtggctcccccagaagccctgtgccctccctgcactgtgggtcctgcccactgcttactagggttattcctgggtggtttagaatctcagwcacctgcatgtcactgctgtctgcacacttgccatatgacccatgggggcatcttttgggcgttgggggcggggatgaggagaaggtgggcacttcagactcagagcagtgaagtcccccgtgcattccactccacgaaacttagatcgagtctataataaccacgagaaaggaaatcggttcatttatcttgaaaaattatgggagtaattctgtataggggaaatatagtaccctcatcctaagtacgaagcattttcctgtgatttaaacttgtcgtgtctctgcagtggccctttctggcttaagctttttctcagctacgtgtatcttccataagctgatcccgttctggccccaggcccacaatggtgtcacctgcccctgcccctgcccctgccgcctgcctccctgacgtagagcccatgccatcctcacatccacctgtcctggagacactgggactttcccttggactgggccgcctgggggcttgtttttgcctgtgattcagccagcagccctggcagacagccttccccaagctcccccagcagagttaacttccacagtgagaggcttcacagggacaggaggtggcctcagatgtcctaaaaaggcagatgtaggattggagctgataggagggagggaggccctttctgtagggagarctttcaaattcaggcttgtttctaagcaggggctctttatccagcatcccagggcaggtgctcagttctccacaaagcgcttgaggctgcatacacatttccgttacttgcacacgtttttctccagagagcagttgccatcttcaaaaggtttctgacacctgttccccttccccagcgttaacaactgctcctattgaggaggcagcctcattgatcccagtgaaggttctggagcccttggaagccacatagagagacaccacccatctggcttcccaacgctcctccgtgagtgtaaatggggctgggtatccagcgtggaagtcagagcagtggcgctctggtggggcaggtgctcaggcacccagcggtgctcgtgaggccagcagtggcgctctggtggggcaggtgctcaggcacccagcggtgctcgtgaggccagcagtggcgctctggtggggcaggtgctcaggcacccagcggtgctcgtgaggccagcagtggcgctctggtggggcaggtgctcaggcacccagcggtgctcgtgaggccagcagtggcgctctggtggggcaggtgctcaggcacccagcggtgctcgtgaggccagcagtggcgctctggtggggcaggtgctcaggcacccagcggygctcgtgaggccagcagtggcgctctggtggggcaggtgctcaggcacccagcggygctcgtgaggccagcagtggcgctctggtggggcaggtgctcaggcacccagcggtgctcgtgaggccagcagtggcggccctgggcacgctgcagccctggtggtgaggccccggttcctccaagcacagctgctctggttctgcagcggcctcatcccaggggcggtgcatcaggcgaacattcggccgggacatgccctccggctgggctgtttttttctgaggagaaagcatttcccagctcaggcgcacatctgtgctcacgaggaaatgtctgggtgagccaagggggctgtccatggcccacagcgcctgtgtctcctccaggctggaaaggaagctggagagtggactccacctaagatccccccgaggcctccttaggaagccacagccactccagaagccttcctggtgccagagggtgcagagttgagcggaaaggtggcctctggccaggatgcccagctgtgacctcagcaccctctcatctcttggagacctggagcctctgccccagtcagccccagggagccctgggatgtgagccctcaccttgcagccagggttctgtgaggctctgggcctcagcctcaccacctcccgggcacaggttgcagctgagactcagcgatgccacgtgagttggcgatgaggcggcgggtgcacgcgcatgtggacgccctcactctggcactcagcggcagcctcgttaattagaattgcggtggggggagttacccagctcctcctcttgttattagtttgtggcattagggaaggcccctgggagcacaccctgcatcttcccaaattaaaccgaatgcaaggtctctatttaaaggttatgctgcgctagtgagtttgccacaaggaccattagcatgaatgtttcatgaaggttggggctatgagtggatctggtaggccaggcctgtactccaggagggagggaccttgtaggcagaggaacatggggccagccggcctacactgaggctgggccatgccgaagccgggccacgctgrggctgrkccatgcygaagccaacctgtgctgaggctgatccatgctgaggctggtccacgctgaggctggtccacgctggggctggtccacgctggggctggtccacgctgaggctggagcgctgccgggacgtctgtgctcgcgctcaggctgctctcccagggtccccacacctgttccagtttgggtctgggcagcgcacatgctgctgtgcgagctccgtcttccagggtgaggcggctcccgccgccgagggctcccagcccgtgcctggctttctgctcccctctccctgtcggccccaccggagatcaacaggttgcttcatctcagtcaaacatacagttgagttccgtaaatgagaccaaaatctgtttctgtgagataaaattgataaacctctagccagactaatmgtaactaagaggacacaaatgaacgctcctgggcgtgagagaagtgacagtggtgccgccattttccacgtttcgttagagccgtcctggcgggtgtgaaattttccacgtttcgttagagccgtcctggcgggtgtggagtggctcccgtggctttgtttgcgttaccctgaggccagtggtcctgaacttcaccctgtgcttatcagccacgcatctgtcttctctggagaagtgtctgccccatccattgcccactttgtaaatgggttgttttgttggttagtggtaagtcttcatgtgtkctagacactagacccttctcaggtatgtgatataaggggctcctgtgaggcagcccaggaagggctctcagtcttgctgggcatcagggccttgtcagggaggagatggccatctgtgggccttgggaaggggcatggaggggccaggcacacgtggccctgcctcctgcagcctggtgcgggcacagggtttggccagagagaatgatttccacaggataggctcagtgctaggactgcccggagcacacgcagggcccctggaaggcagccctggccgccgggaatcctgtcctccaggcttttgccgtgggatcacggcccttcccaagaagtctgcctgtggcgctgccctccccagccacgctgtgcgcctgggccaccctggagcgcggccgggtcctccagagagtccgtcagggactgtgctgctgcttcacagccaccgtgacacaggcatgagggagtaaacacagaaaacgaagttttaggtactgagtgctctgtgcctgggccaggcccagagcagtgtcttgtccccaggcctggctttggagggcttccctgccctgtcactgcattggtggggccctgatctgtctgcgctgaagtcttgtaggctgggcgctccacaaagtgcctgggcctcaggtccctgtggtggggatggctgggctgctgtgtgccacctgaacgggggacggccgggctgctgtgtgcgctgcctgatgcagcggcagagttgcccctgggaggtgtgggaggtgagtcttgctctgtgaccattggatgaataatgaatgggccctccgccatgtcaggaagcgttcagcagggccctctccttgtccccagcgccctcttcctggatcccaccttcccacccgtgcttccgcacgctgctccatctacctgctactccttttcttctgggtctcccctccctcacgggcctcctgccgctcctcgcctctcatgggcctgccccgggtgtgagtaggtgttctacaggtcctcggtgaggatgcctcctaggggcctgcctgacttcctgccagctcagcctcctccctaggctgtaggctgccccagagatcggagcttcagacatggtcccgtgcctgggagcccgggtttcccacccagggacaggtggtggtatccccgtcgtcacggtgagggctggaggcacaggtgcctgtgagttacctctgrgaacgctgctgccccgggcctgtgccctgccagcgagtcccacaggtcctcacaaggagccctctgcaccctccactctcggctgccgagcccrcaggagaaaagacgtggagccggggctgcygggcggccgtggmcctgccgtgcgggcccggcggctgggcgagggcactgcagttggtgccgagagcaccccgggaccatcctcgcatttgctcttcccccacctgcctctccccccctccccgatggctttccttcccttaaatactgatatgtctacacggcttctcaaattggcggacagcagagcagactccggggcttgtgtgctcagcatgggcggctctcttcgcttcatccgggatacttagacccgccccagtacctccccgttccgagctcggccgcacacacgctggacgtgcctgggaagtggccattgccgcgtctgtgcccaccatctgcccacccgtgtgcccgtccaagcaccgactgtgtgccaggttctgtgctggcaatggggccctacatggttaccacgtctcctccagggaacgtcccatccagtggggaggagagtcacgtgcccagtcaccatgtggtgtggtggagtagagggtgcggtcacagaggagtgggggtgggcacttccagctggcaggggaggggtgagggagctgccaggacagattgtggggaaggcggcatttccactggatctaaatggtggatgggagcggggggtgtaggtggaaggtggcccacagacatggatcatgggtctggccctctgtggctactgtcctgtgccatgggcctggagggggatgtaggggtgagagctggcctggcggggaggtgcagggtgggtggaggacctgcagcatggctgggggtgtcgggcacaggctcaagggggcaggcattggctactctgagaatacagttgggagcttacttatgagtctaaggttacacattaaaataaaagggcttgattttttgctctgaacattgtggcacacgtcagcatttcccccttgtttcctggaaatcatctacaaataacaagaagcgtgaaaaccaaaatggcacttaaattttgacaaaacagaaatgcagctgcaaaccaagccccaggcagaggcaggaagcccgtggtgcaggagagtgcagtgagcagacgcagtgagcagacacatccccggggaagcctggagcagtgcgggtggaggcagctccatgagggagccgcggagtagaacccccttgccggcgcgagggagccgcggagtagaacccccttgccggcgcgagggagccgcggagtagaactcccttgccggcgtgagcccttgcgagaggcggcccctgaccctggctccgcagtgcgggggccggcggcagctggaacgggggtccctggactggcgtgtggttccaagctggactggcgtgtggttccaagctrcagbagaggttggtgctgagctgaggggtcacacaggtgcatcacacgtacttgaagccgcatctgtggcagacagaacatttgctcttaggaaaactcacggtgtcctttctctcctgccggagggagctactgggggctgattggactcgcagcaaaactgtcactggatttcagataaaaggaagcaggcctgtccttccccactgtgaacctgtgcacggagccggattcaataaaactcatcttcagcagtgagcagtaaaggttactccatgcatttgtgttagagcaaaggagaaaaagaacaaaaacaagtggcagaaaaagtttcacagaaaaacggtggacattgagcagatgaaaattctatccagacattttgccaagaaacaaaagttaacgaggcggtagagtctgtgaggcttgggcggaacgcacacgctccaagaagagacggtgaggccggggggtgcatgagacaggacccggagggtctcagagcaggagagggggcagtacaggaaggaaggtgaccggatgcacggggaggcgaatcacggggaaaactacctaaagaacccgcagcaagagttccatctcctgaattggaagatgaagtgaatgtggaagcctggaaatgtaagtgctacatgtcatgtattcaaaaagaagtgtcaggatggcagagggaggagagaacatgaggatggcggcttcgctgttgagagccgaagacacagacacaccatctaaaggtagtatcaggtggggagagcagatcgagctgcatgttaggctccctagagcaccaggtgcggtagactggtctatcccgagagagagtgactgtgagggcctcgctcttggccatggagccaggatcccgtggtctgcatctgtgcacagcagacctggaagagcctgtgctgtgcccagtccgctctgcaggcctgagaaccagcggagcctgtggtgaaagccccagtcctgggcggaaaacgggagctgccccgctcaggccaccaggcaggcaagggaggaacggtcgcctcctccagttttcatttcattccggcctcaaggggttggaggaggcctacccatgctgcccggggccgtctgctgagtccccgattcaaatgctgatctcatccacaaaccctcccagacacacccagaaagtgttttgatctgagtaccccaggtcctgtccagtggacacatggaatgaaccgtcacagactataaagttcaacagggaggatgatgtatctgactagttaggcacccaacataggagatacagtaggtactgtctagtaggaaagtatcggtgtgaaacaaagctgagttataaaagcaaccagggtaaaacatgcacacttttctaagcctcgagagaattacacgcaaaaaagtaaactagattaaaaaggccacagaatgagatagatgtaaaagctacaaaatcgaaagcataacaacataatacaacagaaatagacacaaatccagttatagttggactaaactctcctattaaaaggaaaggacttcctgattggattgcaaagcaaaaccaaacatgttggaaagtacgggaagcaaaggcatcctggtgaagtgaacctggaaagcaggagctatgatctccatgcagtgtgagttcaagccagaagccgctcagaaacaaaggtgggcgcttttcacagtgaggttcagatgggttagccaaataacacatcaccgctgttgggaaaagcagaaatgaggaaagattcaaggcgaaattgtcaaagatgccagtagcaggatttatgtcctaatctgcgatatagcaagtgggcaaagaataatggaaaacagaaaaatacatatgtgcgtaaaacccatatcccccaaattagagaatatactcatgttaaaaggagtgcatagaaaacattcacaaagattaattgtgtattcggtaatagagaaagcctttataaattaaaataagtagaactaatacaacttcttgtgattgcagtgtgatgtgaaatcaagaacaaaatcagggaaaaaaaagctcctaacacttggaatttaaaaaacaaaacccaaacagaacaaaacactgtgtcttaaacaattcttggttcaaagaagtacgattcaaaagtgcataagatgtagaaaataattgtcatgaaaacacttctcatcagagcctgtgggaaccacctaaattcacaagtttaaatatttatatcattgaacaagaaagcatgtaaatatatggattaraccttcaacccaagaagtcagagaacaaaaggaaagtaaaccttagtgaaacaaaaaggtaggaatttgtaaagatcaaagcagaagttaataggaaagtgaaaaatggtagaaataataaataagtccaaatacctgttatttgaaataaaaccaataaaacatatgaattattcacagttctaataaaaaattgatagaaagtatcaccatccaaaataggaaacaagactaattacctggagctattgactgagcaggagcatgcgagagctttcaggcgtgctgagaattctgtgtcctgatctggacggtggatacgtaggtgaagacatgtataaaaagccatcaggctgtgcacataagattgagaagtttactgcgtgtaaattatgtatacctcgatgggaaagaaaagcaaaaattaaaaaattgagaattatgagttttgtctgatttctataaaaagaattatgaattatatctcagttccattttaataaacttaaaaatctgtgggaaatgaatgacgttttagggaaatgttacctatcaatcccaactccagaagagagagaaattttaaacagatcaattactgtagaaaaacgttgtcccaaaattgccatggctgctctcccccaccacaagaggaaagaaacagaagatgcatcaggccaagccagtttcatgggaaaattctaccagatcttcaaagcgcagatactttgagcactgtgtaaaccagttcagactgtgggaaaaggaggggaaggcattctggaagtgttgtattgacaccaacaactgcaaaggccttacaagcctgtgtgtgtgtgtgtgtgtgtgtgtgtgtgtgtgcgcgcgcgcgcgcgcgcgcgcgtctgtgggtgtgtgtgcgtgtgtgcacgtgtgtgtgtgtgcatgcacgcgcatacgtgtatcagtgtcattgttaacatgtcacgagtgaaattcaacagcaggttgaaatacatcatatgcagtaagatttattccaggaccagcctgtcagcttgattttaggatatcaatttatagaataccctcttcatgggggcgtttgacaaaatccaacactcagccttgattaaaaactcttaataaaataggaatatatgggtaatttctcactgtgatagaaaatacctatttgaaaaaaaaggtcatgtgctgtaaataagaaagtattggcttcagctccagtgaagccacaggccacctaaggatgtccagtatcacaactgtgatttcgtattattctggagatactagtcatccaaagtagacaagggaaagaaacccaaggtatcaatattgggaaggaggaggaaaattggaaaatcgtccctctttgctgctgataagattatgtgccaagagaatcaactgagaactgctgctgtcggtcggaatttagtgaagggggcgggaaacaaaaatttaaaatcacgtatacaaagataagttagaaagaagaagaaaaggctgggcgcggcggctcacgcctgtaatcccagcactctgggaggctgaggcaggtggatcacttgaggtcaggagatcgggaccagcctcaccaacatggtgaaaccccgtctctactaaaaatacaaaaattagctgggcttgatggcgtgcacctgtaatcccagcaacttgggaggctgaggcaggagaatcgcttgaacctgggagctgcagtgagctgagatgacaccactgcactcgagcctgggtgacacagcgagactctgtctcagaatatatatgtatatttatgtatatatttttatattttatatatatagtgaaaaaaagcaaggtaccaaatgatgtgtaggacatcttaccatttttgttaaataaaatgaagtgtggtgggaggaagaacatagacatgttgctggcatgcgcaccagcagcctccggaaggaacatatgctcaaacctcagaacgttggctggctgagagtcgggggcctggggcgctggggttggaagttggggacaggctgctcagggcatgggcatccgtgtttgttgtctgaactgtggatctttctttttaatggacccatgataattgtatatatttatggggtacatagtgatgtttcagtacatgtaacatatggtgattagatcagggtaattagcatatcctgccctgttgcacactgtgcaccccctgccccagtgccttttttcccaggctcctgctggcccccagcccagggggtgttgtccccctcgcatcattccaccctgggtgtctggcaggctttgcagcttcactgctgggggcctccggctgccgtggtacctgctggcacctgtccttccctccctgaggccacactgcccttcctcctcccttcgtgacggagtgagctgggctttggagtgggtcaggactggtgggaacaaggttctgacttgggccaggggcaggatttacctccctgaacccatcggatcctgtccatgagacaccccaggagtggtgaggggcgtctctgggtgggccttccttagcacccccgggccctggagctggtgcctacgtagcccctcagcctgcgccagcctgcctgaccaggcccccgtctgtgccctgctcttccttgagccygcagtccgttctggctcctggcctccccaccgtctgctgcccctgatgcctcccaccctaggtgtgtaggggcgagttagaatccacactsctggccgggcacaccggctcacgcttgtcatcccagcactttgggaggcggaggcgggtgaatcacccgaggtcaggagttcgagaccagcctggagaacacagtgaaaccccatctctactaaaatacaaaaaattaaccaggcgtggcagcacgcgcctgtagtcccagctactcaggaggctgaggcagaagaatcacttgaacctgcgaggtggaggttgcagtgagccgagattgtgccactgcactccagcctgggtgacagagcgagactccatctcagaaaagaaaaacagaatccaggctccctcccgggcggtgcagcatctcacgctgttctgtagaggaattggaagtagcggaataaacgacggcttgtggctgttaaaccaaaccgacggcagcgttggagcgtgctctctccccagctgcgtgtccactctccagagactctcacatgcaccccacacacctcaccgtgagcctgtgcatctgttgctattcaggagatggaagtgacaaaaaaatgagagaacttgagtttgcaaagttagagtgctgtctggcctggcagcttcaggcttccaggagagaggtctctcccgcagctcccagcccagggcgggggtgctgccaggggtggtctcaggggcctgggctggggttccccacacacctgggtgcgctcgtgtctgctgaccctctatcctttgctttctcctagctggagatggagctgaagatgctgaagtctcagtccagctctgccgaacagagcttcctgttctccagggaggaggcggacacgctcaggtacgtcccccagagaggaggcggacacgcccaggtgtgtcccccagagaggaggcggataygcccaggtgtgtcctgcgggggaggaggcagatacgcccaggtgtgtcctgtgggggaggaggcggatacgcccaggtgtgtcccacggaggaagaggcggacgtgctcaggtgtgtcctgtggggtggggggaggtgggcacgctcatgygtgtcccccaggaaggaagtggacatgctcaggcgtgtcccccagcggggaggtgcgcacgctcaggtgtgccctttccagaggaggggagtgcgggagacacgtccaccggcagcctcctgtccccctctccaggccgtgaccttctctgtgtgctcccccgtgggtggctggagtaaagtcttgctcctctgctgccttcctggaagggcttttctttgtaagtcccatcccatccacctaggttcctctctgcagggacactcgtctctgctggtgtggccctttcttcagcagcacttctccagccagcactgacagcaggggtctctcagtgtccctgacgctcagaagggagcaggtcctccatcagggggcggcgctggagccgggtctgcagccgcaggggctgcatggcagtgctgtgccgagatggctgcacgggagtgtggctcagagcagagcccaggcagtgcagcagccaggcgtgtccagcagcccttgggctccgcttcagacatgctgccagctctctgccactgcactgtcctaggccaccctcaccccagctcctgcttgcacacggcgcccctagagcagggtctgcaggccgggctgcttttctagagctctctgcctctccccygccttgtggacccatcagggtcctcaggcaagaggtttccaggcagatgcaggtggagctccggsstccgctttggtgcctgtgttggcgctrccccatccagtgcggattgaaagtggctgtggggcaacccgagtatcctgccagaatccaatgtgggaggcggtggctgtgggcacagggtggggtggcaggaggcccatggctttcctgcattggccactcctctgctctgagtgtctgcagcaggccaggccctgggcatccagggtttctcctggtcatcagaggaactgagaacaggggactgagacagctccaggggacatcaaatggccctgcagtgagatgggggtggyagtggggagagagcacccttcctaggccacacagctttggtgtgtgkgcccctggaccccccgcggcagcagcctctgcttcgtccgtcacacccactccctggggttccagttttcacctgtggatggcccctctttctcagggttgccgagagtaaagcaggaaaagggctgcctttagtgtggccccggcccaggaagtgctctgcacatggcagctatgatgccttctagattcgatgttcctccagcgtctctgaagcattcctcatgcatgggctgtgccttacacatcgccctctctgggatctgccggagtctgagcggtttcatttacatctgctcagccgttcaagtgttcagatactgagtgtgtgccgtggcgtccttagggccgagcatggaggctgatggagtggtgagtgggccccgacgcgctctccgtcttcatatgcgtctccatgtctcggggacctgggggccattcttcacctagaggctctgtcgttacagcctgtgaggtgcacgtggtcctgtgacagtggatgtctccccctggaagtgcgtctgcgtgtggtcttcgggttgatggggttgggggctgtgtgtgagtgtgggtgtggggtgggggaagctggagaccgggcaggtgccatggtgagcatgcagtctctttcctagcagcartgggaggcactagaggctttaaagtggaagaatgtgactggagaaagcactggctgccaggcctggggaggggaaggagagtggcagaggggccgtccccaccacctgctcaccaagcattggtgctgggagcccctccgaagccrgagttggcttttcctttgcagagatgagcaaaatatgcctcccacacacaccctgacttgcaagagcagccccacctggggagaaagacccttgccacacagagcagcgggcctggaggcctcggagagggggtagtgtgtagtgagacagaaggaatggcccagaagggcagcccaggcaggtcaggagctcaccaaggccaaggctggatgacgtgccagacaggcttcaatgtgtgtctgcagtgagagggggagctgggaccagcagcagaggccacaccttgtcatcatggagaaagggcctctggaggcacgcgggcgcagggggagaggccgtgcacagcagcgcatcgggaaggtctgggctggtgtggctggtgcctgaccctgcaaggtcctgaatgccacgcgaggcagggtggtctccaccgttgtcctccagtccccaggagccacgtgggaggtggtggagtaggttcttaaatctggggagttgcagctgtggcttccagcatctgtgaaggtttcaggaaggtcagcgtgtcccggcccgtggctgcccacgcaggagcctgcgtcacgctgcacagctccccgctctctgagatggcactctgctttctgctgggccttttggcacctagaacctctcgttctgcagttgatgggagcatggccaggcgtgtgtcagatttgtgtgggctggcatgcttggggtttattcatttttacaatttaagaaaaggcctttatcattgatatcttttacatcaaggtcaaagcttctcgtccccaccattttgtttggagcccttcagcctgccactgcactgtgggagcccctctctgggctggccgaggccggagccggctccctctgcttgcggggaggtgtggagggagaggcgcaggcaggaactggggttgcgtgcgtggtgctcacaggccagtgcgagttctgggtgggcgtgggcttggcaggccccacactccgagcagctggccagcgttgccggccccgggcagtgaggggcttagcacctgggccagcagctgcggagggtgcactgggtcccccagcactgctggcccatctgcgctgcagtcgaattctcactgggcctcagccgcctccccgtggggcagcgcttgggacctgcagcccgccatgcctgagcccacacccacccccagccgtgggctcccacgcagcccagcctccccgacggcgcggccccctgctctgcggcgcctggtcctattgaccacccaagggctgaggagtgcaggcgtgtgacgtgggactggcaggcagctctgcccccagcccggcgtgggatccactgtcggaagccagctgggctcctgagtccggtggggacttggagaaattttatgtctagatagaggattgtaaatgcaccaatcagcaatctgtgtctagctaaaggtttgtaaacgcaccagtcagtgctctgtgtctaggtaatctggtggggacttggagagcttttatgtctagctaaaggattgtaaatacaccaatcagcaccctgtgtctagctcaaggttcgtaaattcaccagtcagcactctgtgtctacctcaaggtttgtaaatgcaccaatcagcactctgtgtctagctaaaggtttgtaaacgcaccagtcagcaccgtgtcaaaacagaccaatcagctttctgtaaaatgggccaatcagcaggagtgggtggagccagataagggaataaaagcaggctgccagagctagcagcggcaacccgctggggtccccttccacgctgtgggagctttgttctttcactcttcgcagtaaatcttgctgctgctcactctttgggtccgcactgctttatgagatgtagcactcaccacgaaggtctgcagcttcactcctgaggccggcaagaccacgaacccactgggaggaacgaacaactccagacgtgctgccttaagagctgtaacactcaccatgaaggtctgcagcttcactcctgaagccagcaagaccacgaacccaccagaagaaagaaactccaaacatgtccgaacatcggaaggaacaaactccagacacaccatctttaagaactgtaacactcaccatgagggtccacggtttcattcttgaagtcagtgagaccaagaacccaccaatctcggacacaggaggaccagggatggtcctcacacacacatgcacagccacacatgtgtgcctgctcttgcccagatgcacactcacattttcacatccatttatttgttgtatgtgaatgacatgtatcacatagcatcgtttttcaacactgaagctagagagagcgtcggtggggatttttaagaggcagcagctgaggagccctttcagccagaacaaatctgagcccgtcctctctgctgtcaaatagcagctctagcaaatcctaaatgttgcctgtagattcagcaactggttagacgcttgctaattccagaggcttgcctatctgtgccagtgcctgctagtcacactcggaccctcgcttcccggccgtgtgatgtcttctgggtcccgggaggtgctgggggccctggagacgccggcctgcctcaggggacgagaggtgacccatgaccccactcacccgaggtccccactcttcaggacactctgtgatctccactcacaccccagggacccagtgcccaggcccacgtcctttccagagggccaggtgctagacttttaatgttcttttgtagaaattatcatctttcatccaacaaatctccattaaacaccgctgctctaagtcccctcatgaaactacatagaggtaactggaaagacagtccctgcctgccaagcttctagggcagtgggttgatctttgagctcaccgtgcccagcccaggccgccagggagagttcagcctgggaaagtggaactggttttccctggttctgtcctgttctgcagccgctcctgctgcccaccgtggagaacctgctggctgggccgggtctggagtacaagtgattggtcccattggaagggcagctgtggctggaaagaggtcaccctcagatgctatggtcccaggtgggaaggcgtggccccgagggggcctggtgatggactgcccagcccatctggggatcaggagcccagggcaggacctggggagcctttgtggcctcattctccctcccccgagcagcttcaggagcaggctgaggcagccaggtcaacagggtgaaggctggtgagctgcctccacctggctgggcagcactgtcagcaggcccgtgaccaccagagctgtccccagcccactgcctggctgccggtagcgacagcggcccctgcgcctgggctctgcaggtggtgccggtgaccacagccagtgaaggcaggtgcgctccccaggtccggcctgcagcttgggtcctcagggccctgcctgcctgggtcctgtaccccggacctgcttctttctctccgaaagcctgcccacctcccctggtcccctggtccccagcatcctcaggttacccgaacactctggccggggcctgctctgtgcgctgcattgggcactccaggcctttccttctggcgtctcacgcccttcygctcttgagagctttcctggctctgttcactgatcatttcctctcctctgttttctgtgtcttctttctgaaactgttacttggatgttggattttcgaatagttttctctctcttaaatctttttgatcctattttccttatttttgtcctaccttctgtattttctcagctttgttaacctgttcttattttatttgttgctatactcttcgtttcctgagagtctgtttctgttctctgaggattcttttatgtataaagcatcctgtcagtgttcatgagtgcagtggggtcactgtgtctttgatgttaataatagtgctttttggagttttcttctcctagtgaaccctgttctctgttgctctaagttgctgtttttctgccagtgttggaccttactcttttctttctggatgatttccttaagcgtttggtggtcccagctgcctgtgccagggtgggtttgccctgtgcttctccgaggaatccggctgggtcttccactggggagcccttgggaggggcctctgatctttcctctccagcctgggtgactctggcktgggggcctgtgctgccagctcctgggggctgagcagggaagtgtgtcgccaatgcaggactcctcttgcggtggggcaccctgtccgtgccttacctaagggcctgtctcagcccggagatcttatgcaggatgtgcagagtgacatgcaggctcctgcccttcactcccagaagcagaagccagcagagtgccctgtccccgcccagcagcatcagcgtggcccctcggggagcgcgtctcctgccccagccttcagcagccggcactgctcctgtgtctgtgctgggcagggtcagcagggctgatggcagggaccttggtgccattcagcagaggcaggcccagctctggctctctggtccagtagtgttgccatgcccaacagggatcggagcctacacctcacccagcaccgaggcagagcaggatgtggaggggggtcttcaacccccaggaccccatgtcagaggctcagcagggccttccccacaccctgcagcagggaggctgccgctgcccttcatgcctcctgtccgtggtggtggcgagacaggcaggggcccagctcgcacccccctgtctgtggtcctcgtgtgtggggtacacattcccgctctaggggctgagctcgtacccagctgtctgcggccctcgtgagcaggtacacrttccccactgtaggggcccagctcgcatccacccktccgtggccctcgtgagtggggtacgcatccccactctaggggcccagttcacacctgcctgtctgtcgcccttgtgagcaggtgcacgtccgcactccgcgtgtaccaggatggtgtcygccaggtctgtgcggtggcagaactcccactctgcccccaggtctggcactcctagatgtacacaagccaaataacagttagaaaacccaggacgcagaagtgtctgggatgaacagagaatcgggcagatctacatttacagttgagaactcacacctcagcctccacgactgacggaactgagtgtcctcatcagcccgcaggacctaatcagtgtctgtggaacaccctgtccgagagcagaggactcttgcctctgcattcacctgggacagtcacaacagatcacatcacgggtcatcaaagagaccccagtaaattcgaaagaatcgaattcactcagactgtgtgctctgagtgtaatgaacccaaactagatgtcagtaacagaagaacaacagggaagtctctaagcattaggagattagcaacacatgtctgcattgcccgtgtgggggaggaggtctcccggtacaaataagtacactgggcaataatggaaatacacacatctaagtaagtggggtccagctagaccggtgctgagaaggaagtacgtcatgctcagtgttcacgttgagaaagaggaatggtctcttaatttatgttcctatctcaataacctggagaaaggagagtggaatagcccagagcaagcatggatgaaggaaataacatgagcaaaaagcaatgaaattaaaaaaaaaatagagaaaattattaaaacaataagttctggcttttttggaaaaaaaaattcaataaaattgacaaatctctagcaaatttgacaaaaataaaaagacaccaccaaaatcatcaatatcagcaatgaaataggggccatcactacaggccctgtagccattaagcagagggtgttatgccacaaacaacttgaagcagcggactcactcctcagaacccacaagccaccagactcgaccaagatgaaataggttatctgaataatcttgtaaactatttttttaaaaaaaattgaagtcataaagatgcgaaggatatccctaggcccaaatggtttccctagagaaatctaccaaacagttaataattaagatcaatttgacacagaaaattgaagagattgctagggtttaggcacgggggtgcatgtgtgtacaaaaggacagcggggcgagccttccggtgtcaggacaggcctgtgtctggatggcagttgtgggcgcacacatccacacatatgacagatcacgtgggagtagacatggagggaagtgtctgtgagctggcggcaggcgagcagtctctggattgtacccatgttagttgtcccgtttttgatattgctgtttaagttgttaccatcgagggagattgggtaaagaggacacggacctccttgtacgtttcccacaaattgctgtgaatctgtgatgaggtcttcattctgttttaaaggtctccagccagccctgcagttccagcgctccctcctccctgcttccggaaattgttgctggggtgggtatccctgaacctggggagcttgtggtgtcaaagcttcttggctgttccattgctggcgtgggattcagcttttctggggtcgtttgccactcatctgtctggaagctttccagcttccattttaaaggctatttgatgctgtgccttcttttctttgtcttcaggtaaatgcctcaaaaaaagtaagcaaaacctttacccttgttttaccgggattttgagagagattacacttaagtgcacgtgttcaagctaccgtctttaactgaagtctttgatgatttttccgtttatataatatatattttaagtgaaacacacatcatttgcatcctgtttctccactatatattataacataaacacttccccatgtttttataggtttttgtaagtcttaatgtatagttgattaaccccttttggagcttgagtggtttcgcgttttcacctagtgagaatgaaggtgaactgttggccatgttttgacttctgtgcgagagaattctgtgtgtctggaaagaccaactgtagcctgtaggagcctggctgcactgagaaatcccatcgcttgtgtttcttactggtgacggcaacagcccccagcagcagcggtggccatgattgcagtgagaggcaagtgatgtttgtgcggggctcactgtgggcccygcatggcactgcgtgcatctccacgttgatcgagttctaactgcgggcctgagacggggtttaaggatattcactgtattgaggtggaactcgcacaccgaagggctggctgtgggccccgggtggcactgcatgcatctccacactactgaattctaactgcaggcctgagaaggagtttaaggatatctactgtattagcgcaactcgcacacaatggaagggattcatttaaacctgagttcatggtcggcgagtaccaagggcgggcggtggtacccttatccggggagcaggtcatagaggctacattatcttcagagttttaaaacaataagtaaataaaagtggatgcacttcttaccaccacatgcctgcagttctaaagaatgccagcaatgatctacaattctaccaccattcccccaccagatgccaccgtcacgtctcaatagatgtatgcacaagcatgcagccaccacagtaagatataggacacagcccagcaggtgtttaaattttttacttttaaaattatataataggctgggcatggtggctcacgccttttatctcagcactttgaaagaccaaggccggcagatcacctgaggtcaggagattgagaccagcctggccaacatagcgaaaccccgtctctactaaaaatggaaaacttagctgggcgtggtggcgcgtgcctgtaattccagctacttgggaggttgagacacgaggatcacttgaacctgggaggtggaggttgcagtgagccgagatcgtgccactgcactccaacctgggtaacagagtgagactgtctcaaaaaaaaaaaaaaaaaaaaaagtaaaaattaaaattatatagtaaaattaacttttttcttataggatacagctctatgaactctaatcaccctgtaatcagagtgcaaaataacatcaacccttcaggaatcctccatggtccccctttccattcacccagccacacagggacctcccggcagctgcacatgtctgctcaactctgcggctcggctttttccagcccagtcctacaacatgcagtcttttgagactggctcctttcattcagcacaacgccctcgagcgagatccatccaggttgtttgtgtataaaagtcagttcctttttcacttaggtagctttctcataaattttgaggtcaggagctatgagtctccctggtggtggttctttttcagggggtttgactccgctgacgggtaaacagtgggcagtcttcttctccctgacacagatggctttacatttacttaggttttcttccatttcttttagcaatgtttggcagtttttagggtacaaatcttatgcctccttgggtaaatgtattgcagagtgttttgttctttttgatgctgttatgaatggaattgttttcttgatttccttgtcagattgcttgttcctaatacagggaaatacaactgatcttttgtgtgttgactttgtattttgcaactttgctgattttgtttattgactagaacaggttatttgcagcttctttagggttttctgtagcctggcatctgcaaagagagagaagtagtttcactttttcttttccaatttggatacaatttatttctttttcttgactaattgttctggctatgttgaatagaagcagcaaaagcagacattcttgtcttgttcctgatttaggggaaaagcttttagcctttcaccattgagattgacataagctataggttttttgttttatttatttatttattatttttgaggtggagtttcgctctgtcacccaggctggagtgtagtggcaccatcttggctcactgcaacctctgcctcccgggttcaagtgaatcctgcctcagcctcccgagtagctgtgattacaatcatgtgccaccatgcctggctaatttttgtatttttaatacagatggggtttcatcacgttggccaggctggtcttaaactgctgacctcaggtgatccactcacctcggcctcccaaagtgctgggattacaggcgggagccaccacacctggccaacagtcgattttttgaaaagatggaattgccacactgtttaccagattcaataggcaagttgcggaaattggacggagagttctcataccctcttcacccggtttctctcgctgttgacatctcacgctgccatggtgctcgtcaccggcgtgtgactctgggcctgtctccagcccttgtttggatccaccaggctttcctgcatgttgcagccagggcaccgtgttgattttagtcgtcacatctcttctgccgctggtcggtgacagttttgtctttcctcgcttctcctgacctcagtatgtttaggagtccctagaacgcccccgaagcgagcttgtgtgatgtgtttcattgttaacctgagatggtggtttttggaaggaagatcacagacgacaagtcctttctcaccacgtcccatcagggagcccctgacatccacgcaacagcaggtggacctgaccgctggactgaggcgttgacagcggacctgactgccggactgaggcgtggacagtggacctgaccgctggactgaggcgttgatggtggacatgaccgctggcattgacggtggacctgaccgccggactgaggcatggacagtggacctgaccgctggactgaggcattgatggtggacatgactgctggcgttgacggtggacctgatcgccggactgaggcatggacagtggacctgaccgctggactgaggcattgacagtggacctgaccactggactgaggtgtggacggttgacctgaccaccagactgaggcgttgacagtggacctgaccgctggactgaggcgttgatgtggacaagaccgctggtgttgacggtggacctgaccgccggactgaggcgtcgacggyggacctgaccgccggattgaggcgtgctctgccgggtgcctcgtccgcgaagctgtttgcactttctccagtctcttccttggaagcgaatccctcagggcacaggcgacgctccccctctggagggatgagttctacatgtatgatgtggagttctgtgagggaggtgtctcctcttccccatttattcacttcttcatttattaccagcagtgtggactggagggagtttgccacgtgctctgtgttctgatctggtgcacgcaccaggacttgtttattaccagcagtgtggactggagggagtttcccgcgtgctctgtgttctgatctggtgcacgcaccggaacttgtttattgccagcagtgtggactggagggtgtttgccgygtgctctgtgttctgatccggtgcatgcagcgggacttgtttcgctgcgtgatctccccgcggccggccgcgccctgctgtgccccgtcattgggttttctgagcccttcctcactctctggcaccacagggtgctccagactcacctcgtgtcctctgccccagctttccaatcatccgttcctccagggagcscggagccttctcttggcagcacagtcctgagcagcccaggtcagggtctgggtatgcctgtggctcctgggacggcactgcttctacaccctcccgccagctgcctttaccgtagtgtttgcgtgctgtaaatatttctgtccttttacttgcagygtacctgtacccgttctttgagtttctgtatacatgatgtcatcgggtcagtttctaaaccatcatggcaatctctgtcttttcattgctaccattttattatttgtttgtgtgtctcctccatttttgtttttccttttyatgcttcctgctttctgttgagttacttgaatggtttttagtatttcattttaatttagcagatgggcatctgactatttctcagtctgatgttttgagtgtttgctctgggaattagagtacttatcactgcctactgagaatcagcctcatcccacttgaagtcacacctggaagcccctcccggcaggtcccttgccctctcccttcctgctgtccctctacctacatggaaatgccacaggttttgttttcagtcatacagtgttttgaaaagggcagtaagagacccgggtattatctgtaagcccagatagctgccatctgttcctccttcattgtcgaygctccaggtatccttcatgtcctctttccttctgaaggatttccggcagcctctcctggagagcaggtggctacgattcctcacggtttccctcgggtgggtccgtctttattcctctcgtgttcctgaaggagctctgccctgcgcacgcagcgcggcccgcggccctcgcctcccagcacgccacgattgcggcgttcctcctcctcaccgcggttcctgcctggggagagatttgcagacgctcgartcgctgttccctttgaggtcacacagtttttttctgttttcaccattttttttgccttcagttttcagcagtttcgtttggatgtgtctgggtgtggatttctttgggtttattctgtttggagtttgctcagcttcttgaatctctarggattttttttktttttttttttttttgccaagtttgggatatttcagccatttatttccttaaatactttttcagcaattcacttttctgtgaatttgctgagacctttgggtttccgtgtgctgtgagagcgtgcacactcgtctgcatgggccgtcttgtggcccctctccgccgcacttcccagataacccagccccatctcctcagccccggcagctggaactgcctctctccaggctgacttgaaatctctgtggttcttcatgtgccgagtaatttggggttatgtcctgagcattgtgagaagaggttttgtgtttaagtcctgtgagaaatgagagtgttttagtttagcagtgagccgacctgggtggtttctagcccaggtcccagcgaccttctgtggggcgcggttcccatcccagttcaggttgtgaagccttggcagcgctcctggccttggcctgggacrttggcagtgcctgtcagcttagctatcatcagcttcagaggccagtgtggatgggacccaggcacaggccaacccagggacgccctcagctctcaccggcttcagatgccagtgtggatgggacccaggcatgggccgacccagggatgccccccaactctccaggactacgcttttcagtccttccattctgtgatcttcgggtcctttcacgtttctgggtctcccctttgtggtcctccagggacgtggggctctcttcgcaccgtctgttgcactttgctggtgtcatggaggttgggcccacgcccggccctgcaggagggaggacagggaggaaaacgcagctagagtttgtcctgcccatctggaacgacagcagcttcagacagagagcacggctcctgcctcaggctccctgccgccactgcagccctgtgggctgagcccgtggtagtgtgcgaagagcagaggcaggggccacgggggccggggagtccatactccgagcagggagggtcccacgctcctgaagctcagtggctttcttttccggcccccaggtgagtgctggaggacttcgccttsagctcctggtacagcagcctcaccacygcctggatggtggcacgaggttgaggtcaggggatgcgagagaagagccacgatgttccctacccaccagtgcggtgggccttccagagccgggcacgtgtccaggcattgtagccctgtctgtgggagaggaagggcaggcgtgggcacccgtcacactgccatgtctgcgcggctttgtcacgtgctctctttatgacaaacaagcctggaggggcgaggtgctccgtgtcaggacacgcagcgagtgttgggttaagctgggccccacccacccttgtgtgaccatctccagggctgggggtcctacgtaccccactcgccagcctctctggtggggttcccacacccgttgttcaagggaaatggtcatcaatgcctgctgtgagccagacaccatgatcagggctggaaacgtggagctagccatttgatgaaggggacagagaagtaaaatgtgaagtgtggtggtcaaggcccactggggaggggctggcgggcagtgcaggggtctgggacccgtgggaggctggcctgggtgaggggcttcctggactggatgctgtctgcccgttgggcctcgggtctccctactgtcccctctccaggccccaggagcctcacctgcggcacccaggcctcccgcccccattatgcatcttttagttcagcaaaaacaactaatcatttttcttgcaaaagtttcccccgtgtgtgatgggtttgttataagcaagaacccggctaccctccacctgctttccacgcacacgctcggagacaggcacctgctttgattggcgtcatcttctcgaggaaagatctaggctggcagctaatttatgtagcgctcctcgtgtttaaaaaagttgcagtaagtcaatttcaagaagcttatgccagaactgattgctttgagccatttgaaggcaaaccagaattctgagcttttgagcaccatccccccaacttgtttattcgtttgttctctttctcgctctctgtgcggtagcagtttgtctgaaaggagggcagcagaagaaagcgcaccccttcggtgcacaaatgagcccgcatgtgggcttgctgtctggcggcgagggtgggtcacgcaggtcattctgttaacatggctgcagctacacgcgtgcgctcattccaattcagcccttgaaagcattttgctcccaagccttcagaatccataatatcattttaaaaggggccttttcatccagcgtctccctaagtcaagaagcccctgcagaaggcagcttctcggagatggccttggaggcccccaccatgtcgtcactcatcaccttgggcaggttcactcccctatgaagccctgggaggcgagggtcaggaacacccaccctgggccctcggccaggccccttaccrgctctgtgatcaggggcctctcagatggctttctgagcctcagtctcccctttactcaggcaccaggacttccctgctagattgatgtgaagactgagggggttgtttgtaaagccacagcacttgcggggctcccaaaacctctccaggaggcatcagctggtgccggaggtgtgtgctaggtctcacactgcacggccaccctgccgagagacggtgacactgggctgtgctcagatgtctcccctgccggcgctccctgcctcaagaggagcgaagcattgttgctgcagaaataccttctaggcccatgctcaggatgttggtgtgagtgggagtgccccagacacccagggagggcagcgcacggcgtctgctgggatgacagagacgcttgcccctggccagcagcctcgcctccggaagcatgtcctgcaggtgcgccgtacaagcaggaagcagatgtcagaggtcattcactacagtatggtttttacagctttcctgaggtataactggtgtgcagtaagctgcgcgatgtcaagtgcagtgtggtgaatttgcatgtacacacacatacacccatggagccgttaccacattcatattcaagacccccagacatgtgctcttgtttgacaggaatccctcctccctgcctcctctccccaccccaaacccgccgacgtgctttccatcactgtagattggcgggcggctgtcgagtcttctgggcatggcgttggtcctggagcatgtggtctccctctttttgcttcttccacgcagcatggctggttgggggagagatcactgtgcacacagctgtgttgtcttcactgctgagttgtgttctgtcgtatggagacaccagtttatacgttcccttgcgatggacatttggagtttttctggtttttggctattctgaaactgctggatattataaataaagtcccatgtagaaatcgacttcgttttctttcaggtaracgcctagtgtggagtggctggcggtcacgtgtgtaacgtgttccgaggttgcccgtcttccagagtagttggtgtgcagcttctcctcaccagcatgcagcacagtctttttccttagtccctcttttatttttttaaatgtttcttttacagacagggtcttgctctgttgcccaggctggagtgcagtggtgggatcatagctgcctgcagcctctgactcctgggctcaagtgatcctcccaccccagcctcctgagtagctgggactacaggtgtgcaccaccacacccggctagttttttaaaggttttcatttaggctttctaataggttggcagtcatgtctcactgtggccttttattttttatttcacaaatgactaatgatgttgaacatcttttcattcagctcacttgtcatctgtagatcttctttggtaaagcacctgtttttttgtccattttaaaatttgattatttttcttactgttgagtttgggagagctctttatatgttctggatacaaggcctttatcagattatttgctttccaaatattttctcccagtctgtgtcttgtcttttcgttctttcatcaggtattttgaagagaagtttttttatgataaagyccaatttttcaatgttttctgttatatatgatcctttggatattagtccattttcatgctgctgataaagacatacccggactgagtaatttataaagaaaaagagattgaatggactcacagttctacatggctggggaggcctcacaatcatggcagcaggcaaaaggcacatcttacatggtggcagacaagagagaatgagagccaagccaaaggggaaaccccttataaaatcagatcttgtgagacttattcacgaccacgagaatggtatgtgggaaaccatccctgtgattcattatctcccaccgtgtscttcccacaatasatgagaatggtatgggggaaaccgccctatgattcattatctcccaccacatcactcccacaacacgtgagaacggtatgggggaaaccgccctgtgattcattatctcccaccacaggcctcccacaacacacgagaatggtatgggggaaaccaccctgtgattcattatctcccaccacgtccctgccacaacacacgagaatggtatgggggaaaccgccctgtgattcattatctcccaccatgtccctcccacaacacacgagaatggtatgggggaaaccgccctgtgattcattatatcccaccatgtccctcccacaacacacgagaatggtatgggggaaactgccctctgattcattatctcccaccatatccctcccgcaacacatggggattatgggagctacaattcaagatgagatttgggtggggacacagccaaaccctatcaggtatcatagctaagaaatctttggctgtcccaaattyacaagattttctcctgtattttcttttaataactttgtaacttttggttcaggattgagcaggattttcatttattgtacaagattttaattctttatttcccccaagaacacccagttgttccagaaccatttgttgaagagtttgtcctttctacgctgaattgccttcatatatttttcaaaaattggttgtgtttgtgctcctatttctggactctgttttgtttgatcggtctgtctgtcttgcagaccagtactgcactgttgtgattactacggctttaacgtagttggtgaaattaggtagcccctcctttttcattgtcaatgttgttttctctattctaggtccattacatctccatatgaattttagaatcagcttgccaatttgtacaaagaagcctgtgggattttgactgaggttgctgattctgtggattaatttgggggagaagtgcgttcccaacacccagagtctcccagcctgtggacaaggcctctctctctccctgtgtggaggttgccctggagctctcttcacagtgctcggagcttgtcaygtgcaggtttttcttggcctgttccgttccatctctgtgtatttcatggtgttggatgcttttgtcagtagtattttccagatgactttctggtgctgattgctagtttaattccatgatggtcctataacatagttagaattatgaaattcctaaatagactgagccttcttttatggtttagcatgaggtcttcttggtacatagttcaagtgctcctgaaaagactgggtctcctgctcttaagagtcgaagcatttatccaggtgaaataggtcaagttggctgatcatgtggtccttgtcctcctgatwttttgcccgttgttctatcagctattgagagagggatactgaagtctcagattgtcattgaggaccygtctatttctccctgcatttctggctggttttgcttcatttgttttgcagctcttttattagcacacacatgtttaggattattattttcctttgattaatcaatctctttattattataagttaccttcttggtaataatatgtgctctgaaatttactatttctggtattagtagcgtctctggctttctcttgctggttttcttagtgatggcatgttatgtctttttgcatctttgtatttaaagtgcattattgtcagcggtgtctgattgggtgttgctttttaatccagtttgagtgtctgccttttaattgtggtagttaggctacttacatctaatttgtttatgatataattagttttgatcttgtcatttgactgttttctactcatctgtctcttcttcatttctgtttccttttttttttttctttttaccttttttcaatccactttggtatttttctgattttgttttatttccttttttggcatcttagctataagtctttgttattttagggcttgctgtagggtatatagtatacatctttaacttaccacagcctaccttcaagtgatattacgtcttctcacacacagtataatcaccttacagccgcagtgttggtttttctcctccagcctttatactgttgtcatacattttatttattctatatattaaatccccaatatattttcattagttttgtttaatctattaatcactttaaaaagttaataatttaaatttttttaagagacctgaatgtaagaaagatcctccctaaatgcagctgctgttccagccctcctggttctccgtgcagatctgggtgtatttgccccgccccgccctygtcctccctcacctgcaggccttacctgacatttctgtagagcaggtcggctgatgatgaattctttaagctttcgtgtctgatctgaaggcatctttatttgcttctgttttgggagatgttttcaccgttaaggtggcggtttttatttctttcgttatttcagaaatttctccctcctcttttctccgttgcactgtttctcatgagaaccccgccttgtgcctctgtaggtaccacctctgcctttaagatggttttccgtgccgtggtcctgagcaggcttgtcctgttgtgctctggggctgccagcgtcttgtttcctgggcctgtgttccttgcgctgcctcgtgtctgttgagctttctacatctgtggctttatcctttccattgaaagtggaactttcttatagtatttgtcccgtcgcttcctctgccttctttcttttggggactctcgttcatgaattttatgcctcatgaagctgtcccacagctcagtgattctcttttcatttttcaggaatcttttcctctctgtgtttgtttgcttatttatttgtttttgagacagggcctcgctctgtcagtgctggagtgcactggggtgatcttggctcactgcagcctccaccacctgggttcaagcgattcttatgcctcagcctcctgaggagctgggactacaggggtgtaccacgacgcccggctaatttttttatttttagtagagaaggggttacgccatgttggccaggctggttttgaactcctggcctcaagcgatccagctgccttggcctcccaaagtgctgggattacaggcgtgagccaccgtgcctggcctctgtgttttgtttttgatagtttctattgctgtgccctcgaggacattaaacttttctcttacggattctaatctgtcattaatcccatccagcatgtttatctgacaggtagtttccacttctacctgtgtctcttccgagtctgaactgttgcatttttccagtagttttaacaactgtctaaatgtccctgtttgccagtgttgccgtctgtgcaaygctgcgtcttggtaggtattcgttgtttggttaatctcttcattataggccgtgtcttcctgctgctttaaatgtctggtaatctttgactggatggcaggcattgtgaattttagcttgttgtgttctagaygtttttgcatttgtatcaatcttcttgatcttttttcagagatgcagttaggtttcttggaaagagttgggtttcctcgggtcttgctgttgtggtgtgctgggacgccctggagcagttctcaggctggaatagctgtccctgctcctgtccctgtgcggtgtcgagtaatctttccatcactacaggccttgacagactttttttatttttaaaccgcatgaatatgttttccattcaaaatattagatctagaaatgaagacaaaactagacagctttttacagtgaactaaaactggccccattccggttgcggccatggaggtttgttttgtattctattcccactgtggagaagggaactcaccatgggtcgcctggaagcgtgcttttgtttctcatctgaattgtgcctctgtggtcccctgtcatcagcttcttccacaccccgcagtagaagtcctttcctgtcttttcctcatttctgaagatgtcccgaggttgctttcctgtccctcagtgtcccctgcactccgccatcacatcaccctctgggagtggctgacggacacggacacactgactcccaggcgtcctgcctcgggctggttccctctgtgcttccagccaaggtgtggtcgacagagactttctccgcacaggctcctccagctgagcaggggccgccacggactcccccatcctgtacttgtgtcgttttccaattttctcttgatgttatcgctggactctgagagcttcacagataygtatttagaaataaagctgtatagctgggtctcctaacctttcacctccttatcacccagagggtgggacttccccagcatggctggcctcggacacctggtcaccgtcttgctgtccttgcaggttgaaggtcgaggagctggaaggcgagcggagtcggctggaggaggaaaagaggatgctggaggcacagctggagcggcgagctctgcaggtgagggcggggcagccyctgggtgaggcactgcctgggcctctcatttctttgggcgtcgtgaacgaccrtggttcctgctgccacagaacacccgttttctggctcgtctgtctgaactctcctccctcccatgtgcacccccttgcctggcagggaggccatgccgctgacaggcctgcactggctgcctctggagtcctctgcggcccgcaccacccacacgcctggtgtcggtggagtgggctctgggcagatttgcactatgcccacccgggatctgctgtggcgaggctggactgctgtttgtgttcttttaattgtactttctctttggttttcatcctcctgagttgctgcatggcaggaagccctcaggttcgaggttaccgggtttttggacaggccattgattttatcttggcacctgttagaggcagatcaaatctattttttatgaccagtttctgacgatgggaggagtgacatctgtggtgatgggcggctccgagccgcgctggcctgtcctcagcctaggacctgtcatcttgttttaactgggccgtggtgtacagggagcggtcacggggctgctgcccgcccaccagaggctctgcgtcagagctgctgaacgtctttctgggtgttgggctgagcagagcctgaaccctgctccttggtgcccacgttgcttgctgactgggggccaggcatccctgcaggcaccacttacggcttccctgctccagcttccagccctttccccaaggtgtcctcagtggccggcccttggagcttgttgaggcttgaatgaggtgaggggtgtgggtgagtgcggtgccagcactggtgaacacctgatggggcctggccaccatccctgttctgcgcagacggcgtgtgctcgggagctcactagcggagcactcctctgtgggagatgccaagggctgtcaggtaccgcggggttggcatgaggagtggggctggcagtgtcacctgtgaccctctcctgagctctgccagggccttggaggggtgggggctctgcccctaggcatgtcctgaagctgctcagagctgaggcgtggtgctgcagtgtggccagtgtggccatttggggagaggacagggctgggcctggtggtcctggggaagcagatgtttatgccgtgatatggtgacctcgagcctagcccaggattcaggagctgttcctccctgggtcagggcaacagggacaactgtgcccggatggcgtgggagaagcaagtgcagagcagtgaagcggggaggccactggggttcggcctgtggagtgttggaaacttccagacagccctccagctgccaccacytctgacaccccctgcgattacacccttagtggggggacgtccarggtggccctggggaaggtgaggcctcacaggccctgtggtggctcaggctgcccctggctctggatgcccagggctgtgccattgaaggaaatactgtaaataggggtccatttccaagataaagtgccttgaaccggcttaggtcaccaaactacagaagaaacaggatgtactaggcccctgcttggatcaccgatgcctgcttgtcggcctcccgctcccccctgccaccccacccccccacccaccttacttgccctcatccaaaccaaagaagtttagtctaagatgraagttatactactctgcaaaatagttcgtttcatctgttcttatcagcctgcccagctacttaggtcataagtcaaataactgaagagcccctgagctgacgaggattgcagtgcattgtgggctgcaacaaaatgcaacaggacaaccctaaaaacacacctatagcccctgcccaacaaccagtaggcaacatccaggaagactgtgaccccagagtactcagcctgtgaggaaccgggggaggggcctgcgcactaggggataaatggcttgttgtcaccgtgctgggtgtgcctgcccaccagacacctaatcttgcaagaccattgaaaatctctcttttggctgggcatggtggctcacgcctgtaatcccagtactttgggaggctgaggcgggtggattgcctgaggtcaggagctcaaggccagcctggccaacatggtgaaaccctgcctctactaaaaatacaaaaattcgctgggcatggtggtgggcacctgtagtctcagctactcaggaggctgaggcaggagaatcgcttgaacccaggaggcagagattgcagtgagccgagatcacgccactgcactccagcctgggtgacagagcgaggccccaggagccggctgccgcccctgcacccactatgcgatgccctctcctctccctsctcccrctccctctggagaagccttcaagttgggccgcttcaaggaagattgattaaaatcagctgcagtctgacttaattgggaacatatgcttggagaggggcttgactagttagaactttttgtaattagttcacagctggttggcgaggaaagagaatttcagttaccccttagagctgggcgcgagtgccgctgccctcccrcggtgctgaggccaggagaccaggcctgggaggtcttcgtgctgccttcctgggagggccgtcactgggccctgctgtggcactggcctttctgggtctccctaagagcccagagctgtccacacactcattagggccgactgggtgcacccttgtgtcgctgaaggggctggaagtgggtgggcggggctcctggactgcaagccctcccatcccgtggtgggggtgggagagctcggggcacccacggacggtggctggccgggcttctggcgccccctctckagatggggaaagtgaggcccacagggagcctgcgtgtgaaggaggaaggagctcagactctccatgttgggaggcagaatgagtcttgaacgtgttgcagtgttctgaagtgaagacagaaatcgggcggaccccgtggaactccagatctggcggcagagggacccccatggctattggtgcagccgcaggagtcaggtcaggtgggcggcacagtccctgaccccacctgcagccacggcctcctgccccacccctgtccccacctcctgagtgtgccctgtgctcttccccaggcctagaactgaggagctggggccccagcgctttgttctcttctggctcccggctgccctctgatgcgccacctcatagctgggacactgggccttgtcagcttggaccccacagcctggggtgggccacagctctgtctcccactggctgcagcctggccttagtgtgctcccaaggatgtggagggcacgggcctttcccgcaggckgtctttggagatctccggtgatggctcctggagggccctgcacatacctggtgaaccaggcctgcatggtggccattcctgttgtctgtcataataccgtcgtccttacctccaagacacttggacgttttccacgtctgtggttctgatgggccacatgcggggatggagggcaccgagctggggcaggacccacagtgaggctggtcggggctcacaggctacggggcaggacacacagtgaggctagtcggggctcacaggccgccctgggtagagaggggcacgtccagtggaggccgcactgggcaggacactgaccttctggctgggcgggcgcatccccacctgacagtcccacccaggagcctccagcttgtgtgtgtgaagtgtgcagcctgggccggcacctgtgccccgtggggcccccgtgtcacccagcagtgatgggagcagcattcagactcaaccctgttgggttttttcagcatttgatgatgaacatttaaagataygttgtgaagctgagggaagtttgcggcgagcgcctggtcacccgccaccaaggctccaccacggatgttccgccgcggggcttcctgacatctctttatccctcgcccagccgccgcgccactttattcttctgacgcgctttaagtaaattgcagacatctgcacgcttcctctaaatgcctcagtgtgcgtgtaattaagtagaattcatctttgggttctgaagcccgtgctccagccgttcctcgatgtggcctcatcatggtgcttgtttgggcaggttggtggtcagggctggtggagcyccccagtgcggctccctccccgccccacctgcctgctcctccctggcgggggcctgggtggggtttgtggccggggccaacctcartgtcccaagtgctgttcaggaaagagaccagacaagagccctgtgacgtttaaataagtgcatctgttttgggaaggagtgggtagaagattgccgggttccctgtgagcagaagctggaagcacacggagaccgttctgctcccgtctgcaccagcaggcaggtggtgyggtacctcacatccctggtccgtgtccctgggaccagggtggggcgggcccgtcacctctcctcagacctcctcaccccctccctgagatgccatccctgtggcccccagatccctggaattctgaagccaccaacgctgcagctgccctgggagagggccgcgtcccctcctggagccacagctgccccctttgtgctggcgtccatgcccaggtgtggtgggctggggtcgtgtccckgtaccggggcctcccggcgggtgctctgagccaacctcctcaggtctggcctctcccgctcgctggactcttagtaacgcatgtggctcatcagtgggaccttcattctgtgttcggctctttctcctgaaccttctaccatgttggacagagtgtggcctctggaccgggacgatgggcctggtgttacccggtggcctcgggaagtgctcctctctgtgccctgagggcctcctttgtgaggcaagggggttggacttttcctgggaggcaggatcacgggagggcagctctgcagggcccatgggactccatgctcaccagcccagccctcccctcccatgcgtgagccaccttcacgcacctcctctgtgccaggcgctgctctaagccagggcacagcgggggccaaggagccacagcccggatgttctgggcccctgttctgtgggagtcatacagcgagctgatggttcagacggatgaggtgcttcccgtccgtgaaaggaagcaggtcattggcacggggccccagggacccacgttaggtcctggcgggaccaagggctcctggtttcctcccgtggctcgtggaaggacaggagaagcgcccactccggaccgggccgccggggaggctgagtcggccgcagtcctcggagcagcatcgtgttttctatgatggtgctcgttttctttccatgagatctcactgctccacagattcccggcagccgatgctgtgtgtgggaaaccaggaatgttctgcccacgagggctgaaggtgccggtgaagttgggcgtctgttttaatcggagcttcctggcagcctagggagaaaggaaagtgtgatcacttaggtaattcctgccatgggagtttgcagactaagcctgagattctagaagaaatgtcaccgatgggggcttggccatggtgctgccactgatggaagagtggctttgtttcaccacactgaccagcaagtccaccgctgcgtacatgcccagaagaaccaaaagcagggactcatggatacgggcacccacgttcacagcagcctcgctcacggtagcccagaggtgagcgcaccccagcgtctgtggacagatgcatggatggacacagtgtggtccttccatatggtggagcatgatagatacagcctcaaggaggaggcgcgtcccgacacctgccgcagcatggatggacctgaggacgctgagctgggtgaaaccggccagtcccagaaggacacaggctatgtgattccacctacacgaggcccctagagtcatcagatccatagacaggaggtggagaggccggtgccaggggctggggctggggcaggggaatggagagtgagtgttgatggatgtgggctttagcctggagagatgaggaagctctgggaatgggctgtggtggtggccgcacagcactgagagtgtgctgaatgccagggagctgtgcacttagaatggttatggcggtcagcttcctgtcacgtgcgtttcaccacagtgagacccagcaggcagcttgttaggagtgagccacaccccggacgggaggggcagggcgcttggggtgactactccaaccctgccctcacacggcctctgtccttcggtcactcctgccttcctcaggcccttcatccaccagctggtcctgcacctgctgcctgagcccctgaggcctcctgccagctctggctgagcctcaggcaggatggtttaggcgctggctgttgtttgtgccctgtagtggggagactgggatagcagaggctgtccagggctcctgctcatccgccagtctggcagggacccagttcacttcctcggcaggccaggggagcagcctcccgggtgaagcccacgtgtctgggaaggaggaggaggacctgtggttgcagcgggaccaggacagtgctggtcccccgcctcctcctcccaggaagcatgggcttcgtgcccagggtgggtggccagtgggtgccctgtgcactgaccacactgccgtggtgggagctcaggtagatgcctcgtctgcagatggggcaggcgatgtgctgtgagctgaacgaggagcacgggtggcagagccaggacccaccgcggtgctcactgggctctgcccgctcatcccccacttgcccacgtgtgctgctccccccatgctgagctttgccaacggccccactagagcaccctccccctgtgggcctgcagctgctcacagaggcagcagagggtggcgaagggcctgggtgcaggggaggaggtgagagctgcagctgggggcagacattgaggggctcccgtgyggggtcgactggcgctcagagccaggcctcagcccaagtcactgttgtccaacccttctgacgattggggtttttatcttctccctccaaattgtttacaagtcgccctccgcagattaccttctgaaggactcgggtggaagtcagcgggtgattaccagcaccgggtaattggctgtgctgagagtccttcatctgctgatgaggcctgaggtcaggggagctttcatgagggcttgcgggcctcgaggtggcgcgggacgtgcaggagggcggcagagccactggacggacggacagacggatggtgtgagtgtgcccgagttctcacttccctatcacatggtgaccattctcgccsctgggtgacatgagactgaggtcagggtgctggggactggcccagagtcacacagttgtggctggtggaactgggacccagctcgggctctgccagacccctgcgtctgctgcctgggcaggcatgggcatgcacgcctggcccacgagcccttgtcctttgtcctagagatcgtctagtagtctctgctgtcccctcaagtagagatgtgcccagggacccactgctgagcacctcgatctcccccagcctgtccctgctgctgccacttggactgaagccatgtcttgcacttggggtagaaaaccaaactcaaaggtgggacctggggggtccgggctcctcaaagctgatatccctgagcatgtctgcagcctcttggaggcccggggcctcctctgggaagcaagggccgtggccctgtctgcaagtgccccgcacggggtgccagtccccgcggctcttggacatggcacgatggaggtctccccaagcagccgctgctgcaggcactgcgtccaagggaccgatgtcctttggttcctgggcgtatctgcagagaaacggatgagagcagctttttagaggagaagggaagcacagggccctgccggtgcctgtggggtttgaggggaggtggaaagtggctgcggctctcctgggggccaggaagaggcccctccccgccgcctccacttggcaggactctggggaaggggaagcactttgcttctctcatgaggaactgggtttggacctggagcctgcccatggcctggtttgccagatgcccctcggttctcaaggacgtcttgagtcctcagacagggatggagttcaagagggactcagagccgggcgcatgtggcagagggaggagatccacgtctttggtttcactgcgcgggtccccccgggcgatgcttgcgtgcccggcagagctccttagagcctgagaccatgtgcacgtccgttaacccgcccgacctttccatggacttggtaggtcaccatagccaccactctacagacagcagatcgaggctcagagagcaagctagtgcgtgtgcacacactctggaccgcagagtgtcagctctaggggccgtgccccgggcccctcctaggagagccaccctggagcctcaaggagcagggcccgggcagcgttgccccagctgggctgttcctttgctgacaggtccagggaagccccacatggcgtcctggggcagcagctgtstgtccttcctcctggatcctgtgtgtgtktcgggcccagcccctcctgtgttgtacgagtgtctggcctgggtctccctccagagctatgcatctcgtctctgttcagggactgctccaggcaggtggggcagatgtcagccttgctgggtgccatcaggaccatctcctcctcaccacaggcacagcccctggagcccaggagttcagcccagggtgatccggtctcagccttggccagattaggaaggggatgctgtccccgccccgctgaccagtggagactctcacatgccgtcttccctggccacggcaggccgcccgccctttctctgctatggaaccacagaggctgttatcaggggtgtcatgggaggagcccctgayccttgctggaaccaggacaggcatgacccctcccagctccctcctcccctggcctttcacgtggagctgcccagcagggtctcaggccgggaaggccagctccggagctgtgcggtggcctcagcgccgtctcctgggtgccagtgtcccggctccactggtttggcagacgtgctggctcacagggcgtgtcccgctggggaaagctgtggcccctccctcaggccctggtgaaccctcgcttagcctctgggcagggccctgagcggaggctatacagcacacggtcactggggggtggaggggggtcatggggggcgtttgctggggcccatggcgcaggtgggtgggctcacttgcaggctggctttgccgtggacgccttggctgtggggagtttccacttctggtgaagcctggccatggtgcgtgtgctggaggggcctccaggggctctgccctgtgaccccgggccactccctctccccctgcaggtgccccagatgaggcccgggacactcactccccatggtggagcactcagctctgcagaaagggagctctcggggttctgtcctacccccatccagttctcatcctcccaccgctcccgggcactggtcacggacagcagcatggcctctgtccctccttgggcctcagtttctctgtctgcttcaggctgccctctcccatccatgtgcctctacctgcttgggagctgctttcctggaataggtgggacacggccccgcaggcccctcggcgacaggtgtgtataggtgcatccagcccttcagctctcctgctggccctgagtaagttgcccaaggtcaggccgctgctgagggcagggctgggaggtgtgaccctcgcctgggcttgttacagaggcaggttccacaacccagccgtgtgcggcaggcaaggccacgggcaggagatgggaaggccaagcgggcaaggccacgggcaggagatgggaaggccaagcgggcaaggccacgggcaggagatgggaaggccaagcgggcaaggccacgggcaggagatgggaaggccgggcctctgcctgtgcctcttggtgggcctggttctgcaatgccctggcccaacaggcacagcccgagctgcctcgctctcctccgtgagccatttccttcagccrggagaggtattgattgaattttgacgccggacgatctataaatatgcataaggactggtggttatttaactgtgttttccattcccctcttgtcgctgcttccttccagcgctttctctgctctcggcatgcgcgtcaggcacacggggacaggcgcctccctccccaagtattgcctgggccttgctggaggcagcctcctccccagcagggaccttgaggatagggcccctcagaagccatttcctttgcccggggcagccaagggcccatggcacccagctcctgcacgcaccagggcgtgggctcagggctttcctgccctctgctccgggtcttatgagcattttggccggaagggaggtccttaaggtgaaactcaccacactcaccctcacagatgggaagccgaggcccagagaggacggagacctaccagcgagttaggggcggaactcacagtgggaacagagatggagccaacgccagcccccacccagcctcctcctccaggacttgggctgtagacagtcccctgaacacagagagaaacgggccgtcgaggccgaggcctcctggaggcacaggtgtgggcttacaaggcagcccgggagcacccgcaccctctctgggccttgtctctccctgtgcagacccctccaagaccgctttgtctgaaggtggggccctgtcatctccagaaccctaggcccagcctggaggggagcttggacagacagtaggcctgcaagtggccggggacctgccctgcccgtcccagcattctcccgctgcacccgccagccggctcttccgcttaaccgcgctgggtagcagcaccagagcgcctgctcgctctgcaagtgaaagatttctgttgagtcaatgattgcaccatcgcatcaaaggaaggctccaaacttttccttttgagattctcgtcagcgtctcaacagttttctcagctgtgaatcaaacaaggcaacaaattttagcagaagattatagccattttcccctttcttcctggaagctgtcagctaacagccgattccagcaaggttgctccatctcccatctgcttgagttgagtggtgccagcccccaacgatgctcctgcttgctggcacacacagtgctcagcgccctaggtgggtggggtgcacggggccggggcagcactggaggggcttctccccacgcctggagcctcacactgaccccctgggcctgcagctagaggtgggttctgtgagcaggaggcgtcctgccagaatgcacagagggcaggggtggccctgagcggatgggcagatggggcctgggaggaagtgatcttgcctcctgggctgcagagcccaccccacatccgctgcctcctggccccagtgtacaacccgctggcccttcctctgggctggggcttggtgtgtccattgcctcctggccccagtgcagaacccactggcccttcctctgggctggaggcttggtatgtccatggtgggaagtgcttgggtctttgcgtaggaggatcttgaggctgcactggcctgtgcctcatctgggatgcccctggaccacctcctgccctggtggtccctcccccactgcctccagacttctcaggccaccctctgagtcccttggggcccccagccacagccacgccatgcagagccctaaccctggtctgcggcccagcgccgccaccttacccgcacccctgaggggtcgcgtgagtgctgcatgaccgttctcctccagaaagcagcagaatacatgaaagagggctcacagagcactggctgggcccggccccccatggcgtctgcagatggccgctgccctcaccctccttcccttcatctccagggtgggcccagcagcagtggcacctctcccacaccctctgcttctcctgggttgcggctgtgacccaggaagtgagagtgggactctccacgacttggagaagggttccaagccctttcgtgggacctacttgctcttacttcccgcgttactttaaccactctagccacctggtttcagccccaggagcacatccgagtgtagtaagtgttcatcatcatcatgcattcattcagcaaacacatcttccacatggagcctgtgccgggatagtcctcggtgctggggctgtggtggtggacaggagtccctgtcaccgcggagctggacttctggcgtggaggacgcctactgagatgagtgtttaggctgatcggggtgtcccgctggcaacagcagtcacccttggcagccggcctctgctgggcccctgctgagcgggcgccgaggcaccgtgctgcttccctgctctgcagagagagacggaggcctggcccttcgcagcccccatctagcgggagggtctcggtgtccactgtctctcccagtggccgacggcccaggtgaggggctgcccgtacccgtctccctctgcttccggctcccttggtggccactgcactgtgcacttgcaggggctgccaagccacagaagccaggccagccggtcccctgcctgtcagctgctgactcacaggggtctttgtccccatcagctgcagaggtggcctgcaggctccaagaagccaccaaggcagggccctgtgggcacaccctgacgtcacctggtcctgcagactgtggtcactgcacttggtgtctgggcccagctggcaggagtgggagagggccgacggggtggggggtgatggtcaggccactgtgccctagaggctcttccggctgtggaggaggagggtcttgggggcagggatccccttcagcctcacatttcccagcccaagcaggatacaagtaaggacatttccttacggagccccagagtttctccttcaccctggagctccctccaggcagcccctctcagcccttgtcctccccgtggagagctgctcttgaagttgaaatcgtggyacatgcaaaggaagaggctggtttcagccccgcaggctctggcagctgcatccacrcttcctgctgtttctcactccccacccggcccgccatttctaacagctctattgaaatgcgacgcacattccacgtacctcgtccctttgaagggggcagttcagcgacttttatgtccacggctagtgcaaccacygtcacccttcgcagaacgttttgatcccctctcaaggaagcccgaaccctctagttatccatcaccctgctgtctcccgtgccctcaaaccctcagccaccagtcggctactgcstgcctctgtgggtctgtctgttgtgagcatttcctggaaagggagtcccgtggcctgttctgagcatttcctgggagggagtcccgtggcccattaccagcatttcctgggaagggagtcctgtggcctttgtgattggcttttctcacttcccttgttcaaggttcacccatgtggtcataggtgtcagtggtgtattccttcttgtggctgaaacaccccactgtgcacggccgcatcttatatatccagtcatcaactggtggaccttgtgttccttcttgtggctgaaacaccccactgtctgcacggccacatcttacatatccagtcatcgcctgatggacatctggatggtttccgctttggggctgttatgaacacagctgccctgaacattcacggacgagtctgtgtagatgtgtgtgcagttctctcgggggtctgcctgggactgggcctgctggatcacatggtaaccgtttcaccattggaggaactgccagactgttctccagggctgccgcacacyagggttccagtttatccccatcctcaccaacgtgttgttgcgtgacttcccagccgtcctgggggygcaaagtgatacctggctgtgatttcactttctgtctctggatgccggatgatgccgagcagcttttcatgtgtctattgaactcatagaagtctgtcttcagatgccttgcccattgtgacactgggtcctcataggagtctgtctgcagacgccttgcctattgtgacactgggtcgtttgctgacagtgcttcatgtgttgaggtgtaagttcttcgggtatagatttgcagacattttctcccattctgtggcttgtttttgcctgtcactggcgtcctttgaagcacaagagttcttagtttggatgaagtctgattacctgttattttcttttgttctttgtgctttgggctaagaattctttgttaaatccaaggttaggagggtttcctcctctgttttcttccacaggttttacggttgggctttgcgtgggtcttggatccattgttacttagtttttgtttatggtgggaggtggggcccagcttcattctttggcatgcgccagcccattgtcccagcagcatttgttgaaaagactatttttccctatcgaaaggtcttaacacctttctcagaatcacttaacatgaacgtgtggttggttcctggactctccactgtgttgttggtctgtacgtcggtcctcatgcccacaccacaccatcctgattgcagtggctttgtagtaagttttgaaatcaggagactgagtcttcctcccgtgttccccctttgcaagcctgtggtggctcttctgagcccctgcagttccgtgtgagtttcagaatcagcttatcagttcttcagggaggccggctgagtcctgggattgtacagaatgtgcagatcagccctgggagtctctggtcccgacagcgccgggtcttctgatccgagacatgggatgtttcctaatcacctagatcccgcctagtttcctcccatgctgttttgctgcctgtgtgtttgaaatggctcctcttggtggggtgggtgcaggagtggtgctgtttgtataggacacagggccgtcctcccatcccgacactcggctgccctggagacgggcctcagcacagggctcccattacccctgcacttccagcacctgctgaaatgtgtggcgcgcgggctccgaggcatggaatggtgtgcctgactctgcgctgcccaggctgtggtcacagcagcaggctggaagtttggctgtcgcccccagccaccttggggcacggtcctgtctcacctggagcagaggtcctgggcccccaggggctcaggcgtggcctccttctggaggggccgggaatgtcccctccacgtgctgagtgttggcccaggaggctcctctgtgggatgccagctgctcccaccatgagtggcagctccacccctgtattcacagctgtgctgagggcatccagggcctggaaatcatgtcagatggacagacaggtgtgcgggtggatggactaagggaagaaaggaaggatggcaggaacgaacgcgtggaggtcaagagcctggcccaaaatcacggtggggacgtgagcgggtgggtggtgcccagtctgcccctcccgtgctgcctctaggggctctgccttctccaggcgttaggcagggaaagtcccctgaacttacagaaagacgactagctgcctggaatgttgccatctgcagagccctagcgcctgtcctcccacttccctcgccctcctgggaggtgggttctccacgccaccagttatggagcccaggcttgttctcagccctggtcagcggtgccatcgcaggtcgctccagccccagccgcgggtgcccagtgaatgctctccgtgacccagggcctcctgctgcaggtggaagccgggccacgggaacctgcgccgaccttggcctcacactgtggctccgggagagcaggacctggtggtgcatgcgtagcggctgaggaggacaagcctgggggctggtcccagcccggacacggtggctttgcacacaccaagccttcgcccccagcggggccagcagtgcagggcgctgcactgttgggggccagagggtgacaggattggtgtttaagaagaacttctcagttttatcttttctctgttttgatttggtttccttcatctctactggcttgggcttttggtccttaaatcctctaatatacagaattgtttcctggacctcaagccccccatcaggggggaaacctcatcccaggatgatgggccggtcgtggggcaccctggctgggggctgggggctggggctgtgcctctggctctcgttcctgcccgtggaacgttgaacgttgccaggacatccaccccggggaacttgacgtcctcaggcactgctgggtccaacgccagcgctgggcgcaccaccgctgacccccgacccctcctgcaagtccccctatctgctaagtaggaggatgctggggccaggcgaggccttgctgggcagcctctaggatggtcactacctcctcccacctggaggtcccttcaggaggtccgcggtgttgaagcctggggaggaagaggaggctgaggcctgggagaggaagaggagggtgaggcctgcggggggaggaagaggagggtgaggcctgggggaggagggtctcactgctctgggtcagaggagggctgagtacacgctgtgcggcctggttcttgccaggggtcagctgactacagccccgccttctgtgcagcccctcaactaagaaccgttgtacatttttgaagggttgaagaaaatcaaaagaagaatattttgggacacacgcgggttatctgaaattcagattcgtgtttccgtgcccgcagctccgtcagcggggcccatgctggccttgtgtgccctgcggctttctgggtgcagttgcagcgctacgtggttaggacgggggcagggtgactgcacagccccgtgactggctgctctccgcaggaggcggccccaccctctgcccacatcctccctggctcctcgaggctccgtaggatggtgaagaggttgagatgctgtccagcccacagaggccccggaaagccagtgccgcccgtcagaggggtctcctgagtgcgtgtgggtggctggattctgcatactgggttatcttaaccccggctgtgaaaactggatgaagtagcaatcctttcaaccccaagagtctgtgattcagccagagttacaagatgtctcttcatcctctgaggtttacaaggttctcagaaaacctgtgaagagctgcgcggatcctctcctgccccggcccagcggcagggctgccgcctccctctcccctgggcctgagtgggtggattycccctcccctcctccttcccaggagaagcacagagggagcggccaagcgagccgtgtctgcaaaccccgcttccctctgcggcggcctctgccatcgtgycatggggcyggaggtccctggtccaggtcagcatgtccatctccactggcctcttccatgaggggggtggcagggccagcagttagcttgtgtgacgtgacgtcagggggatgtcttagagtccggggtggcaccaggaggggtgaggtctcttcccttcttccccatcctctcctctctccctgttggaggcacattctgggctctgggaccacgattgcccatggctgatgagctccagcccaagtgaggtccccagggtacagcccaagccaggcctcgccgtccttcggggacttggagagcagtggcccacagcagcctragctcttgggaggctggaggcttactgcgcccggtctcttcaccccgtggggtgtgtccacaccggcctctcctgagagcgtggggtgatctgaacacaggatgtgtttccctgttcccctctgggagataggagagtgcgtgggcagaagccccaagggtggcaggaactcattgccaaaggggaggaggccattgctatgcgtggtgctggcctggcttgctgggtcatgtctgtgcctgacatgacccatgtcatgaccatggtcatgtctgtgcctgagggaccgggtgcccatccagtctcactgccccacagctcacagccacaagctgcagaatctcagcacttggcgggagccctggcccgtgtgtgtgcgtgtgtgtgcgccgctggctccagccctggcctgtgtgtgtgtgtatgtgtgtgtgtatgtgtgtgcgtgcaccgctggccccggccctggcccatgtgtgcgcgcgcctctggtcccggccctggcccgtgtgtgtrtgcctctggccctggcccgtgtgtgtgtgtgtgtgtgagcgcctctggtcctggccctggcccgtatgtgtgtgtgcgcctctggtcccggccctggcccgtgtgtgtgtgcgcgcctctggccctggcccgtgtgtgtgtgcgcgcctctggtcccggctctggcccgtgtgtgtgtgtgtgtgcctctggccccagccctggcccatgtgtgtgtgtgtgtgtgtgtgtgcgtgtgtgtgcgcctctggtcccggccctggcccgtgtgtgtgcgcctctggtcccggtcctggcctgtatgtgtgtgtgtgtgtgtgtgtgtgtgygcgcctctggccccggccctggactgtgtccgtgtgtgtgtgtgtgtgtgtgtgtgtgtgcctctggccccggccctggcccgtgtgtgtgtgtgcgcctctggtcccagtcctggtctctgtgtgcgtgcgtgtgtgtgtgtgtgtgtgtgtgcgcgcgcgcctctggccccagccctggcccatgtgtgtgcaccttttcatatgtttatcagctttttgggtgtctttttgggaagtgtctgctcacatgttttgcagatttttagagtgggttgtctgacatgcccttggttatttctgacatgcccttggttatttctgacatgcccttggttatttctgacttcttcgtatgttctggatctgaaccctttctcagaaatgtgattttcaaacagcacctcctgctctgtgggtgcctttccactgtttcagtggatgaagttcttaatttctataaggtcagttgtactcttttttttttcttttacggccagcacttcctgaaccctgtttgagtaacctgtgtctactcccaggagacagaatgtggtggaattgatgtttgtgtgtgatgtgaggtcggggtctcaggtgtgcagtgaccctgcacctccctgccgtgggcggctgttgtttgtgtgtggcgtgaggtcggggtctcgggtgcgcagtgaccctgcacctccctgctgtgggcggctgatgtttgtgtgtggcgtgaggtcggggtctcgggtgcgcagtgaccctgcacctccctgctgtgggcggctgatgtttgtgtgtggcgtgaggtcggggtctcgggtgcgcagtgaccctgcacctccctgctgggggcggctgtcccctgctgtgggcggctgttccctgctgtgggcggctgtcccctgctgtggggggctgtccctgctgcagggctgcatggtgcttgttgctgggggtcggtcacccaccacaggtcagcaggctgggcctccaggcgcactcctccctcaaggatgccacacacatcccggccctgggtttcgtgggaacatcaggttgcgaggcgcattcctgagccacccacgctgatgccaggctcccttgccttccatctctgtgtggttgaccttgtttctcttgtggcacggggcaccttccaggctggtagggaagagatgggaacatggccacacgggctcccagtctcatcccagccaggaacctcagaggagaggaagcctccctccygggcactgagtgtggaattctgggaagcaccgcacttggctgagcaaaggccgcatgtcccctctcaccctgttcctgtggttaggcagaagggacccagcaggtggccaggcyttgttcctgcacctgtccacagggcacagggaaggagccactccttccaggagagatggctgccaggcaggctcaagaagamaaaagaactgagcactgtgctgtgtgtgaccygtgctgtgtgtcttcctgggccatggtgacccatgctgtgtgtgacccgtgctgcgtgtgtgcctgggccatggtgacytgtgctgtgtgtgttcctgcagggtgactatgaccagagcaggaccaaagtgctgcacatgagcctgaaccccaccagtgtggccaggcagcgcctgcrcgaggaccacagccagctgcaggcrgagtgcgagcgactgcrcgggctcctgcgcgccatggagagaggaggcaccgtcccagccgaccttgaggctgccgccgcgagtctgccatcgtccaaggaggtggcaggtaggcaccccccacccccggtccctgccatcctcgaccttccgtgggtaggtccatccrtgcgcctttggggcagcctcaggcgcccctgcctgtcatccccagagggtttgtcctcccctgtgggcagccgggtctggtggttgctggggcagagcaccctggccccgtgtccccatggccccgtggggttgtgcaaacaggtggagccatccgagtctgcaggcagctgtggagaagcaaggggctgaaatttcaggcccttaaactaattcgtatcatttgtcagtttatatgtaccccattaatcacaagtaaatccagtcctccacgaaaacaagtccatctctcaccagcttaagtgtgcttcatggcgtccagagagccctttgaggccaaggcctgtggcgtcccagggaagaatgaggcctccatgagggccagcagggcctgcccacaccctccaggtctacrtgaggcccacggcctttggaacgccagcctatcccctgatgtggggaggtggtgctggggtctgcccacgccaagcctcggagggtgctgccggggctgtgtcgactctgcagggtgcccctgaaggagcagggctgggagtccagagtcactgtgcagtctgcacccccagcgaggctgtggggctcaggagacccctgccccctgtgttgctctctgctgttsgagggagctgggcactgccccacgctcctggttctggggggacctgggggagggttccctgtccagcccttagcagcagcctggagcgtggcccggcgtccccttgctcctgtgttagagccacccggctgccagccccctcccttgggggtgtctgcaggctcatctgtggtggggcctggaggctgctgctttctggcctttggcatctcgaggtgatttcagactcagctttcatccgatgataccttcttctgtttcttcccacctacttgccatcgcgccctgtactgtgggagagcattccctgtgagcatgcaggtgcagaggttgtgtggcggtgacttgtccgcttcccacagcccagcacccaggctgatgtatcaggagtgattgtcctctgccccgctcctttgtggggagggtcttaggtggggtcttccctccctcttgtgccccacccccataagccaagactgccctgagtctgggcgcaccctgccggcaggtaggggcttagtggctggctagcgggtggtctgccctcctggagtagtatggtggggttggaggacaaaagccagaagggggggcctgtgttgccagattgaggggcgagctgatggcagtcgggggctcctttccagctccccacctgcacaagggctgctcccggtctccactgtggctgtgagggcctgagcccccatgtccccagccccctttctggtccagccgtggctccctctccgccctgcattctgcaggtgttattggcaagtttcggagctgaggatgcagacttggagccatatttttaggtggctctgcaccctgggagaggatttgggaaggggccttccatcccctgctgtcacgggcctgtgccttggctgtgcacccattcgcttgtctgtttgttcccctgttgtctgggtctctgcccgtctcgggtttgcccgtctgttcgttcccttgttgtctgggtctctgcccgtctcgggtttgcccatctgttcgttcccttgttgtctgggtctctgcccgtctcgggttcacccgtctgtttgtccccctgttgtctgggtctctgcccgtctcgggttcgcccgtctgttcgttcacctgttgtctgggtctctgcctgtctcgggtttgcccatctgtttgttcccctgttgtctgggtgtctgcctgtctcgggttcgctcgtgtgttcgttcacctgttgtctgggtctctgcgcatctcgggttcgcccgtctgttccttccctttttgtctgggtctctgcctgtctcgggttcgcccatctgttcgttcccctgttgtctgggtgtctgcctgtctcgggttcgcccgtctgttcgttcccctgttgtctgggtctctgcctgtctcgggttcgctcgtgtgtttgttcccctgttgtctgggtctctgcgcatctcgggttcacctgtctgttcctttccttgttgtctgggtctctgcctgtctagggttcgctcgtgtgtttgttcacctgttatctgggtctctgcgcatcttgggttctcccgtctgttccttcccttgttgtctgggtctctgcctgtctcgggttcgcccgtctgttcgttaacctcttgtctgggtctctgcgcgtctcaggcacgcgggtggtcggcatctggctgtgacaggtgcccgggccatggctgattgggagtggggggtgcgaagaggcgtgtctgagctgaccatggagaagtcagggccagcgtggtctggaagcaggaaggggaggatgagcagaggcctgggatagtgggggccgcgccacatggcgccaccaggaggtgagggtgggtcgggcgtccaggccccagtggctgatgcagcgcgtgtctgtgcccccaaaaatcacagtgttggtggcctctgttttatgtaaggcctaaccccacagagggagaggatacagaggcagacttttggagtctggaattggcgggtgagcagtgaaaggactgagtagacttgggaaaccggaatctaagccrgcggcgggtggagctgagaacccgcctgagttacacctcaaaactccaacgcagcccaggaactggctgcaagtggcgttaggggagggatgccactgactgaagcacagtggatctggaggcttgattgctgaattaagagatgggtccccggaaccatctgtccatctgtgtgccctgggcagttgccgctccccrggaaagatgaagactccaaaacaagccagcagtttattcttggagcagtgatacttaaagtgcagtacccaggtcggccgctgcctccctgggagcctcttagaaatgtggattctcaggtctcatctcagacttgctcagccagaggcctgggggcggccggcagtctgtgctaggcagccctacagaccacgcggatgctcagcgcgtttgtggaccgctgctctggagagggctggcaaggtccctggacagacccaagtcaggacaacaggcttgaactgagcccggattgatagatgcaggtgtgggcctggatcgcacacccccgccacgtgccctgcagaacacgggcagcaggtgtgaccctgtaggcyatggtggaaagacctccctgtgtatccgagcagcccagaaggacctggcgttggcagttccccagctcgacagctcccatggatcgctccctggggaaaaccgtggcagacggctccatgctcctacccggagtatccctgggcccctagtgccctcccctagtgaggagctgatacccagggattgtcagacagcccaagggaaaggacaggaaacgagcagggaaaacagagcacagcgaaacgcagagaaacacagcgtcagcggggagggaacccactgtcccagcaaagaaaatctccaaaaactgtctcctggatctcctcagagagaagacggggcttcagcaaccaaacaacagggcagcttaacacacaccaagagaaagcagtgagcagggggaaggcaaaagtagggaacagtgaatggaaatctaagaagatttgtaaagtaacgttgagaawgtctgaaagtaaagacaacgagatggaaaacaggagaagagaagtaagaacattagaggtacagcccactgtctgaacaacaggaacatggaaggagggaacagggaaaaagcagatgataacagaagtgcctcaaggacgtctccctgaaggaaggacgcagctccctgcctcccgggagaggctcagactgggctgtctgtggttggggatagacccgcacagtgtgcggcagcatgaagattcaggacacaggacgaaaggaagaccctgagaacttcagagaagaaacacagaggtcacttgtcaaaggatccgggatcagtcatctagcgtttcctagcagcagcacctccgagtttctagcagagtgacctgcatctcgggatctcatagccccccagccccacatcaggtctgaaggaagaagtacgggcatctgcagggttcaaggccttaaaaacttgacggccccgcaccgtctctcaggaagctggcagaggatgcactcccaaaggatgagggagtaaaccaggaaagagtgtggctgtggcacgcagagcagaccacaggggcttctgccgcggaagcagagaaggaggcctcaggcctggggagcagccggcaggggccagaacaggccagaggttctgggatatagagcagagaaggaagccttaggcctggggagcagctggcaggggccagaacgggccagagtttctgggatatagagcagagaaggaagcccccagcctgggcagcctccagcgggggctggaacccaccagagattctaggacagaacctggtgcgttgggtgtcatgatgcggaccggagctttccacacgtgtgtgccaggcgtgggctgccatggacgttggtccccaggtccctgggtcactctttggcagcctcctccttccctgcgtgccacacacatttctcaggttttaggtttgctgccccgcacaaaaagactgggaagcacctgtgtagacagctggcaaagagggatggctgccaagagccatgagcacctagaaggctgagtgcgtgggaagcaggacgaccattggctctggggacagcagagttgcatgagaagcagcagaagcagcagtgtcctgcattctgagctggccctgagcagcctcacacagtcgtaagggagctgaggcctgatctgaacacagccctgagcctcatattaagaaaggggaccaggaggagggagacgcgtgttgcagggtgggagggagggagagctgaagcctcgctgtctctcgggaagtcagcaggacgtccgagcgctcaagtccagaaggagccacagaatgtgtattccagagaaatgcagttaataccgacatgatcggctgagaggtgaacatggtggactctggagagaaaggaaggaaatgagaagtgtggagaccgctgttccctgacacaccccacagaattcctgggctcttaactcatgtgcatgtaaatctaaagttaaaaagagaaaagtccaggtcacgccgcttgctgccagagagggctgtcccctccccattctccagatgaggagcaagggtgtgcccgcagtgtcagcagacccttgacgtggaccccacgacgcgccctcgctcctgtgaccgtgcgtggggtgaggagttgggggtgttcccgtggtgtcagcagacccttgacgtggaccccacgacgcgccctcgctcctgtgaccgtgcgtggggtgaggagttgggggtgttcccacagcatcagcagacccttgacatggaccccatgatgcgccctcgctcctgtgaccgtgggtggggtgaggagttgggggtgttcccgtggtgtcagcagacccttgacgtggaccccacgacgcgccctcgctcctgtgaccgtgggtaggctgcctgcacagtccctgcaaagggtgagatggcaggtgtgagcctgagacagagacggatgctcctccccggcctggctggccctgagcatgggttaggggtgggtctcctgggtcacgagagagaccagggtaagttgtgagggcttcaggccagcaggtctgcagatggcaggcctgtcactggcttaagggggagccgcgtggcctgagacagcgcccagtgtcccaccaggaagcaagtcccaggggagtcccctcacaccctgatcacccagcatctcgggggtcagcagatgtctcttcctgctctggggaatcagggcccccaaggaacaaggtgaaggggatgtgacggtgggacgaagcaaggggacacgtggcggtggggtgggcgaggggacgcagcggtgaggtggggtgagcggacacggtggtgggatggggtgaggggacgtggcggtgggtatggggtaagcggacgtggcagggggatggggcgaggggacatggcagtgtggacgtggtggtgggatgtggcagtggggacgggatgaggggacgtggcagtgggggacggggcgaggggacgtggcagtggggacggggcgaggggacgtggcagtggggacggggcgaggggacgtggcagtgtggacggggcgaggggacgtggcagtggggacggggtgaggggacgtggcagtggggacggggtgaggggacgtggcagtgggggatggggcgaggggacatggcagtgtggacgtggtggtgggacgtggcagtaggggacggggcgaggggacgtggcagtggggacggggcgaggggacgtggcagtggggacggggcgaggggacgtggcagtggggacggggcgaggggacgtggcagtggggacggggcgaggggacgtggcagtggggacggggcgaggggacgtggcagtggggacggggcgaggggacgtggcagtggggacggggcgaggggacgtggcagtggggacggggcgaggggacgtggcagtggggacggggcgaggggacgtggcagtggggacggggcgaggggacgtggcagtggggacggggcgaggggacgtggcagtggggacggggcgaggggacgtggcagtggggacggggcgaggggacgtggcagtggggacggggcgaggggacgtggcagtggggacggggtgaggggacgtggcagtggggacggggcgaggggacgtggcagtgggggatggggcgaggggacgtggcagtggggacggggcgaggggacgtggcagtgggggatggggcgaggggacatnnnnnnnnnnnnnnnnnnnngacggatgctcctccccggcctggctggccctgagcatgggttaggggtgggtctcctgggtcacgagagagaccagggtaagttgtgagggcttcaggccagcaggtctgcagatggcaggcctgtcactggcttaagggggagccgcgtggcctgagacagcgcccagtgtcccaccaggaagcaagtcccaggggagtcccctcacaccctgatcacccagcatctcgggggtcagcagatgtctcttcctgctctggggaatcagggcccccaaggaacaaggtgaaggggatgtgacggtgggacgaagcaaggggacacgtggcagtggggtgggcgaggggacgcagcggtgaggtggggtgagcggacacggtggtgggatggggtgaggggacgtggcagtggggacggggcgaggggacgtggcagtggggatggggcgaggggacgtggcagtgggggatggggcgaggggacgtggcagtggggacggggcgaggggacgtggcagtggggacggggcgaggggacatggcagtgtgggacgtggtggggggacgtggcagtaggggacggggcgaggggacctggcactggggacggggcgaggggacatggcattgggggatggggcgaggtgacgtggcatcggggactgtgcgaggggacgtggcagtggggacggggcgaggggacgtggcagtggggacggggcgaggggacgtggcagtgtggacgtggtggtgggatgtggcagtaggggacgggatgaggggttgtggcagtggggacgggatgaggggacgtggcagtgggggcagggcgaggggacgtggcagtggggacggggcgaggggacgtggcagtgtggacgtggtggtgggatgtggcagtaggggacgggatgaggggttgtggcagtggggacgggatgaggggacgtggcagtggggacggggcgaggggacgtggcagtgggggacggggcgaggggacgtggcagtgtggacgtggtggtgggatgtggcagtaggggacgggatgaggggttgtggcagtggggacgggatgaggggacgtggcagtggggacggggcaggggacgtggcagtggggacggggcgaggggacgtggcagtggggacggggcgaggggacgtggcagtggggacggggcgaggggacgtggcagtgggggatgggcgaggggacgtggcagcggggctgcagagtcaagagctccctttcgtgtttgccacggcttccccaagggctgtctctggtgtgggccccagacctccggtcagagaagacacagaaacacataaagaggcccctgctctcggggatctgagtccctgctcggaagttcaggcaggaacacccttgtgattttcctggtgtctttgacaaggcagtcactaaacaacccttgccatcggcacgggcccttggcggataggagccccaaagcccggcctcccgtgctggctctgactcctcactcagcccccctgccacgtccaggctgggccagggagattgttaattgcagcttaattagggaatgcattaatattaaaataatcttagcagcacattgarggtgatcaaatttgtcactgcctgtgtgggcacagctgatcctagaggtgtctttggggaggagggaggcagggggaggatggaggagcgaggaagagggaraagagataccagggaggagaagggaggaggtggaagaaaagaggggaggcccgggaggggaggagggaggggaagatggttggccacagagttgctctgcctggaatccacctgctcggcctcagggaggagggtgccctcgaggggaggcctggtttggtgtccctgcctgggctgaggacgggagcagtgactgcctttctgttgcgtcctgtgcactgcttctgtctgtatcggcgcgtgtcctctgcagtctcaggactcacacttttcctgcttggctggcgctggccccacaggtggcctcagtgaggtgccctaatggctgctccgtggaccaccaggacaagcactgtggagagctacccattggcctggcagtgccaagccagctgtgccctcccacggccagaaatcagtgcccagctctcacgtggcacaggcctgtgtttacgtcatgcccccaccccgtgccacctgggcagggccgccacctgcccacgcctctgtttgctcagtacaaacaccgtgcaatgccgacagctgagcggttcaaatgggatgggggtgcaggggctccagccctgttcggcagttagtgggaggtggagaagaagggctggcgtctgaagtgcaggaccatgcctgtttggcccagtcctgtgccaagctgagatcgtctgcctgggtcctgccatctagggacctgcaggtcatggggaacagtctcaggtgtggcaggagttccrtcgtgggctcctctagggaccggtgggtcgtggggagcagtgtcaagtgtggcaattctgtcgtgggctcctctagggactggtgggtggtggggagcagtgtctggcgtggcaggagttccgtcgtgggctcctctagggaccggcgggtcgtcgggagcagtgtcaggtgtggcagttctgtcgtgggctcctctagggactggcgggtggtggggagcagtgtctggcgtggcaggagttccgtcgtgggctcctttagggaccggcgggtggtggggaacagtctcaggcgtggcgggagttccgtcatgggctcctctagggaccggcgggtcgtggggagcagcagcaggtgtggcaggtgttccgtcgtgggctccgactgtagtgctggagacagaagtgatgtgacgtcagccaaggcctcgggcacgagctggtggctctccactgtctggagaagtagctgccccccacgtgctgcttggtgctgcctattttttaattgaattgttagtattgagtttggggtgaatccaagttgagtatatagctgataaatatcttctcccagcccgtgacgagcctcttcattttctgaccctgtgttcctcggagcaaatgcttttcatctgggtgcatgctgatgatcaggttttcttttataggggtcagatccagaaactctctgcataactccaggccaaacatattttttcttgttttctactaaaaggttttaagttcacatttaaatctgtgacccattttgagttagtttttgcccatggtgtgagcttgagttcaagctacttttcttttttgtttttatatggatgtccaattgtgccattattattgaactgactgtcctgccaccattgaattatgtttgcacctttgtccaaaaccagttggccatgcgttatgggggtctctttctacaccttctcttctgttcccttgatctaagcgtctgttcctttgctgttaataacaccccacggtattgattactgtagcttcgtagtaagtctcgaaatcagcagcacaatcccccactttatggacaagatttacattcagcttgtctttacctgcaaaacgcctgctcagatttttagaggaattactgcatctgtcagtcagtctggggagcatctacatcttggttgcagtgagtcttccgatacatgaacacaatgtagctctccatttatttacgttcttcttattttctttcatccacattttgtgrttttcaccgyacccacccaccccttttttgttagaaatacacatggttttgttggttttattgttagtgttggagctatgtaattatttgtaggcttgtttttatgggtcccaggtgttcagtgcgtgtgtgtagatgtatgacggatgtttatgctggctttgtaacccatgaccttgctgaactcacttcttacatctgggttagttgctgttttgattttgttttctaatcctttgcagtcatagcacctgtgaatagggacagttttgcttattttgttaagatccatatgtcttctattttgttttcttgctgtgttgccctgtctaggaccttagtatggtgstgagtaggagatggggcaacagagatcctggcctttctcctcaccttgcagggagagcagtccatcctcctccatgaggcgtgctgctagctgcagtttatttgtggtttttccttatcaagctgaaaacgctctttccattcttagtttgctgagagtgtttatcatgtaggatgttggcgtctgtcagatgcttttcctgcatcaattgatgggatcgtatgttttttttcccttacaccrttagtgtgattgacagtgtgtcattgtgatttttttgggaagtttccaacgttgagccaactctgcattcctggaataaaccccccttggttatggcatagtatttttacatgttgctgagttcatcttgctgacatcgtcagtaatcttcacgtctgtgttcatattggtctgtagctttcttgtactgcccttgtctggttgtagtatacacgtaatgaatgaagtgaattggaagtattcccccttttatgtcctagaggagattatatagaattggtgttacttctttaaatgttttgtagaatttgctggtgaaaccatctgggcctagggattgtggttgtggcaggttctaatcattacaggaatagtgagttctttcatctcagctgaatgttggtagaatgtaggttttggggttttttttattgtgaggaactggttcattatatctgtgatcaaatgtatgagcagtgaattgtctgtgctcttgcctcgctgattttatcgtgcctgctgggttcgtagcggtactccttccttcctgatactggtcgtttatgtctttttttttcttttttctttttttgtctgttagcctttctggagatgtataaatttcactgatctccttagagacctagtttttggtttcattgatattttgctgttgtagttttgtgtttccttccttctgcctgctttagttttagtttgctctcctttttttctggcctcttcaggtggaagattagattgcatatttgagatcttttctgctttccaacgtaagcgttccgtgttagaaatttgcatctgagtgctgcattagcagcatttcacacattttgataatgttgtatttttatgtgtgttcagttcaaaacattttcaaatttccattaagatgtaccatagtttgaacgtggcctccaaagtccacgtgttggaaacttcatcccagagtgatggtgttgggaggtggggcytcctgggaggcgttgaggtcacgtgggctccaccttggtgagtggattcgtgctgttgtaaaaggggcttctgttagttggctctctgtatctgccctcckgccgtccaccatgtgatggcgcctcaggaaagcccttgccagaagctggtgccttgatctcggacttgccagcctccagaactgtgagcctataaacttcgggtcgttataaattaatctcaggtattctgtgatagcgcygccaatagactaggatgcctgctgtgatccatacagatttagaaggatgctttttaatttcaaagtgtctctccctgattttctgggtaatttctgttcaatttcattatgttgagggaacgcactttctacgattcactttctttgcaatttaaagtttatttggtagctgataatttgataacctcaaaatgtcccatgtgcacctrataggtatgtgtgttctgccgattaatagatgtgttttggccatttatagttaatgtaattttttatgcatttggatttaggtacattttatgattagttttctgtttgtcctccattttttattcccgttttctctttcctacctatttcaggttatttggccttttttatactccattttgatgtatctatgtctttattatatctatttgtatacttttaaagtgatttttctgtggtttacaatgtgcaagcttaacatttcacggtgcacttataattcatattttatcatttcaggtggaaacgtcaggatttcaccacgacgtaggcttctccctgcctccctttatgttgtagtagtcctatgtacttactctctatatgtggaaaaccccaccaagaaatattacaattcttgctcttaactgtcatgcctattttawaaaacataagaggcaaaaagtagtttgtggttttgcctcttccttctttcctggcgttcctgggttcccctgggatcatttctggtttggcaggacttccttcggggcttctttagagtaggttctctcagcgtttgcttgcccagcagtgtcctcaccccacctcgttactgaaggataccattgctggatgtggggttctgggagagtggttcttgtctcctagcactttaaaaatcgacactgtttccccatcttctggcttctgtggtttctgatgagcaacctgcagtcactcaaagaaatctcccctttcccctccgtgcagatgagagaggctttcagacactccaagtgtggtggtgttttaagttaaaggacgggaaggaattcatgtgcccacattgtctgctgggttccagcgtgtgtgggtgtaatgcctgccaccctgccgcgagaaggactcctgtggtgatgtgctttctacaccaagcttagtggcacggcatcatctctaagatactgtgaaaagttaagtctgtgttttccaatcacttgcttcttggagcgtctttaaaatctcactcgataattccagcatctccgtcatcttggcgcctgttggtcgtgttttccctggcaggtttctgttttcccggttcttttcatgctgcttaattttagattgcattctggatgttttgaatatcccgagattctaggtctttcttaagttctctggagaatgtaaatttctgttggtttcagcatttcctgatggcacttccatttcaggctctttgccgagtttcccaggccattgaaccttgtgtcctccacagtcctggctgggtcctggtgtggtctagctcagagtccaactctcacacctgtggggtgctgattagggtcagagccccatgcccagcttagagggcaccttccagagccactctgagcacccagcacttcccaggtgacccagggttcccttcactgccttctggccacagagccaggcaaggcttgcccactgtgctgtgcagtcagtcccacggccacagccgccttcacggccaacgccagccacagcgttggaacagggcaggacatgccccacgcaccctgtctggagggaggggcccactcttgggctctaggcgtctgtccagctgtggctgtacctccgcaggattgcccgggtgccggggcggaagagcgcggggttgcccgggtgccggggcggaagagcgcgggggtgccagggtgccggggcggaagagcgcaggattgcctgggtgtcagggtagaagaggatggagacagacagaatttcccacactgcctctcaggcttctcttgacaagctgtgtgcgtcttgtgctcactcccaggttttaggggtccccaagtccagactgggtagcaccagggcaaacacccaaccagtgacagaaactccagcaagcttcaaccacagactgcagaactcacccagtatgaaatagatcgtctcattaatcctagaaccattaaataactgaatccacaatcaaaaagcttccaaaaaaggatatctccaggcccagatggttttctggtgaattctaccaaacacttaaagaaaacttagcaccaatttgccaaaactctccaagaaaacagaagagggagcacttcccaactcactctgtgaagcaagcatttaccccaacttcaaaaccagtggcaaaactgaagaacactgcggggctattttctgttttctgagagtgcaaggctgggttggtgtcgagcgtcagctggtacaatccatcgcgtcagctcgccaaaaggaaaaattacatggccaaaccaacggatgcacaaatgcagtcagcgaggcccaacacacgttcatggggaaactcggcaaaccaggagaagccgagaacccccaagtttgccaaagagcatctgcagaaaccgtgcagctcaccgcagacctggctggtgagggactgggaaacgccgactcaggcagaggccttccctctcaccgccttggtccatgtcccagagccccagatgggcagcagggtgaggaggtcgaaggcacacggactggaaaggcaggacygacccttttcctcttcacaggtggcgtgattatgtcgaaaatcacaagataaaaacgagtcgagcgagttcaccmgggatttctgtgtgtggctcttgtatcctgcaaccttgctgagctcactttatgagaaatatgtccgtgtgtctgtgtagttctgtaaatattacacaatagcagtgcacatgtggaaaccgaaattaaaaacatgccgtttctgttcactcttctgaagatgaaatctgcaggcatcactaacaccacagcacgccgacaacggcaagctgctgaggcgaggcgtgggaggtctgtgtgaatggagactctgccttcgtggctcgtggggtgcagcgcagtaaagacgcggcgcggccaggtccagctgcatgtctctcgcagctggaagcagggcgctcgccgctgggctggtgatgctagtggttctgggttccgacctcagcccgcctgcagcctgtggctctccaggtctgtagtcggctgctggctgcactccctccatcgtcagagctgcctcagggagagacagggctgattggtttcttcatctttcccagaacctgaacccctcgtcttcaggttctctcttatctgttaattccgttgcttttaagcttagtaagtactttagtgatttgataaataattctattttcttctgggctctttgagcttatttttatatttaaagatttaatctacttgaaacttattttggtgtatggtatgaggtcgagatctaaattgattttttttccagatcactaaacaattgccctagggccatttatctcagaatccttccttccccgtagatttataccttcatctttattaaaacttaggcaaaatcgggtctgtattcagatcttttgttttttttaatttcatttatccttttttttgacttaaaggttttcttacctgtttattattctaagttaattttagaattactttgtcacggccaggcgcggtggctcatgcctgtaatcccagcactgaggctgaggcgggtggatcacctgaggtcgggagttcaagaccagcctggccaacaaggtgaaaccctgtctctactaaaaacacaaaacgccaggcgtggcgggagggtgtctgtagtcccagctacaggtactatagatgctgaggtgggagaatcgcctgaacctgggggatggaggttgcagtaagccaaaatcacaccattgcactccagcctgggcaacagagatagaccctgtctccaaaaagaaaaaaaaaaaaagaattagtcaaattcaaaaaaaaggtatcaaggttttattttttactgaaattacactgaagttayaggttaatctagtggaagaatctttggctttccagcgtctgtgtctgagcagggaagggcgcctcagggccgcctccctcaccgataccacgtctcagacccgcagcgtgccggggttccctttgcaggctccggtccaggcaggagtgtgtcatctgggctgccatctgctgggcaggggtcctgagtccccactgctggctccaggccgcctctccgccctcttcccacctccccaccctctctttgggttgcctgtctcgtcgtctccagggctcagagccgagctttgcaggaggagcagggaacatgaatctgcacccttttctgtctggaccggatgtcccgtgaatcttttttattcagtcaatgaagattagggttttttgctgtcggtttttaaatggatacacagtgttcgtgcatcgttatggggtgtaggtgatgttgtcttgcatgcccagaatgggcagtggccacacaggggtatttggggtatccgtcacctcatggactggtcatttctaagtgttgggaagacctcctgtcctctcttctcactgttttaaagtagacagcacatgtggctgactgtagtccgcccccactcggctgtggaacgtgaggtcttactccttccatctggctgtgcgtctgtacccactgaccagcctccgttcatccccgcccaccccacacctgcaccctccttctcccccaactccatgcgatgggttccccccgctcccgtgggtgagagcgtgcagcgggtcttcctgttttaaccacttcccttggtgcctctgaggaatcgctgggtccacaacacagtgtgaggctgccacggcagccgagtctccccgactttctctgcccctgctcctcccacacactgtcgctgctccatctgcrgacaacacagccccgggcgagcttactgggcagggttctgccgaaacacagaactcgtagaatgtgtgtacacacgcacatgcacacgcacgcacgcacgcacacggagatgcttgttacagggagttggctcacgcaatgacaggcaagtcccgagagctgcagggttgggggcaagccggggacccaggagcactcatgtactggggaaggacagggatgctgggcccacacagccccggcttctgactctgggggttgctgtctcctaacgctgctgcagccctgctgtgcgccctcctggggacctccgtgtcactggagctgttggcactggccctctataagcgttgggtggactggaggaggggtgtgggtaaggctgactccgccctgccacccctgggcactttgcaacttcagctccctccccagagtcatctgcagtttctttttgttgatcaaagttaaatttcagttccaaagcaaagttgctcctgagctgatggaggaggggttgccacacactgtcagctgttttggacttgggccatggtcccagctctgcaccagcagccatgtgaccttgggttcagctctctcagctctgacatgtggctcactccaatcacggtcattgtggagggtgtgtttatagcagaggcaccgctggcccatgatgtgtgctcagcatgatggtgwtggcgacgatggcggctgtggcctgagcccattggcctctgggcccgtgcaggagcccatttggtagaagctgagccaggctggtgggtagagaaacaaaagtggctcccaatgagcccattccccagtgcggtcctccctttgtgtggtaggtccccagcgaggacggcaggcttggctttacagttctgccttcagtgccagccacctggacctcctgcaccaggtcagggagagaaggcagaggagaccttgcaggctgcaggtgtccctggctccaacacaccgtgtgtccatctgaggccggggcagccgtgttggacggcctgggagcctgaggtcagaaggcttggatggaggtcctgctccacgtcgtaacagttgggggtctgggtggacccttttctctctgcatctcagcttccccatttgagaaacgggaccaccggcccaggtcctggggcagttgtgagcgtctgtccccgcaccaagggtgagcgtgacaggcggacgatctctgcagactcctgggactgaacgataggaggaggtccctgtccttgctggggaggggccggatcayggcggcatgggccggagggaactgccctgctggcaagagccgccagagcctggggtgacccagagacaggacgggtgttggaaggatcagtgcccctgccctgccacgtgctctcaccctgtgcactcattgaggcgccctgtagagaggggaggggaggggaggggggctggggccaggagtagccacagcaccagtcgccctggggccgggagctgtggtctcctcaggtgggcccaagtgcagtccaggtggggcagtggcctcagagcacagtggctttgctgaaggctggctggcactccagttaaacaccctaggcccttctctccatgctgttctttggtgttggtgttgggtaataaaggccagcaccattaattaggtgtgtaattagagttgtaaaggaatcatgggatttaatcacagggtttgcaggtgagcggggtagaggaagggtaccaccctctgtgctgggcacacccgcctggctgcctgcaaacagatcctccctggactgggcgccccccatgccgtggacccggcctgggcctcggagctcctgggcagtgcggagggctgaagcaccgtccccagtggcgtgactgcggttgtgtgttgggaacatgctcgggggccccaagacggagccgagggaggatccagacagacgctcccagaaccaggttctgcagcaccagtgagaagtcagcagaggtgtggggaggggactgcgctggggctgaggtcccagggctgggacacaggtgggcctcactgcagcagggccagagaccaggctggggcggtccccactgggccatcgtggggcttctgggctccatcctgagggtcacacagagcctcggaggcattctgtcaatttggaaggtggcctggctgcagagtggagcacggtccggggcaggctgagccgggcgctggccgtggactgggcagaggtgctggtctgcgaggtggggtgtgatatgtgggcccacgattcaggttgtagggatacagcgctgcctgggcccctccccagccccacatctagtctgctgggctctgggctgaaccacagggtggggcctgatgcaacacagtcagggccgccctccgtccccgctagcccttctctttgctgctctgggggctttgtcttcctggggaaccagagataggtaagaatgttcctggcacagccaggtggccccacccttcctgctgtgtctggcagaagtgcccaggatgacttctctgtcctggctgtgcacggccacacgcccgggcagcgtgtgccagccacagggactgctgaggagccctcttgctcttgctacggtccccagccgtggcaagcagctccgtcgccgcgacacccttcttctctcctctttctttctggcacgtctgtaaactttgcttgtaactcaagccaagtacccaattagggatttcttcacagttgcatttaaacctgattgaagtgggagctcttcagtgcctgacacatccaacaggcgcttcccctgagccccggccaggcggtgctgagggcggagaggggcggcgctgctgggagctctggctgtctggaggggaggtgcgcccttcacccggggtgggcacccagccctgtctcggcccccatgtccttatctctggtcaggggtgtggcccctcatgccccaggctgtcatgaggctcctgtgagcacagcgcacgtgtgcagggctgggtggtctgcatgctaggtgggcagccgagcgggaggcccatgtgctggcagtgcagggcgggtggctccatgccgcggctccctcgctggaccccagcgccaagcccacactgttctgtccgtgtgtgttctgagcatcgcctggacgctcggccctggggcacatggatggagggaactgggtgcctggtccagggagggtaaccaacctcgagctgtgggcatccttgtcctggaaaagcaggaggaaaactgcagtggggagtggaggacattcctgtcacaagatgctgtgatgactggaggacactggagaagccgtgtcctctgccagccccagcctcggttctcgttggcatgggagatgtgccagggtcgtgcctcgtaggtgaatgggggtgccctggtctcgcttctcgctggctcgggagatgcgccagggtcgtgcctggtaggcaaatgggggtgcccgggctgttcatgcagtggagttcctgggagcccagcctggcccccaccgtgggatcgggactactgtcatttctactcatgagggaggggagctgcagggaggcaacaagacacccgcagcacagggcatggacacgaattcatctccccgccagtgatcatcccccaggcctggcctgggcagctgctgactcccttgcagggcctggagggtatgcgtagtccgaggggctaagtcgagtcccttccttgagggctcactgtctgctgggcgtgtgtccccgcctcccccgccatgcctcatgctctggcgtgtgacttgctcctctctctataccgcccagcgtgctgtccccgcctcgtgccatgacgtgtgttttgctcctctttctgtactgcccagmgtgctgcctagcacagacggaccacaattcactcatccagtcctcagctgagggacgtctgggtggttccactttttggctgtcatgagtcatgctgtggacgttgtggacgtttgggtacaagtctttgtgtggatacagttttcgttcctccagacgggaggggaatttccacattctagggaggagaggagctgccttacggtttccgaggcggcttcacccgtttgcatgtcccacgtgaggctccaggggccccacaccctcccggtgttggtggcatctctctttctgaccacagccccactggtgggtgcggagtgtgtggggatgcctgcacttcctcacaggtgaggatgatgggcaccgacgtggcttgttagcctctcctaggtcatcttctgcaaaatacctacttaaatccctgccattttcgactggattgtgttctcatcattttctcaatgctttcttttgataagcagttttaaatctcgatgaagtataacgaatcactttttcctgtggtagtgatggtggtagtgctttgtcccaagaattccctgctgaccccagtgttgaatcgaccttagactaagccccttatcccgctggttctgytcgtggcgtgaggggaggtccacatctcactgtctccgtgtggacattgggtcgttttggccccgctggcggaaaagacttttctttccccgtggagttgctttcacttgctttttgaaaagcactcaacgctgaacatttcgtcctggctgtcttctgtgccggcgacacatttgcttgtacccgcagcagtcccacgcagccgaccatcggtccttccttgactgtgagacttggaggcaggcagcgtgcgtcctccagcccgccgtggaacaccgctccrcgtacgtcccgcgtcggcctcctgtggcgttcctcgctgcccctgaccgtcctcagcacctctgcctgcgccgtcccctggccctgcagctttctgtcccgggaagcgcgtggcttttcccctaagtctgccccaggtctccttcccagccaggtgctgccaggacgccttttcggaccgcagccctccccctcccatctccccgtccctcccggctgcggttctctgtagcacttcygctccaaggtgctactgttgcacttcgtttattttttatctgtttccctagttgaaaagcaacatccattagggcagggggttcatctctccatacacactgtgtcctcagggcctggggtgttaccaggcgcccagcacctctccacacatacctgctgggtgaatgaatagctgagcagygcttctgaggaccctggcaccagggttgctcccagtgagaccccagttcctgctgctctgtggcccagcagggagggctcggctctggaaaaccrgaggcccacactatccttagatgccaccgcatgaggctcctgttgctgccatgacaaaccagcactgactgagttactcaacacagcagggccggcgcggcactcatgcctgtcatcccaacgctttgggaggcccaggtacaggggattgccagaggctcggttggagaccagcctgggcagcatagcaagaccctatttataaaaataataataataataataattagccgggtgtggtagcacctgcctgtaatcccagctactctggaggctgaggcaggacaatggcttgggcctrggaggtcaaggccacagtgagctgtgatcgcacccctgttygctaccctgggcaacatagtgagacctygtctcaaaaaaacaaaccaaaaactcaacacgatgtgatctcgggttctggaagtcacacgtttccctgggctaaaggccaggggtcatcagggccggttcgtttcagaggctctggggagaatccacatccggccttttctggctcccagaagcacccacgtgccttggcacacggcctttcctccaccctcagagccggagcgcacatcttcggatctctagccgactttcctgcctccctttctgacgtgtgaagacccgcgtgattgtagcgggccaccaggataatgcaggaacgcccgtggtctcaccatccctgccccggacacatctgcagagtcccttcccacgtgcggtcctgggcccaggcatarccaccgcttgctgatgcctgtctggtctcctgccacccatcacagcgccatctcctccttccgactcccaggtcctgaggcctccaggccagcactggccaggggagggggctgggaagagccagtgagggcgtgtggcagagtggagagtatgtcccccattgtggggtcgggcctgggacctggacgcggtgcctgggcttgcaggagaggagaggtggacaggcgtgctggggggggagacctgcccacgctgccctgggagcttgtctaccctctcctcccccagcrtggcgtccagcaggacatggggcgttccctccagcgtggccacccaggactccaagcagggcccaggaggaactgtgagggggcatgactgagtctgtggcgtttcctgcaggattcttcccataggggtgaagtctgtatggcggaggcagccagggagcctcccctccactccccacggaatccggacggcctgcattgcagccccagtggctctgctgtgtccccgaccagctgcttccctctcagcctcagctttgtcctgggggagaggccactgggggctgctctccctccccccatagcagctgtaaatcatgaaatcctcatggtgtcagccgagggctccccctccccgccacttctagagccagagcccctgcgaggtcccaggttgctgaccccacgccaacccccaggacgccagggccatctccaggacctgggggagcaaggggcctggctgccgctacagctcccagaaggtaaagcctttggcctcagagagcctcccccgacggttcccactcccttcgctcccttctccaggccgggcgtgcacgcgcggattcctcctcatgcagagcccgtctgccctgatggatcccccaccccacgccaccccaggccgcttcctccgggtggagtgctcctcagcactcaggggtcctccctgcacccaccccgcccagaaccctgctccttgcccctctccttccagagccctgtgtctggctgctccaattactggagcagttccgtgtcctcttcccgagtctcctgctatctgaagagttcattacataggaatccgaggcctcgctgcctacattagcaggttttcatagactgccacatctccaaaaggggaaaagagacaggagatttaaaactctcgtcttgccgaaagcagacagattgactcgaaaatgacccagtcaataaaagatgagctctggaaaggcttccctcttctcagagggggctcgcctgccggggagctgaggttctgcaagcctcggtgggaaattaatcatgaacgcggcatgcaaagcggccggagcccacacagccccgcccccacgtctcccaggacctcgccgccgccaccccaggcctctctccacggaccagctgctgggcatgttcctggagggaagcttccggaaacagatgaggtggccgtgttctgtggtcacgtcttgactcggctgtgatatcgctgtggggcactgctccctctggagtgtttctggctctgggaggtgcgtgcgcggtgggctccctgcctgcacaggggccctggctgtgggcctgtgaggctgggtctgcctggagctggtgggatgagaggggagtgctctgaggaccgttcccccactggtgcagggatggggagcacagggtcccggtggctctgatgcatcggcggcagggaccgcagccctgcctgtgccaggaggagccgtgagaggatgggcgccccttgccctctgtgggctggcatctccgtgcagggcctgcagtctctgcagtggccacccattcttatctctcctggtgcccacacctgccgcctgcctcacctcwcccaaacaggaggagtcacctctgaccccaactgcttccttttaccagagtttctcagctcaygttccccaaaaggataggttaagttttccttttgagccacacatgcccccatttgctgtctgtctctcagatggccatccttcatccagtcgacagggctggccttgcggtttccactgctracacacacggagctggctggttctggggtctgtacccgcacgcagggcccctgccgccatctggacccctgccaccccagtttcccccacttcaggattttgggtcagaaggaaactatcccgacagctatgtgtactcctgcagacttctgggtttggccatggttcccgtcagcccccagacccccgacaagtgtctgaggggatgtggaacccagcccactcccaccacttctgccctgcagctgcatggagggcgggttggacaggtgaggcccagcccctgccttcaggcagctcacacagtgagggaagcagccctgcaaaggtggccgcagctggaaaggcgtgtgtgtgccgcagaggttcagacccagtccaggggagagggataggatgcccaagaggggcttcatctggaggtgacgccggactggagagggttgggatgcccaagaggggcctcatctggaggtgacgccagactggagacggttgggatgcccaagaggggcctgttctggaggtgacgccggactggagagggttgggatgcccaagaggggcctcatctggaggtgacgcsggagtctggccttgcagaagttcrctggtgaasatcgtcccctggcagaaggcaaatgtgcccgccacattgtggcagcagaaatgagcaccatgcgttctgagtgtgcctggggtgtctgggaggactgtggacttgtagcggcagaggrcagaacacctgggctgcacacgagtgactgtgctgggcaatggcgcttcccttccgaagctgggctctgactctgcaagtgactgcgccgggggcagtgctccccttccgaagctgggctctgcgtcaaaagaaagacccctggggcctgaggaggagggagaggagggtgacaggaagtagaatttggactctagtaaagaaagaccccgagcagaggtggtgccagggagggttggtgaggacagagcgttgaaacctggtgtccagcgggtgttgagtgctgaatccaggaaggccraaggcaactcaagttgtctggctcraggggtgcgggggatggagggagaggcggccgcccaggagcgggaactgtgggagtagcacttaggacatgaggcacgcctgcagttatgaatcctcacggctaatcagggctgtgggcacaggcagctgaggccacttgaaaggactgatgcgcccagaccaggccmygccagggcctccggtcacgggatgggtgcagggttgggggtcaggagagagacactgtggccccacatcgccatgctggagcctatgtcccgcctgactggcgtcacagggagccctctccctgctttctcatcgtcggtttccccatccagaaggtggggacaaacgtagccatgctccccagggcggggcccggctgggatgggtgcagcgaggctgcgtgttcctgcyccggacaggcacctactcaaagcccgagcaggctctcacctgacgaacgtgttccaggtggaagagaggccaggacacgggcaaacacgcgawctcagatgctcgtgagctctagggagaaagcaaatgtggggtgcccagaagaccactggtgggggtggcccagggaggcttttctgaactgaagcctgaatgaccaatggagacagctgctcagcccccagggcagtgcccagcgtgggctccagctttggctccgcggcgggtgttcraggggtcccctcaacagtgctggcatcgcagaggtggccctgtgctgacgcgtcggacggctgctgcgaccagccctccctgtagtcctgttgctggccagagaccgtggagctggattctggcctcctgcaggcatctctmtgtccattcagcaggtgccacgtccccccacatatgcagggtgtccggaggatcactgacacgggggccaatgtccctccttccgccaaggttccgctgggcctctgctgccgaaggaccccatgggggctgtggagcctggtgccgggggagggggctgtcccttggggttcagctgctgtgttctcggtgctgggggaggattcttctccaaatatgatatccgcgcccgcctgtcaccccaggactctcccaccccgtaatctggtggctgtaattgctggtgtcttttcatatcagttttgtgcaaggtgacaagctgcttgctggagtaagtcgttaatcacacaagaggtgccctgtttgaaagctgcacagagctcacccagccagcgcctgccaggtggtgggccagggagcggctcctccgtgtgtaattccagggcgagtgtcttctcactggmgcagagtgtgcagtttctgcccagcaggggaactcatggctcatcatggaggccgtgtctcaagggccgtctggtaccagcagagttgaagcgaccatcttcttggggcagcagcaggccctggctggcaggtggtggcgtcccatcctcctgttgccaaagccagttcctggggaccatgatgcctgccagcccctcgggctggtctccgggaatttggatttggggccggcagcccctgggatgagccaggtggggcgctgtggggcatgctggggtacggttctcacrggtgacatcccggggggtcccggccagcctacaggtgcgtccccacctcctacagtctcttgcagagccagccaggacccggatacaaatcgcacagccataaccactgcaatgccccatgcccatggctgctaataaaattgcatcaatatttgatgcctaattattaaatatttaaaaatgtaaaactgaaatagtttagaagcttgcaaaacatgaataattcagtcccgggaagcctggctcggcattgggcctgggcaggacyggggctgccagtgcctgccagggcccagagtactctctgcagggacactcgggcggctcccccagccctgggcctccactggcttcctgtgtccgcagcgtgcaggggatccttggtcgtctctcgtcgaggtcagacctcggcctgatgtggaggcctctgcgtcacctactagtacaccacgccggtgtygggctccttcagaggctggtcccgctgctccgagtctgggcacgttccctcctgccctgtgttcccactggcactgagcatctgagagtcatctctgacccatcagacccatcctagagggaagatctggagatgccaatgctggcagcctcccagaaacagtccagcaggaccccctggggccgctgctcatgccaggcgcccagccgccgccagggagacatctaacgagaggtgggaaatagacacttgggggagccaggccgtgtggtgggggtcatgagagaaatgcatgctgggggagtttcataatgttgagaacagagacacggctctgctacttccggggagtgagaaccagtcacttgtagaagaccagaagtcagaacggattcaggcttctccacagcagtgctgagcacttgagacctgagggcgatgccttcagcactgaaagagaggccgggtgcggggctcacacccgtcatcccaacactgtgggaggcacacatgaggcccgcaggtcaacaacagcctgggcaacatagaaagaccctaaaaatatatatattagcccagtgtggtggtgtgctccctgtggtcccagctacttgggaagctgaggtgggaggattgcttgagccccggagttcgaggctacagtgagccacgatcgcgccactgcactccagcctgggtgacagagtgagaccctgtctcaaaaaacaaaacaaacacaactgaaggaggagtgtatacagcctggaattctgcatctggccaaattacccatcagctctgatggtgaggtagagatgtcttcagccatgcagggttccagacattgttccctgtctcacgtcatcagggacctgctgaagggtatgatcgcgagagttgcggggcagctgcagccctgagccaggtggtccccagttccagctgcagcagcctggacagacttgctgggcctgtcatgctggaatcccaacctttgagctgggaaaggtgctgtgcccaggctgtgctacatcgttgggaccgtgtgtgggcaaacgtactgtctggtcacccatgtctgctaagagccttcatctcacccttgcagggtggccctggccggactcctgagctctggggtcacgggccgctgtctcctgagggggccgcacactgcaggggccggggcggtcaccctgtctctccggaccatgctcaggtgatcttttgggtgtccttgcggcccagaccgcactgccccctcactccacacctggactcaggcccgccactcagatcccgcgccgagcacccgtgatgtccgtagacagccaagtggttgttgacgacacagggatgtgttktwttaagaggaacacgttattgccgagagggttttcgcctccactgtctyactgacccgggggcaggtgatgtttcccccactcctgccacacccagggaggaaagggggcttagagagatgaggtgacttgtccgtgaacgcacaggcagtgtatggagcctggaatcactcccttcctcctggccccgtggcggcgtcatcagtggggccgggcctacgccgagtaggattgtcctcctggcttggcctgggcctcaggggctgccttgtttaatggtgaaatattagtccctttttgtgggttttttaaagcctgaaaatcccaacattggttaactgtatttgattcattgtttagaaagaaaaatggctgtgccgtgagtccctgaaggaaaagttccgaagctgcctccagtccctaaatcgagagttgctgcagagtctggggcttggggtcctcggtggcagctgtgcagggcccagacccaggccagctcctcactggggcaccggtccaggtcgggcaggagctgggggaccgtgggacaggggcaaggcggtggcagtggggagatagtggggatgggggcgtggcaagggctgagcagctgggagctgctctgaggccatgggtgccctcaccgcccctcgcaggctgaagcccctggaggcccctggctctcacagtgaccctgttagccacagcagggatggggttgggggcttgggggcggggcagtggcatggcctctcttcggcctgccttgattttaagggcttttcatctgaggccatgggaaggctgtatgttcagggatgaacacgggtgttcagggacagacgcacacgtgttcggggataaacggacgttcagcagtaggcgtgtgtgtcccgtccgctgtgtgtgtgcttgcttgtggttaagctgactgtgtagcttgcgcaggggcaggagctcaggtctgtaggggatggtggcttcgctcacctgcgtgttcaacacgcacccgtcgcgcacttccatgttccgggttctcaggtgcagggcaggtgtgacagtgcgcacaggcctggcccagcccacctgagctcagggtgcgccgcagggaaacagcatgaggcccagttgcactgcagggaaagagcgtgaggcccaggcatctcaaacagctctgtggacgccacaatctgtgccctgcaggaaaagagcatgcggagaacaggagccagagactggagcgatggagaagcagggtgcaggagaggcagctggaaagggagggyggctcagggccctggggcggggctgggaccaggtcaggctagggccagatgcagctgcagtggcagccaggccggggcacccagcagggcatgaatatcccaggagagagccctgcctcagcycaagtcttgctgtgggagcatggagatctgtctgcatggccggggttatcctggacggggtagcaggagcggtgttggcatacacaaccgaggccagcctgggaagaggctgcttggggttcggggaccctacagaagcaccagggctggcgtctcttcctcctgtggggtcttcccacgtgggccagctgcctcagctgtgcaggggctggtctcctcagggcagtgctgcctggtgcctgcgggtgcttggtaaacagctaggccccggctctttttttttttttttttttttttgagatggrgtcttactgtgtcacccagcgtggagtgcagtggcgcaatctcggctcactgcagcctctgcttactgggctcaagcaattctcctgcctcagcctcccgagtagctgggattacagatgtgcgccaccacgtccggctaatttttgtatttttggtagagacagggtttcaccatgttggccaggatggtcttgaactcctgacctcarataatctgcctgctttggcctcccasagtgctgggattayaggtgtgagccactgtgcccagccccaggttcctcttaaaatcatcccaggacacagatgggggtcaggccggcctcactcacgggagaggtcccagagggaggtcacagagcccaggcccacagagctattccaagcacctggaacagtgcttcaccaatcatgaattccacaagagcatcttccataggctactgcgtcctcgctgcctggaacagtgcttcatcaatcatgagttccacaagagcgtcttccataggccactgcgtcctcgctgcctggaacagtgcttcatcaatcatgagttccgcaagagcgtcttccataggccactgcgtgcttgctgcctggaacagtgcttcatcaatcatgagttcyrcaagagcgtcttccrtaggccactgcgtcctcgcttgcctggaacagtgcttgatcaatcatgagttccgcaggagcgtcttcaataggccactgcgtgcttgctgcctggaacagtgattgatcaatcatgagttccgcaagagcgtcttccataggccactgcgtcctcgctgcctggaacagtgcttcattaatcatgaattccgcaagagcgtcttccataggccactgcatcctcgctgcctggaacaatgcttcattaatcatgaattctgcaagagcgtcttccgtaggccactgcgtcctcgctgcctggaacagtgcttgatcaatcatgagttccgcaagagcatcttccataggccactgcgtcctcgctgcctggaacagtgcttgatcaattatgagttccgcaagagcatctttcataggccactgtgtcctcactgcctggaacagtgcttcatcaatcatgaattctgcaagagcgtcttccataggccactgcatccttgctgcctggagcagtgcttcatcaatcatgagttccgcaagagcgtcttccataggccactgcgtcctcactgcctggaacagtgcttcatcaatcatgagttctgcaagagcttcttcaataggccactgcgtgctcgctgcctggaacagtgcttcattaatcatgaattctgcaagagcgtcttccataggccactgcgtcctcgctgcctggaacagtgcttgatcaatcttgagttccgcaagagcgtcttcagtagcccactgcatcctcgctgcctggaacagtgcttcatcaatcatgagttccgcaagaacgtcttccataggccactgtgtcctcgctgcctggaacagtgcttcatcaatcatgagttccgcaagagtgtcttccgtaggccactgcgtcctcgctgcctggaacagtgcttcatcaatcatgaattccgcaagagtgtcttccgtaggccactgcgtcctcactgcctggagcagtgcttcatcaatcatgagttccgcaggagcgtcttcaataggccaccgtgtgcttgctgcctggaacagtgctggatcaatcatgagttccgcaagagcgtcttccataggccactgcgtcctcgctgcctggaacagtgcttcattaatcatgaattccacaagagtgtcttccataggccactgcattctcgctgcctggaacagtgcttcatcaatcatgagttcygcaagagcgtcttctgtaggccactgggtcctcgcttgcctggaacagtgcttcatcaatcatgagttccacaagaaygtcttccataggccactgcatcctcrctgcctggaacagtgcttcatcaatcatgakttccgcaagagcgtcttccataggccactgcatccttgctgcctggaacagtgcttcatcaatcatgagttccgcaagatcgtcttccgtaggccactgcgtccttgctttctggaacggtgcctgctgctgggtcctccttcccactgcaggacgtacagcgaggctggagcctgagacagggttccctgcaccctgaggctcacgtagcccggccgacctggttctgcrtgggtatagctcaggccccggggaagggcggaagtggacaggcagtgccctggggctgcactcctaagatccgtcggtacctttaaaaggttctctgcttgctctcatctgcgtgtgccccgtaacactcgaaggagtaaagaggatgtagagaaaagtaccgcgttttccttttccctccttctgaaaggcctgggccccggcatctctgtccctatccccgtgggtcacagctgtgtgctggctctccctgccctgccaaggtagaagcattttctgcgtttcaggctgtgaactgggcctcttgagataagtgctgtaaatgctcctttatcctgacatcccggccctcagtactgtaaagcctctctttcctgctagctagcctttacctaatggagcacaatttatttttattctgtcctcttcacagctgcctcctgtgattccaggaggaggcaggtgtggggctaaggtggtgagggggtggctgttcaggcaccagtgtcgtggatgccttcagccccctggtacaccccactgggccgggccctgggcagccgccgctgcatcctctctgactcccacttgaacacctgctgttcttcctcctctcttgcccctcaccgaggccttgagagcccatcagtaccaggcctgtgtccctgcatccctgcaaggtggtagcaggtacctctaagagggccggttctgcccaaagcaggggtcccaggggtgtggaggaggggmccgaggagggccggtatctaggcagaggggagttgctgcttcctaggcaggtgctcctggtcagtgtggccagagttcaacatccccgggcagggaaggcaggagccagggctgtgggtgggctgggctcaaggcctccctacggtttggctctaagcctggggtagccctggaggtcagcggagagggcctaaaagccttggtgaggccaccccagagagcagggctgcagagctgggctccctccctgagcacccctggcccagcaggccttgagcacacagcgagccgggctgggcaggggatgggagcgctgaaggctgcaccactgtctcgcctcagcccatgcactgctgttgcaggtcgggcctgagaacagcctgggcagtgcctatgtggtcccagggctggggtcgggcacagggctgtcgcctctcaccctgggggtctctgccactggcttctgggrtctctgagaggagcctgcccaggatccaggcccatagaacccagtccrgaggaaccccgggctcttggctcacttgggaggagaccacgtgagagcaaccgacaagaaagcaatgacatttccaaggcggaaaacccatcttttatttatttaatccaaaccatcgtgtgaattattcattcacgttgatgtaagccactgaactacagggataaaggggggtcagaacgctggcttgatctgccccaaactgaaccgactccgtcgaggcagccttgtctggaggatggacccttccctacgtggacaggagaccaggatcagggccccctcacctccgagggtctgtgtggcatggaggayggacccttcccctccagggccctgggtttgkctgtcagagggtgagagagtggccccaggagtgagtgcggcggcccatgctgctcccagccgcatgggtggtggtctcgcctctgagagggggccccacacactgccttcctcgccctgggacctcataccaacctgctatgggtgggcaaacacagcctggagccccggaacttccagaggtctgtgagcggcacaggcagctttgaagtctatcggaaaacagggctgtttccttctccaaggtcaggcttgcatttattaccaaaatctaattcttcccctttggacgcctgagatctatcaaaggcagcacgggccatgttagggtgaaatatggcctctgaaatgtggtctctgcgttcttccttgtgcacgtggcaattcctgctaccgatagccccatcttcgggaggatcagccgagggacgcagggaagagtcttggggtcagagctgccaattagccttcagatttcacagcctgattgctcgattcatcaagggccccagcctcgtcctgctggaggggctgggccgtggaataacagtgtcccccagggccgtctttgccagcaacggagggaggaggccaggttggggcgagggctgaatcagtgccaatgctgccatcccacaggtggatgggcgccagggcccctctgctgacaggcctgcggttgtacaggccccatatcctcccagcccctgacatctggatgctgctaacgtggtccctgcaccgctgctccttccagaacccatggcaggcagcgcccttgcttttgcagctaagcagcgagtctctgtgagcctgggtgtcattgtgtgtggattggggatcggatcgtgttcatagctgtcatagccaggcagtgagtgagcttgcactcrgaacgggctgctcgactgagctcacgccatcgggggtgcccagcggccctgcgctctcggcggtggcctccggcacgtgatctggcctaacacctctgaaggcagctgcctgcctgtgtccgtgttgcaggcagaagtcctgggagatggggtgaaggggtaggttcagagtcacaggtcagggaggcagagccgagctgraaccgcggcccctcccgcgtcctccatcttcctctgcagacttgagggcttctggtttgcacctggctcccctgtccctgctcacctccaggaagcaacctggactgcatcgtccaccttaaactggcccatcagagcctcttcgggccgctgtgcacaaactccccggcagcccctctctcactcactgtgacctggccagcaggcactcacactgcacctttcctcacactcccctagagtggactgtgggggaccccacaccctttctggggccttcagactcatctctaactcaggaccagcctccccccgggcgctgcctggagttggaacccttgttctctccaaccatatggccrtggttgactttaacatcctctttctcagcctagccagggagctgaccatcccgtgcctggttgtgggcgcctacagcagtcctgtgattcagtccctcgtcatagtggagggaggctagcagctggcccagctcccgtggcctgcaggatagggtccagcaggctcccgtccccgcctggagcagtcccaggcccctggagggctccccattgccagctccagacagcactgctgggaagcacccggcctaggggacggctctgtgtgcgtctaagtggagccagtcctgataattaacgcggggataaatcgaggtttaactacttggaaggcctctcgggtgagaaattcatgataatcgctgttatcctcctgatggctctgcagagcagttcctccccaagcagccgtaaactctgacgggcagggtgtggggctgtaccctgaatagtcacttagagccatgtcaggggcagtgggcctgggggtgccggctgtcgtctcacgatggcctgacctcagaggtggctggcaggtaaagccccrgggcagtaggatccggaacgtcccggtggcctcctgcctgcctccctgtttgtcggtgctggctcctgtggggtaggcgtccagcctcagaaaggacccaggcggcaacctgggaatggatggtcaggatcactgggtggcgtggcagcccaggccttcgctttgggacccacatcctcagcaccggctcctcacgcggttctcgcctaaatccccggagtgttggggcaagcgaaccccgagtcacgcctgaccctgtggcttcctgaccctgtggcttcctggcagtgactgtgctggctccaggggttgtcattctgcaggccgagggctgatccctgtggaggggccctggctgcttgtagtctggctctcagagttaccgttcttaatgcagtaactttattattgccaccaccagagggtcagccgttatcagctcacccctcactcccgttccctcatgcatgccgatggaggctggctggtgtgacacgggggcttgctgtgtccctgggcagccgccactcccacctgtactcggcttcctccctgccctggccgctcccgggtccccacccctccggcctggtgccrcactcactgtctccttccgtccctccygcagagctgaagaagcaggtggagagtgccgagctgaagaaccagcggctcaaggaggttttccagaccaagatccaggagttccgcaaggcctgctacacgctcaccggctaccagatcgacatcaccacggagaaccagtaccggctgacctcrctgtacgccgagcacccaggcgactgcctcatcttcaaggtgggtcctgcrtgtgacggctctccggctgtctcgctctctgtctcctccygtggggagatccgaccgtagccctcagcaaaggagcagcctcgcgtccaaaggggatggtgtggagggctgggcgggaaggaggtgcactggcccgtcctcgtcaccccctgaggcttctcagccttgggccaaccctatgtggctttgcagccctggaccycctgggtgcagaagaccctaggctgtccccctgacttyctcagcctctgtctgtcgcaacttgggcttcgttccatgagggctgcggcygtaggcgtgtgtgtcagtgtgtccagaggcagyggtgcctggggaggactgaagtccgtgtggggccggggcaggggacgccttccaagatgccaggctgcgcagtgggacagcgcagtcccagargccagcacagggcaaggtagacagactagaagaggaaaggagagccagccgcatctctacactcgcgtcctgcgagccagcaggcgctcttctggtttgctggtgaagccagactgggtccaccgttgtggacatgaagagtcctcgggcgagcggggtccaacagcagaaattggggtgttatgtgttgaccctcagggtggaggtggccccacttggacctccagcagctggagacccagggcaacaggggcttgttcatcactgccccggtgagctaacctccggtttgtgaggatggtgccgtcggcctggtgtggcattgtggccccggcatgacctcgtggccccgtcttggcatgtggctgcttcaggaagggtggagggggcggtggctgtgggagatgaggacaggcagagacgggccccacctgggactgctgtggtctggaacgggcgtctaaactgcctgcagtctgcagcctctgcgtgtctttatggaaccgagaaccaactttgatttgtataaaagctgtacccagtgcggcctacgcatgtccgtcagcgtctcacagcggtgagccgctgcctgtctgattcagccttagcccggctcttcctcctccttctgcacaacccgcccgtcttcacagcctgcgctgcacgggggcaccgtgccgggcttgctctgcgttccttgtggatttcctgcttctcagatcacagtyatccatttctacactcttgaaactctcaaacctttgaataataaaaacacaccaagtctttaagctatcagaaatgtacttcttcgcttttgtataattctgtatactttgaataattcacagaggtgtttaatgcattatacgaattccataggtttctaaaatgattaggtattaataaaggtgtaccrtgaacagttatcacttaacatatcactcgttacatcaacatttacaaattaagaggcagcgttttccccggatccctgcgtgtgctgtagttgaagcgaatcttaggaagactaactgcagcggaaccttggggcaccctccacagtgttttctgttgagagtgtcgaaaatccaaaagagggaagcaagccactcgtcatcttcccgcgaaaggyggccgctgtcctgcttcgccgtgtttcctttcggtgtttcatacgtaggcacatgcctaggcatgttcatttacacctgggaactcgggatcctggggttccattgtgtgtgctcctgtgtcactttttaaaaacaccgtcagcaagtagcatcttgaccactgtaagccctgcatgggcttctgaagcgcagccctgcccaatgtcctcaggtttgctggacaccaggtccatccccgtcataccctcgagcatgggccctgccgctcttcctgctcgagccagcatctcagctcccccggccctcatccgcccgcccaggatcccagccatggcaggatgttgagaccagaaggcttgggctggcctcagcttgccagtggccggactttcagcccccatggcctgggcaggaacccctgccctcctttccgccttggagccctctcagcccccaggytcctgaggtcagggagaggcaggaagggggccccaggaggaggaggcaggcggacagagagcccaggagctggccagctccccagccctgctcgccccaggcctaaaggacacacagcgtacgggaggccgggctcgccctgaggagccgtggttcctgcaggggtctggcctgggccccgcagctcttgccaggcatcctgcccgccttcctrgactcttgtgatctggagccttggcgcctccccaggccgccccctcactgcccatcctccagcccttgctgtcccttctttccagtggcaggcctggcctgacctgaccttctggaccacggcctgtcctggcccaaggcccgtgtgaatgtgactttgcaggtcctgagggctggatgtgctgggtcagaagccatggagctgaggcagccgcctccggaaggacagacggtccactggcccagtgctccaccagcaaggcctggtgcccgcagaggccccgctccccacccttccggccacccaccatgcctgctctgggccrtgttccgggggctggctcaggtggacartgtcagggaacgaggttgcttttagcttacccactttccccatgtgtgacatgcactgtgttttcatgcttgaagctcacaggatcagggagattaagtaaagtatggaagggctttacaagttgatgtttgcaggcggggctgagagctgcggggtgggcctggcatggggagctctgggcaacccaggcagggggctgactctaggtgagcttgtgggctggtgcccaagtgcagctgttgccaggggggtgctggctgggcctctgcctcatctgtaaagcaggtacagttacgtctgacccacaggagtaagtggggccatgttcctggcacatccatcatggttgccaagaccccaccttggtccatcggtttcatttctgagcagtgaagtccccgcaggaagaagctgccaacttgtgtctgcggttttccctggaaccccagcatcaaggcccacctgctccatcctcttcacctgggcccagctcgcttgtagacaccttctccaggaagccctcctgggttccccagatgtgggacccttcttccgctggcttccctcctaggacacgtgccaccttgtgtttttcctgacaggcgagtctgccggaggttttatcctgttgggttcgttgtcccttgagggtccccagggggcctaagtgtgcccctcctgtgtttctcccccactgctgggtgcctggttcttaaagatgcttcttgctccatttctccctaggcttcttttcacagcctctttcccccagcctcacccaacccccaccctctactcctgctcttcctcctccctctcccactcctcctccagactctgtcctgcccagctgatgtgccctgctagcagctgtgcctagcaccccgctcgccccctcccctctttggagggctggggcctcccagaccttcctgcgccccatctggttgatgtggagggatcgcctgctggatatgggcctttagagcatgttcatgagggctgacactgggcatgcagcctcacctccccaagtttcagtctcctcacctgtggagtagaagtaactgtggctcacttcggaggctgcaagaggcaagtctcataagtgccacctgtggagctggggaggggtcatgttgcaccgggatccctgttggctggttcagctccagcccacggtgcacccgtgcttctcccagagctgtgactagctctgccggccctgtgtgtcctggtccctgcagaccttctggagggcctgcaacatttagggagctttcaaaggctccctgtaagccgactcttcccaagtcctcctccgagctgcccttcactgggtgaggccgttggcctcctgagaaatcctcccccttgggttccaagaagacagcgctagagctgccaagtcttctggcaggagctctgaccaggagatcagcatcagtcctgccccatccacctgtcattcctgcctcctttgtatccaggacaccaagcttggtgacaggagaggcacttgtactgttcgcagcagctccacgcccccagctcagggcctggcttatggagagggcagtctagggctctgccagacagacagaaaaacaggtttcagtggagcaaaagggaagagacaaacagtgaacagacaacagccaacctgtagggccagggctcatgttggcacctctgcctgcagatggtcactgactccttggggccatgcagcggtggccctggtctccactgtccagaggagagataagagacactgtggagtcaccttgtcccgggcagctcctgaccctggtgtgcagccttggccaggccactgcactcctgtgagactcagtttccccatctgtcatgaggaatgtggtctgggtgctccctgggggccctgaccctggcctcctggcttcagaaaggcatcctcagggggctgagcatcactaggtgtgcccaggagggtcttccctgagctaccctcctgagatagggccacggagggcagagrccagtgtgggagggcagggagagcagggagacaggccccctgccccacccactccacctgggggctggcatacgtggctcccgtgctcctgaaagatctcgccaaaccccagcctcctggccatgtcatttattttatcagattttcccccaaatgattcttcaggcagaaagggggctgcagacagagttagaaatagccgaagccgtttccagtcaagcgggttccacagatgtgtgctgggataattgagggtttgccgcacagtcccccgccactctgcttcccatcccagccaggacttcccatcccagccaggacttcccatcccagccgggaccaaacctcttgttgccgcgtgggtggagggagctggctgcctgggctgccgtttgggggaaaggcaggcaaatctcagctccagctcttcccagcgggaacctgctgcctctgctcctctccctcctgagaggggatagagattccagagtccctagagcttcctgggaaggccatactctgcctgggcctggagyggggaggctcagctcctggtctctccatcccggctgcactcctcccagtggttctcaysgaattttccccacctcccttttcccctcttctcaaaacccagggaaggaagccttctgttacgagagggagaaaatcagtggtaagaagaagtggagtgaccaggccggggacacagagcaaatgcagtttggggcaaaaccgtgagcttctgggatctgggagacacactggttccagcaggctcctcattccttgctgtccagggccttccccggctcagaggcctgcagggtgggcgtcagggccagaggcgtggacggcacagattccggaactgcacaaacatgtggcgatgtcgacctaccgggtttgtcatatggatgagggggaaaggtatacaggtccagcctccccgattcgaaaacctgaagtcgggaatgttccaaaatccacagctttttttattgtgggtctgtcactcaaaggaaatgcttaatggagcgtttccgataccagattttcagattagggatgamtatttgcatgagatgcttactcaaccagtaagcacgtaatacagatattctgacaacckgaaaatctggaaatcccagacacttggtcccaagcgtttccaataagggatactcagcactcacctgtgtgtatatgtgtaagtctagtacggtctcgctttgccagatgacagggatgcatgctgaggaacgtgctggtgggcagtgttgtctttgcgggaacttcctagaatgacttgtacgagcctgggccgtgcagcctcccgcacccttgggccgcatggtttagccggctgctgccaagctgcaaaagtgtgcagtgcgtgactgtgctgaatgcagtagaccaccgtggcgcagtgctaagcatctgcgtgtctgtacgtgtttaaatatggaaaaggtgccataaacatgatgtatgaagggtggaagacggtgcacctgcgtagggtgctcaccgtgaacggagctcgcagggctggcgggtgctctgggcgagctggtgaatgagggtgagtgagtgtgaaggcctaggacatgagtgtgcacaactggagactataaatgccgtaccacttaggctacactcaactattaaaaataytgttcttttcttcaataataaatgaatggctgggcacagtggcctgtgcctataatcctaacatttggggaggctgaagtggggggatcgcttgagcccaggagttcaaaaccagccttggcaacatagcaagaccctgtgtctacaaaatatttaaaacttagccaggcgtggtggcgcctgcttatcgtcccagctactccagaggctgaggcgggagaattacttgagccccaggagttagaggctgcggtgaaaactatgatcgcgccaccgcactctagcctgggtgacagagtgagatcccatctctaataataataagaataaagtttgttgtaactttttgagtttataaactttttaattttatttatttatttgagacagagtcttgttctgtcaccaggctggagtgcagtggcgcgatktcggctcactgcaacctctgcctccctggttcaagcgattctcctccctcagcctcctgagtacctggcattacaggggtgcrccaccacacccagctaatttttttgtacttttagtagagacggggtttcaccatgttggccaggatggtctcaatctcctgacctggtgatcctccctcctcggcctcctaaagtgctgggattacaggcgtgagccaccgcacccagcctattaaaatttgttttgtataacacttagcttaaagcacaagcacatcctacagctatagaaaaatgtttttgtatagcagccttcctgggaagaagaaatagccccgcacccctcgtccttgtgctggcccggggtgtcgcttctgtgcacccttttttcccctctgcccatccttgctgcccctgccggacctcagcaggggaaggggaggtggcgcagagcccgctttctggcgtctgtctgatcccgccgaggtcccgcacagagcccgctgctggcgtctgtctgatcttgctggggtcccgcattctcactgttgcatggactgtggaaatcccagacaggaaggctgtgcacctccccaggaaaaatgagaacatgggcgtcagacagggtccagactcctctaccacagcaggttggccctgggaaatgacttctggcctcagctccccaaggacaaagtggggcccgtgagcaccccttctcaggtgctgagcgatggagagctgataaaacagcacaggyggccttggtttcggggctccctcctcctctccccgacatacctgtagtggccggcacagcctgggcctccgtggaaactggcaggatgggcttgcctggtgtctttgcctgttatgttgctataaaggaatatctgagactgggtggtttctagagaaaaaggagtgtatttggctcacaattctggtggctgctaagttcaaaagtgggcacgtgtgcacctggtgagggtctcaggctgcgtccactcatggcgggagatgaagaggaaccgcccacttgggcagagatcacatggcaggaggccaaaggggtggggtgccaggctccttctaacaaccagctctcatggaaacagagagagacctcactaattccctcaaaggcagtaccaggctgtgggtgaggcctgtgaccccatgacgcagacacctcctccccataggccacacttccaacattggggatcccatttcaatatgagacttgtcagggacgtaccaacagtacccacaccagaacacgtggtcctggggtgagaccctcccggggatccgagcccaccatacccacaccagacagagcgtgtggtccaggagtgagaccctcccacggatacatgcccctcccaggagatgattccccattcttgccatagagaggggccaggaaggcccaggtcctgtgtgtcttgagagtggaggcagctccacctcccagctgccttcacagccctgtgggtgggcagccttcagggcaccaccagcctggggcccagagcccagctgttgctgtggcccctgacgagctgtggcagcaggccccccagctctgagctttggagtctcatgggtggctgggcctctgcctgggtggggtgaggggaaggaattagctgggtctggarccaccatgcttgcttagaaggtgaggaagggccaagccacaaacatggcaggctcagctgacagcagcatccggcctgcagaggggacgtggcccaggtcctgcatgagtcagcccaggggaaagaagcgtgtaactccaagagcctggctgggtgagcctacggaggccgcatggctgagcctgttgcctccgtgaagcatctctctgcgttgcagggaacataggagactcggtgcaggggcagctccacttggggagagcattttcagaaccaccggtgcaggcctggccccgacaagcctcaggatgtgcagctgggctgctgtggagcccctgggctgggcctggcctagggtccagagctgctggggtcctcctgagggaccctagcagtacagaggccagggaaatggcaagagtgcccgtgaggatgccaccttttctgggcacaccagccacgccatcccccagcctcctcagcatctgaggccttgcccgagtgtttgctgaatggaggtggtctttggcggtgtcactgctagtcagcccccgtcgggtggtgggagggactggacccgggccagaactgccttggtgtggatgtcgcttgcctctgccarccccgggacctggacacatggcttcacctcctcaagccttgtcttcctttatgtgggccaggatcatcgcatctgcccaagggtcgtggtgacagtgaccttggccagtatgtatgcaagtgccaggcacgttggggaccccgtatgcctgccacattgcsctgagtggatccctgccactgtctgccgacatcaggccacgaggatctgcaggtcagtgagtgcatcatggaagctttcatggctcatcagtgagaactgcagggtgattgcrggaggagcaggtcgacctctcgtgtcctaggccctgccctcgcactggcatcatgcacgctcccactgacacatggacacaaatacatgcccacgcatgcacagccacccacatgcatgcatgctgacacacacatgaaaccacacacacacatgcatgctcacacatgcccacccatgcacagccacccacatgcacgggcagccacacacgacacacacgcatggacacatgcacagacagccacatacacacatgcgcgcacacacaggcatccacatgcacgcatgcatgctcacacatgcataggcagccacatgcacgcatgcatgctcacatgtacagccacatgcatgcatgctcacacgcacaggyaacyacacacrcatgcacacacacgaacaggcagccacatacatgcatgcacacatgaacaggcagccacatacatgcgtgcacacacatgtacaggcagccacatgcatgctcacatgcacaggcagccacacgcatgcacacacacgyataggcagccacatacacrcatgcatgcacacacatgcacaggcagccgcacgcatgcacacacacacataggcagtcacatagacgcatgcatgcacacacatgcacaggcagctgcacccatgcatacagatgcataggcagccacatacatgcatgcatgcacacacatgcacaggcagccacatacatgcatgcacacacgcacaggcagctgcacacatgcacacacrtgcacaggcagccacatgcacacaatgctcacacacaggcacaggcagccccatgaacatgcatgctcatgcatgcacagccacccacacggatgaaggctcacacacacatgctcagtctcacgcatgcacacacacgtacaggcagccatatacacacatgcatgcacacacacatgcataggcagccacatacacatgcatgcacacacatgcacaggcagccgcarccaygcatgcacacacatgcacaggcagccacayacacgcatgcttgcacacacacgcccaggcagccacacacacacgtgcacacacacacrcacaggacgccacatacatgcacacatgcacacacacacaggcagccacatacatgcacacatgcacacacacaggcagccacatgcacacatggacacatgcacaggaagccacatacatgcatgtatgcacacacatgcctatgcatgcacagccacccacatgcattcatgctcacacmtgcacaggcacccacatgcatgcatgcacacacatgcccatgcacaggcagccacatacacgcatgcatggtcacacacacaggcagccacatacacgcatgcttgcacacatgcacaggcagccacatgcasacacacacgcacaggcagccacatacatgcacacatgcrcccacacgggcagccacatgcatgcacatgtgcacgcacacacagaggcagccacatgcacgcatgcacacacacacacatgcacaggcagccacatacatgcatgtacacgcatgcacagccacccacacacatgcatgctcacacgtacacaggcagccacscatgcgcatgcatgcacacacatgcccacacacaggcagccacatacacacatgcatgcacacatgcccacacatgcacagccacccccacatacacatgctcacacacacatgctcacagttggcctctgtctctcccaggcgtcccatgtggcacctgcttccgtgatctggatccagaggaggcagggaaagcaagtcaggcagcatgggcccagycggagcccccctagcctgagtgagtgtttcaagggctgtgaaggcccatggtatgcaaagcgccatgttagaaaaagagatgtggagtcttcttcctgttctcccygccgctgccatgcggtcactgacagccctgaagccttctcaccaggaacctgcggggcaggrctgtgtgagagaagcagcttgcggcaccaccttctggagtccggctgcacaccccaactgtccccagggagctgctggcctgggccaggaagggtgcagggctagggccacagacctgtgctcactcctcacctgctgccccagccctgcagcaggtctctgcctgtctgcacacagtgccatgtgcctggccacagctggcaccagcagagcagggcctgcccagggtcacccagatcacaggcccaggctcaggccttccttcctgccaggctggcccagggtcctgctgacccctgctgtcctggaagtgttgagagcagagaacctgcrcacgccyacacgcctgtttgcagacacagtgtggtgtgcgagccccaggtgggccctctcccgcccgtgccaccgtgctctcccactcagccgcccattcttgtcaccgagcccatgcagaggtgtcgactcatgaatcgaggacctgctgtcyagctggggcgtgttgacacaggctgagatttgcacaggatttatcactctcagatgaagcatccgctttgctgccaacgggtgtagacatgaccttggtagctgccctgttctttccttctgaagcaggcttgtgaataagtgggcatatctgccagcccaccatctcccgtgcactgatcttgcacagatcaggactcaggactccaggctcttggaggggtacttacccccagaggacaagccccttagacagtgactagccctgtgccattccaggcccagagcttgccgccaggtgcccagaagtgaacctggccctcacagtgctgctgggctgacgagaaggtaaacatgcccacgggtctctgcaggttgctgggatgaggctgccctgatacgcggacgagggctggtgagggcccaggtggggcggtcgtggggtggaggcagtaggacctggtggaggagaggaggcagagctgctgctgggggcatagaatgggaagccaggcgtgtggcccccagggctggggccagagatgccgggcaggggtccctgctggggtgtctgcctgccctgctccattttcctcattcctttcctgaggagtgggcccacccggcctaggggccrggctggagggagagagacaggactggaagggccgagacagggagaggctctgggcgccgggctgccgagccctcggggatctgcctctgctccacggggcagcagtcagagccacggggccaggtgagtgggcaccttggggttgtcatggcaacagctcttagccagaggtggacggaactggggggttgaaggccggacatttgggagcccgtaccctgcagggccactcaggaagcaggagctacagcggcccaccgtgggacagctccacgtgtcacacattcscctgaaatctgcccttccgaccgcacccctgtggcccacacmcccgcagcccagccccctggacttctctcctgtctgagtgcactggcctctgcctggtgctcactgctgtgagtttgagcttcaaagccctcgttaagccctctccatctttctctaggcagagctgggacacagggtttttggggatagaccgagaacaaaggacccgcgagagggacgctgtggtgtgggcagagggcatgtgagaggcagcccttcgtggagctctgggcagggagtggttcctgagaccagttccttgaaagtagtgtctgtgtgtgggggcgtccatgcaggagcccggagccatctctgaggctggagcagcgaggtcctttctcttcccctgtcctgctatgactctaccacagggcctctgctcctgggtccccgccttgggtccagtggtgatgactaagtacttaggttgttggagaagtgtgctcaccattcacatgtatgggttttgaccaacacgggtaacttcatgcacagtgatccccgattctaaagctgagatgaactttgcctattcccggagggcgacgtgaggggtgcgcaccaccacactgtgtccccagagcagctgccccaagctgcagaatgccctctgcccccttgccccacggcctgccccgcctgcgtctgagggcgctgtggcctccctgctgtggctcaggctgcccccagggctctgacctgtgggacagcagacaggaggcctgggctgggggcctcagggcgcaggcgtggtccgctccacacagtcttcccatgtgggaccaggggttctcctccgcccactcagacaactcccctgctgcccagcccctctcgggctgtctcaccaggccactctcggtcgtctcttagacctggtgacattttggaacagaaataaagttcggcagtgattgggctgagaggcaggaagatgcaatgggagtttgggctgagggaaggtcagcaggacggcctcagggcctccatgtggtggggaatcccggctaggcccctgacccaacgttgctcctcaagagcattgaggcctggaactcagccagaggcgctgaggctgcaggagtccagggctcacctcaggcttcccaagccagaggcaggggagctggtggctgcccggacatgtgggtcggtggctaggggtgcactggtggatggccagagatccatgggtgggtggccaggggcatgctcttgggcgcccaggtgtgagggtgggtggccacgtctcttcagccagggcagctgcgagcagggctgtgccaccaaacaccgtgcatgcctcggctgcgtccctcctggccactggccctgccccaagtggagactggcccagccgccaactctggcttgcggtcccagtgctgcctcctgttggccacrtgctctctcgaatgagctgctcrctctggcgtggttgtgaggatggagcggtcagatgctggggagtccccagctggctctgcactgtgcagcgcggggcctgcggttcctcctccaggcttccttcagctgcacgcgattcccctggcccgggtatccaggaggctccctggcctgaccgtgtgtcagggtctgcaggtcagagtcagcttcgctcgaggctcctgctccggtcgagtcctggaactcggagctgggagttggcatctggtttgaagctgtctgggtaatagagacacatggtgccttccttttaatacggcctggggcacrcagactgccctctgagcctggacctgcaccctctgcctcggcctccgtgaaatcaggctttggaccccgcgaccccagccacggtaccctctttgccgccctggacagggcagaagtgttttgtgtggattgtgcctgaggaggttggagacatgagaggtcagggagttgtccgtcccctggtgctgaagctgaagtcagcgagggtctccgggacactggagcttggccttcaggcagcagccagtggggagctgggctgattcccatggaaatgggcatcctgcgggcatgggcagccctccccatgactcatggccccaggcattcagaagagactgctgcctctggaaagggagctcatccccggggccgtttgtgagtcacagtttggtgttaaggagctcctacataccaggggtcatttgtgaattaggattcgggtgttaaggagctcatggtgggggaaggggtggacatttgtgattcacagtttggtagtttgggttcctggggccgtttgtggcacaaggtttgttgttaaggaactggttcctggagtcgtttgtgacacgaggtttggtgataaggagctggttcctggaattgtttgtgacaccaggtttgctgttaaagagctggttcctggggccatttgtggcacgaggtttggtrataaggagctggttcctggartygtttgtgacaccaggtttgstgttaaagagctggttcctggggccgtttgtggcacgaggtttggtrataaggagctggttcctggagtcgtttgtgacaccaggtttggtgttaaagagctggttcctggggccgtttgtggtgcagggtttggtgtttctcaagacttcagttctctacatttctaaaggagcaaaactgccagtgccttctcacctcagcaccgacccaggatcagagtcacggccgccctggtgatggagggcaggcctgggtgtggaccccagcggtgggaaggggggcgaggggccatgcagcgggcctgtggcagggcagtggctggagcccatgtcatgcccacccagcagccttcttgctccctgtgcaggtgtgtggcatcctcagaggtgctcacgctccaggcctggctgaggaaaggaggtgagcaggaccctgtggccacgggtgttgctgataggaagtagttaactgacaaggccaccccagcagtccctgggagactccagccagagcaacgtcaaacacggcccgcgcgcccctcaccccttccctccctccctgacaggcaggcaaggccattcacagtctcttctgaagccttcccatctcccgctggagcaatgaggtctacacagacagcttaatttgaatttgcctctctgggtcccctgaattgagagtggagttgctttcaacgcatgctgacttcacgtcccatcttgttgcttcagctgtggttcaggatgtccaagcactatgttcgcgtgtgctaacatctcccaggtgccctctgcccggcacactcgcctcccgaggcaccccggggtgtgggcatccagcccagggtggggtacttgcagtaaggtgagctttgccctcccaaggctgcccctcctcatctcgtgccctggccccagccacagaccttcctggtggatgtgcatggtgaacggtgtctgcccaccgccaggttcaagcaggcggaggctcagagtgattctcggtcccttagagagggtgtgggggaggtcgccagctgtggggcccaaggacacgggcaagcctgtggctcagatcacccttctaccgtggcaccagccacacaggactgctgaccaaaatcacagcgttcctcatatccgcatagagaattcctcatggcttaatgaagtatgtaggagaagatgccagtggctcatcacccgtcacctggagtgagggggcaccatgggcctsgggtcgtgtctgctgccttcccaccacctctgcctccccacatcttcatgtctgtttcctggtgaagtcgggtctgtgacagatcgttttgtttcctgctctgtcccttcgacactatatcgtgagcattttacgctcaattaaatatttcctcgatgatggtgtttaatggttgcataatgtgctatttcgcagttgtgccataatttacttaaaatatttccttgttgtaggacatttagccagctcctctttttatttactcacctgttgatttatctttcgctgtgtaacaaagcatctcagcaatcatctgtccacacagatctttctctggctacttctttagattagggtcctygtagattgattattagtttggataaaattaattaattggataaattattaacccatttatgctggaggttgcaaatttttttgtgaaaaatcagaccttggcgatgaccttgaacaccaggatataaataactcccacaagcttagtgttccaataatggaacactaggcataaatgggttaattcaaatgcgtgaccatttaaacccatatttgagttgttttgcatctatttcagccatrtaagacttccgggaatgagacttggctcatctcgtgtaattctgagactgcagagctgggaggactttgtcatggctcataatcttaatgaaaccccaggtatgtaatggagcagttcctgtctccatcttatgaagatcagcacaccggggccctggttcacctaaggttctgcagatggacagggtctgagcaaagaaccaggcatcctgcctagagagccctctgtcagctcagctctgcagcccagacttcccctccaggctccaggctccactcctaagctgaaccatggggctgcagtggcctgggcagggagcagcggggaagatggggctgttcccagctcaccgtctctcagttccatctcttttctggatcccaggctccccatcagcagtgagatccctgcctccacagggtcctgtgagtgactgggacgccctacagcttgcctgccctcaggggcygggtgctttctgctgaccacaccgtacttcctcttgctttggaaatggcagtgaagattgtatgtgagcatccttctggggtttggtgtggggcccctgagatgggacgcacgcaggttcaagaactacactgtttgccaaattgagggcccactgtgactgcaggaagtcagtttgtagtgagyggggaaaggccaggaggctcaaggaggggaggactttggggcagcctggccatggccctttgtcatcactgtgtcgagtggcctcccttccttctgaggctccagctttcctcaagtttgggctctgcagggaggtcctagcagctccccagctcctctaaccaggacagcctcagtttctgggggccctgcagagacatcatgacctggtgcagggcttcccaaagctgtctgtggccccatctgcccagcctgggtcaccacaggtaggatccaggaacccgggtgttggcaggctcccaggaaacatggatgtcatcagcccaggtttgaggggtgctgattaggaacactgtgaggatacggaaggtgtgtccggttctcacctgtcactcctgtaggagttgtggcgagtcctagttggcctattccagcaactcttgtttaaaggaatatcctttcctgattgaattaccttggtacttttgttgaaaatcagtttgccggccaggcgaagtggctcacacctgtaatcccagcactttgggaggtcgaggtgggcggatcaccaggtcaggagattgagaccatcctggctaacagagtgaaatcccgtctctgctaaaaatacraaaaattagccaggtgtggtggcaggtgcctgtagtcccagctactggggagtctgaggcaggagaatggcgtgaacccgggaggaggagcttgcagtgagccgagatcgcgccactgcactccagcttgggcgacagagtgagactccgtctcaaaagaaaatcagtttgccatatgtgtggttctgtttctgaactctgtgttccattcaggtgaccttgtgctgctatcctgaatactgcagctttatagtaagtctcaaagtcaagtaacataagtcctccaattttgttctttttcaaaattatagctattctagatccacataaattttggaatccgcctgtcaatttctagaaaaaagcctgctgggactttgatttggattacattcaatctgtagatcaatttgggaagaactgacattctttttttttttttttggagatgaagtctcactcttgtcactcaggctggagtgccatggagtgatctcggctcactgcaacctctgcctgccaggttcaagcgattctcctgcctcagcctcctgagtagctaggattacaggcgcctgccaccacacccggctaaktttttatttttagtagagatggggttttaccatgttgaccaggctggtctcgaactcctgacttcaggcaatccacctgcctgtaatacaggcatgagccactgcacccggccgggaagaactgacattctaacaatattgtgttccaatccatgaaaatggtatatttctgtatttatataggtctttaccttctcccagcaatgttttttattttccaacatgcaggttatgtgtatttttaaaatacttagctttaactagttcatgttttcatgcttttgtaaatgtgctttaaaatttttattttccaatgtttcattcctaatatatagaaataattgacttttatatattggtctcgtattctgtaaccttgctgaatttacttattagttctagaaagtttttgtagtttcttcaggattttcaacatagacaattgtatcgtgtgcataaagttagagttttatgtcttccttttcaacttttatgccttatatttccttatcttgcccttcagtactggctaggaatttcagtacagtgctgaataagaatggggggggggacatttttaccttgtttctgatgctagcgaraaagcatccagtattttgacattagtatgctgttaaatatgagtttttcatagataccatttatcaggctgagaaagttcccttctgttctacttgctaagagtcgaattttgtcagtttttttttttacatctattgagatgttcatatgaacttamttattctgttgatattgtaagtaatactggttgattttttttaatgttaaacctaacttgcattcctaggataaaccgcactgggtccctttttatacaattgatagattcaatttcctaatttttagtgagaatttttgcatctatgatcttgtgcaatattcatctgtggtttagtttttcttgtaatgtgtttgtttgccttggtatcaggatgatgctagcctcaaaaatgaattgggaagggttccctcctcctcttttttctggaagaatttstgtgagatatttcttccctaaatatctgatagaattcactagtgaggtcatctgggcttggcattttctctgtgggaagctttttaaattatgmatttaatttaatagatatagaactactcagatgwtttttgagtcagttttggtcatttgtatcttcttgagtttttgcttattttgtgtatactgtcaaatttattggcataaaatcattcataataattcattattatccttgtattacccatagcatctgtagtgccawcccttcttccatttctgattttggcaatacatatcatctcttttttcgtcatcactctaagttttatcgatttttttatctctctcctttcagatctgtcaggttttgcttcctatatttttaatccctattttggggtacatacgcagttaagattgttatatcttcttgatcacttgcaattgtaattataattatgcaatgtctgtcttcatctcttaaatattcttgttctgaagtctgacttgagtaatattaatatagccactcctgctttcttacaattttaatatttatrtatacctatctatatttctaatcttttaatctacctgtgtctgtatatttttaatggattttttgaagataacatctaattgaatcttgctttttttattcagactgataatctatgccatttatatttaatataatttttatgacattgagtttaaatctgccatcttgtcatttgttttctttttgactcgtatattctttttttcatttttcttgcctcttttgggctgttttttggtattccatgttttctccaacattggcttattaattatacctctttggttttcttctgttttcgtttagttattgctctagggcaagggtcagtaaacctttcctgtaaagaaacaggtatcaaatattttaggctttgggagccatactgtctgtgtcacacctctgctgttgtagcacagaaggaactgttacataatgagctcaaatgtgtgccagtaaaactttattacaaaagcgggcggtgggccagaattggcccatgggttggagtttgatgaccccagctctatgtcagtctgttttcaaataatcttactagttaacatagagcattttaaaagtatttttccattttttctttttatgtaatttttacacaaaatttttttgtgaaattattttttcactttagagagtacattatcttctaaattaaaatgattcaaaaatgcttgttgaagtgtattcacctatttaaatacgtgaactgtattcacatatttactgcttctggcagtagtgttccttcctttgtgttgatccagatttccatctggcttttctttttcttttgcaggaagcacttccttaacatttcttatattgctgtcctgccactaacaaattttctcggcttttctttgtcccaaaatgtctttatttcgtcttcatctttaaaggatattttcgctggatatagaattctgtgttgacagtcattttttttaggcatcttaagaatgtttgttttgttgttttctggcttgcatgggttctgacaagaagtctgctagtagtcttatctttgtactttgtatataatatacaccccacccccagctgattttctttttatttatcctgcttatggttcattgagctcctcggatttatggatttatagttagtcagatttgggaaattttggccattatttcttgaagtattttttctgtccccctcccctttttccagtactccagttttacatattttaagtcactaatattatcctaattactgaagctttgaactttttgttttttggttctcaatgttttttctgtgctttaatttggatagtttctgttcctgtctttaagttcactgaccttttatcctggagtatcctacctgcccttgatttcatgcagtggagttttannnnnnnnnnnnnnnnnnnnttgtttttcatgtctaaaagtctatttggttattgttttcatatctttgttttctccttcattttagtagtctgttgctacgtaacaactttctccataagttagcacctaaaacagcaggcatttgttgtctcgtgaagtttttgaaattcaggaacccagagcagtttagctggatggttttggcccagattctcgtcagagggtgcagttaggggcttttgtcctgggttgcaaagctgaaggcttgacaggggccagatgatctgcccaaattcatttaggtggcccatggcaggagacttcacttcctctccgtatggacctctccataggtctgcttgagtgtcctcacaacatggcagcattcaacgcagagtgagtgttgaatgagttagaaagagacagacagagccagcccaagatggaagctacagtgtattttataacataatcttggagttgatgtactatcacagctgccctttttttttttttttttttttttgagacagagtcttgctctgtcacccaggctggagtgcagcagcactgttatagctcactgcaaccttgaactcctgggctcaagtgatcctcccgtctcagcctcctgagtagctgggactaccggtgcacaccaccatgcctggctccgccattttcaattgatcatgtaggccaaccttggtatgatgtgggaggagacagcaccagggtgtgactgccaggaagcagggtcgctcagggccatcctgggggctagcagccatccccttcactgtgttcaggttttcctgtaaattctgcagcatatttataattgctgttttaaagtccttgtctgctgatttcatcatttctggacttacttctattggctgagttttctcctagctatagaccacattttcctttttttgcatgcttagtaatttttgattgtatgatggtaattgttaattttatgttaagtgtatgaaagtgtgcaaatttccttgttctttctttgagagtattgggctttttctggcaagcagttaagttattttggggtcagcttgatcctttcaagaactgttttcacactctgttggggcttgtatggatttgcttttattccagggctagtttaactctgctactaagacatgacccttctgaggttcctagcagttgccctgggtgctcagcaagaacacctgctctggctggtcggcacgtgcctgtccccggtcctgcgtgacctctggagttgttccctggcagctccccgatgtgcttggttcagccttgtggagttgcatgctgtgtgcgtagagtgtattactcagcaactcagcgagacctttctccaggttgccagaagccttctgtgcacagctccgccctccacagatcctcccttcctctcagcaggaccatcatgctgagcttgagctgtaccccacagcgccaagcctggaagagaccattgggcagagcaaggggtgttcagaggttcacttcatttgtttctctgtcttcagagatcgcagcccagtgtctgtgaacagttactgtgtgtattttgttcatttttctagttgtttacaacatgctggtctcagttgcccagcatgacgtcccagatccacatgtgaggaggagcagcagcacgggggttccactgcgagctcagggcaggggtctgtatgccaggaacttgggtgggcttcatagacccctgtcattcccagaattatacaggcagcacggagtgtgcttgtgcacactttcctgggtggagaggcacacggcacctcacgcattgaagcgttgtggcccctcggggagttaagacccagtgggaggaggaccagggcggggggcctggagatggaaccgcaccttcccatgctgcctcgctaattctacaaatactgttgacatcctgtgcgtgtggccttgagcagaggggtaaagaccgggcagccctggcaggggctctggggccaaggacatcaccttctgggggtaggagcgagatgtccttccagagcctaggttttgagaggaggtcaccctggcctggttaggatgagttgtcatcttttagcttttggtttggtttctgtttgtgtttattttcactttttgccatggaaagttttaagcatatatataaaaatatggaaaacagcatcgagaagtccctgtgagcccatcccaccctcttcccccttcctggattattctgaagcaaatccaaggtatcgtaattaatttagctgcaatcattcaagtattgtagcatgtgtctctgaagggctggtgactccataaagccctaaccagagtccttttattgtggtaggacctggtctcggtgggtgaggacggtggggaaaggggcagcgtccggcagggtgaccacctgtgcgaaggagaagagagacaaagcacctggtgttggaccagacggggggctcgggaccttgggctgcagttgaccacgtgaggcccttagcctccagagaaggagctggtttaacatgaccaatggttgtggagaccttgcttcctaggtggggctgccatgccgctaccatcctcccgcataagtacgttacagagatctatggagccaaggggctagttcaccaaaataagacctggccgtgtccaccactctgctggtctggctggggytgccgtcacagagccccacggcggggggctgagaccgcaaacgtgtgtctcacacaattctggaggctgaaatctgagatcaaagggcaccggagttggcccctggggaggactctcctcccggcttgtggacggccgccccttgtattcctgtgtgacctttccactgtgcacttggagagctctggtgcccctgctggatcaggacccacccttatgaccttcatcagacttaacktccctccttaaaggtcctatttccaaatacagtcacatggggattaggttagtatctaaatttgggggayacagttcagcctgtaacagttgctctgcacagccccgctcggttacatcatagatgttcgcacacgtctgtgcacgtgaactacctgttatctgttgcacatgcagcgttactaaacagggttcccttatacctcccgggkttcctggagtggcgtcttctcttttgctgggaaccttgccgcctttcctctccctgcccctcccagcccgtgtgggccacctgctgtgttccacrccttcctttctcctctgcttgtgcagcggaaggttctgccagcaggggagttagtgagcagccagtggagggtgtgcccagccttcctgctgcagacccgcccccaagtcaacacggacttccctccctgcgtgccagaacttcgcgttgttcttagtggcatctggggtcgaggagggcgactgtcagccagttgggggatgttttcttcttggtctctcggcttctgcttccctgtgagctgggcagcctcagcccaggtcctatccggtactcagctggcctcggtgtgcacagcgcaggcttgagtgcagccgtgggggcgggcagggcagcagcagggcccctgggaacagctgagtctgaagggtcagaagccatggcccctgtggggggctctggggcagccaggggagctgctcgttagtcrtctctggggcagaaggaagggaccttcacctggattgggactgggcctgggtccccagtctcacagggagcttgtyckgattgtacctgcccagcctgccctgcagaggggaaggaggcccttggctcggagtatgcctgcccyggagctcccaggcccagccggggcccggggtgggggccactcactgggcacaggtgcagggtgcctatggccaggcctggggtgtggccggtctccatgctgcagagccggaggcctctgtgttctctccctgccytcccctcctccctatacctgcccctcctctctaccatcctacccaacctctctctcctggagccctccagccccacccctccccgtgtacactaagtgcccaggcgggagggcctgtgggtcctgctgagccacacaaggccccaatcgagcaggtagcaggtggtgtgctgcgagctgcttttccctcctgggtcaattcctaagcccaccaggcgatcgatgaagagccacctgcctctgggtaatgctgataggtgagagccactcaacagcgcttttatttttttttttaaggaagccgcactcagccacaagctgtgcggaaagctataggattatcaagatcaaaaggtcagccctccgcctcctctcctccaccagagcctcaccctggccacggcgggtgctaccctcgatgtcacggcctggccaccgtcttacccccgtcccggtgctgctgcaacgtctcctcctgagacgcttccctgaccatcccaagccacggtcaccccctctgtcctctgcactgtggcccagcctggccgtgcgatgacacggttgtctgccagtgtgtgtcacctccccaaagctgatgcgctggtgggggaccccgggtctcaccagccgtgcaccgagacggcctcgctgcactgacctctggcgccagccactgtctgctgggcagcctgaccttcgttttccatccccactccggtgcagatggagagcctggaacaccgtcccgggatccccggtggccaggcagaagcaccgaccctagcatggggtgctcagagaggcccgcctgtcctcagcctgggcctgtgtgtgttccacgcctccccaccggaactgaccctggcgtggggtgctccaagaggccctctggcctcagcctgggcctgtgtgctccacgcttcctccctggtgccgacttgatgggctcagcatccattctcgttcagccacggggagcagtttcagggccaggagtccctcagcatctggaggcaggataagccctgcctgctccccaaacacacgtctccccactgggcttcagggccagcttgggyttcggtgggggtgtccatcaggggtgagctgcggcccttgtcagggcacatcctgcacccggggtgcccactcccccatggtggtcgggggttacagtgagggaggcagcagtgggcagctggtgtgtyccctgccaggatctcccactacccctccatccaccgcagagccccctgcccagccccagaagagccccttggcccccatccgtagagagcccaggtgctttgcccgtacccctcagcactgtccagccccggccgtgccgtgctcctactagctctccaccagggctccccacctgcccctccccaccgcccctcgcatcctccaggactcagcccaaatgccaccttccttgaggcctccccaacctcctcccagagccctgcccctgctcccaccctctygctgtaattacaaccccatttagggctggcgctctctagcccattgaggccccaggacaggacccggactcgcgccccagcccgtgaggtccagaggggactccccagccggggatggggcctgtgagccaggctccctgcacacatttacggtgggggtcaaggccccccttatgaaaagggacactgaggcaggagaggctgcaccagaattggaaccgggcccaccagccccacggggggctcctccccgctcctccacggctcggcatgcagcccttccctgtgtgactcgttgcgtcattgctgggctgggccctttcttctctccgtttctcacctggggataaagtccccaaagtgggatttctggattaaagatcacggccatctctctctccgtgacagtttccggctttctctccttctgacgcgccccccaccctgggtgtttgaattgactggaagcgttgacgttttattgacgtccatcgcggtgtcctctccaaacagaacgatcctcactgtggagttcgatctcagcacacagaaggctcggagctggcttttcattcctgtgtttattcgttcagcaagcgtttctccatatcacccgtgtctggccctgtgctgggggcagatgagagaggcacggtccagtgcccaggagtccgcagccaggaggacagccctggagacctgcccgtgtgagtgtgagccggcgggagcagagagcggcctctgccctgggctgcgtcctggaggygattttcagcctggatcctgttctggaaagaaaggcctctcgttcagctgagcccagttcggtgtcgcaggcgactgttggatgccagacatgggctagacatgaacaggaggagctgcctgccctgaggctcagggcctgggagcagagacagacggggaagcygcagcgcagagggtgagggctcacccaggagcaggtgctgtggggaggcctggtgcacctggaccaggggcctcacttcctggggctcagggccatcggccaggcygctgggcatgacctgtcatctgggaaacggtgcggcagccccagtgtggccccgatcctctctatagagtgtttgagtcccaggcctgcagcaccccgtggggctcacagtgtgcatgtctgaccctgcaggcagccctgcggggtaggtgtcagcctctctgtcgcgggacaggggacagagggagcgcagatggcctgcagggtgtggaggaggctccccaaggcctggggcctggactgggctgtttgggcctgtatctgtcagcaggagctgccgcctgggagtcatgctggaacacagcagagcctggagatgagaggtcttcatcctgtctctccctccctctgctttctctgtcctgtgggctctgagccaccgtagttctgccccctctcttctcatctcctccacccccaagtgtggggaccctagaccctgtcccctccatgtcccctccacatctcctctggggctccgagctgctggccctccggggaagcctgcaccgccatcacaggtgcaggagttcagagtggcaggcgtatgttgggttcagcgtggcaggcgtatgttgggttcagcgtggcaggtgtatgttggcttcagcgtggcaggtgttatgttgggttcagcgtggcaggcgtatgttgggttcagcatggcaggcgtatgttgggttcagtgtggcaggcgtatggtgggttcggcgtggcaggtgttacggtgggttcggcgtggcaggcgtatgttgggttcagcgtggcaggcatatgttgggttcggcgtggcaggtgttatggtcagttcagcgtggcaggcgtaggttgggttcagcgtggcaggcatatgttgggttcagcgtggcaggtgttacggtgggttcagcttggcaggcgtatgttgggttcagcgtggcaggtgttacggtgggttcagcgtggcagacatatgttgggttcagcgtggcaggtgttacggtgggttcagcgtggcaggcgtatgttgggttcagtgtggcaggtgttacaatgggttcagcgtggcaggcttatgttgggttcagcgtggcaggcatatgttgggttcagcgtggcaggtgttacggtgggttcagcatggcaggcgtatgttgggttcagcgcggcaggtgttatggtcggttcagcgtggcaggcgtatgttgggttcagtgtggcaggtgttacggtgggttcagcgtggcaggtgtatgttgggttcagcgtggcaggtgttacggtaggttcaacgtggcaggcgtatgttaggttcagcgtggcaggtgttacggttggttcggcatggcaggcgtatgttgggttcagcgtggcaggtgttacggtgggttcagcatggcaggcgtatgttgggttcagcgtggcaggtgttacggtaggttcatcgtggcaggcgtatgttaggttcagcgtggcaggtgttatggtcggttcagcgtggcaggcatatgttgggttcagcgtggcaggtgttatggtcggttcagtgtggcaggcatatgttgggttcagcatggcaggcatatgttgggcaccaactaggccggatgtgacacatcgtgagctgccacctgcacagccttcctgccgacagttctgggcagcggctcgcatctggggtcagtcactctccctgtctcggttcaaggtcaggcttgttctgccgtgtctgggcctcccacacctcacctaccaatgtggactccgggttggcacggcaggggcaggggaggcacgggcgaggcaccccttggcttatgaagtgctccagccagccgcctgttggaccccgttgcttcctgggctcacagcctgccttgtgggacgagcctgggtcctccgtcagcagctggacctgaacctgcctgccccayggaggcacttgcgggagcccagtctaggtgtggtgtggcatcacctcctgcagggacagtcgtgatgtgttccatggagcccacgcacgtgatctccatgaggctgtggtcctcggccccctcaacccgtgctagtgtgacagtgctgattgacaatcgtagctcattaccgacgcaggctaattaaattacccttcggcagctggagatggatggcacagccaggctggaacatggttatgttccgttttgtcacgtttttcagtgttttttcccgggtccctgtgatactgaggttggagagaaggggaggcagcaaaggcgcygggaagagggccctggggaggtcacctgctcccagctgcacgtgggctgagctcttgcaggccatcsctgtgcccaaccctgggctggggatttaaggaaacctggggagtttaggaacctggacttggttcttgcccttgagagcctataaggtggagttcagggagagctaagagcctgcgccgaggtagatgctgggaactcagagaggcctctgggagaggctgtgggagggggtcccaggcaaggggtgctctccacgtgggctgactgctccttccctggcgttcccccgggcctctgtggcccccacagcagcgtgtgtgccttctccttgagacccaaccccgccccatgccggcagccatgggggcgggcgatggtgcctgggcatggatcgttgctcggatgttcccgtcccgggyctcaccgtccacgtgtggcctggaccagttgcgtcggtgccattcgggccccaccccagcctgccgagccagagcctgcctttcacagagccttgggggagtcctacacacgcgagggtttgggctgtgccgggctagctttctgcctggcgcggtgaggcggcgcttccgtgctcagcttcgtccgtgtggggaagaggccaggttctccatgcagagggttggtgtgccagggcttgcaccgctgggcccctgtgtggggaggtcacaccttcagctccttagctgacatgctggtcttctgggcgttcccctggtggtcgtcactgcgtcctgttggccccttggtgctgagccgcatccccaactgtgagaactctcgcctctggttaaggctgtgaacacgcagtgcgtgtcactcctacccggcatgggctgtgctgacttccaggcaggccgcaagggtatcgcatgacgcgctggagaaatccaagcctaatcccaggaccccaggatgatgctccatccctggagggacctccaggagctcccttccccaccccctgctgagcctgtactttctttgtgtaaattatccgtggggtggggtgggtgggaggcctcgctggggaggacagacatggagggccccactccagcagcacgcagcccgggaggcgcggcctgcgtgggagcagcccgggaagcgtggtgtgtgctgggcggcagcagccatggaagtccacgctgcctccacagtacccaggagctggggaggcagtgacttgaaatctcagagccaattccttaaaaatccagaaagttctaactgatttcggttatcagcaggtggggcttggctccctgttctgcctcaaggttatcttggccaaattgtccaccccaggggccactgtggggtcaggagtgctggtgtctggggggccacagtgcacctcgctgggctgaatggcagggtgcaggagggcccactctgagcgggcacggcagggacagtgcttacagaggtcagtaggggaattactgctggcgtctgctcagcgccatgtggggcagggcagggcactggccacacagaggacagatgtggagggcccctcagagacggttgtcgccccgtattagggaagacgggagaagcgagcacagacactgctctaattatgtggctctcatctgggcagggactgcctccgatgcatcgccatttatttttaataagtcgttggaacaacttcagctccaattattgtcccagagctgatggcaggggccagtgctcagcccgtccagtccctccaatgagggactgtgtcacctccctgtgccacccctcccatcccctacagccaccctgcaggagctctgccccggaggccaggaagcgtggcccttctccctgcctgcaggaggcctcaggcgcaggttcctggaatggaaattgggcccgagccaccggtagaatctggcagagtgctgctgagatgtgcagaagcctccgcgccccatggcccacctcgctcctactcactgcacacctgcagtgggatgcatggcccgctttgcactctgcagaagattgggcgagcagaagggccagatctgtcccaattcctgcggcccccagaggaagctgctgccaccgcctcatccagacctggagctcaggctgcagtgccgccttccatgctggaccygcttctctcctctacatcttccggggggggtcctgcggaggcagccagcacctcttccttgtcccacacttccttgtcccggcattcccctcctccattagccccgaaggcctctggagcttgggctgggcatgagcttcatgtgtgtccctggcatgtggtcagtgatgccaggggaggcctacggtgcccatgtctgtggcactgaccgtgccatccatctcaccagcttctgcctgcctctgtctcccacttcgccccagcttggccctagatctccaagtactgcagccgacctcagcccctcacccactgggccagcaggtgctgctgtggtgacccactctgcggtcaggagcccagcgggccctgtagtgagtgctgcccactacctcccctacctccgagctgcacctccccatccctactgcaggaggaccgctgtgggcatggagagcaggccagcacagtgagacgcctgcaggagcctggcccagccagcgctggcagctgagctgcccatctctcctccttggccctcaccgggccctatgtcgctgcctcctgctgcttccccagtcatggtacaccctcactgaaggccctcagggctcccgtcagcccgtggaacagatctagttggttttcacgatgttccctgcccttcacccctgcctgcccccaacgctcccgccaagcaggactgctctggggctggccggcaagaggtgccatggcctctgcgttgcctgcctgtccgcagcctcccgtggcgtctcacaccagcagcttctctgtagcgctccctgagcctcctcttccccacttaagacctctcctcagcacagtgcaccctcgtgtctctgccccagagactggaaccgtctggagggtggagctcgctctcatctcttgcttcagccctttgttcctgggagcatgytacggcctcagcctgcagtgggggcacagggagctttacagaaccagttagggttccaggagcaggctctgcaaggctccacccttgtcttggagggcagaggctgtcgggacccacagcgcaagggcctaggcgtctatctcctcccacctgggcacctggctcccagagcgcacccgggctctgcaccaccaacctgggcacctggcttccagcatgtactgaggccctatactcccaacccaggcacctggctcccagtgtgcacccgggcgttctggcccccctcccaccaaccagccctgctgagcatctgtgctcccacccacggtctgtcagggggcactcgtggtctctgacatggacatccctggctatcccaagagttttgcttcaaaaccagcatggttctccagacccaggaccaccccaccctcccctggggcgcatcacggctgtctgcctggcccattgcgggccgatggtgcctgtcacgctggcaggcttgtccagggcttccccgagggcccagtggctcactagaggctgtcatctggctcgtggagccccgaagcccccaggcggtgcacagggcctgcaagcaggaggggctgccattcgagagagagagcagtcgctgtagatcccgtagcagccgctctctgggtctgtgcctttgcgtctccaaggcagccagtcctgattaactgtgcaaacttaattagttcacatcaaagtttgtggaaggcattcctcaagggatcttgtgtgaacagcctctggttaccaagaggcctcaattccacactgaggtgatggtattaatattgagtatcccttctcaggtctccagtcctccctgcatcgtaaaaagactcatcttcccatctggctgctccgtcgccctgcgcttgtaaataatattaaagcaatttcttctgaggagactgaagggaagcttgcagggcagggtgtcctgagacctctgaaagctctgctgtgggcactcagggctacagccgggcagcagcagggctgggatgccccggggctggcaccaggcctgggggccccatctgtgcccggcaaggtcagctttgactcaagggacaggcagacaggccttgcagacccccaagagcttctctctggcccttctttccccaaggaggagccactgtggagagctggggtcttggtgggaagccttgggcccctgactctgtgggccagatcccatagggtgggtgcttgtgcacgcctcacgcatgtgcccccttccgggagtcccagacaggatgggcctggtcacctgctctggacagggcagactggggacagggatgctcccrgaaggrtgtcactagacaagtgagagcgtggtcagtgggcgtgaggtggggacttgagctgcgggcgtggtaggtgtctcagtgcttcagtgtggctatactagagctcctgagactgcgtggtttatgaggaggcttattcgacacaggattctgctggctgcagagttcaaaattggacatttgcatctggcaaggtcctcaggccgcatccactcctggcagaagtcgaggggagctgttgtgtgcagagagtacgcagcgagaaaggggcggagtgggggcggggggcaccaggctctcccaacagtgggaaccccctcaccccagggagggggccagtctgttcacgagggcccaccctcacggccaaacacctccggttaggccccactccagtatcgaggatcaggggtccacgtgaggtcgggagacagacgtccaggccacagccccgcatgggggaagggcaccgctgcagcagttctgggcatcagctcgtgtggatgtctaaggaatatttcctcgtcctgacaaattgcccagcaactgtgtcatggggactttgcaaatccaccctttaaagactcccggcaggggggtgttcagaagccagaagcaatttggataatgacccatccagccctgagccccagtcaaaaggaagggctggacctttgatctgcaggttccctggagctctggccaaaggcaagttcccccgagtcccgtccaggaaaggggccccgggtctgccctgcagggagccagtgctgagctgagacaggccatgagccctgcagccgcctcccctcctccttcaggtgttcaggtgtctctgctagcaacacaagtggccaggaaagcggctccccaactgtctgaccctcctggagaccctggcccggggtctttgttcctctgcaagtcccaccgggctgcgggaattcctccgcagggccgccccgtccccatcctggccagtttctccctcggctttcctcggggcccaggctggagtgcagtggcgcgatctcggctcactgcaacctctgctcctccagagtagttttaagcagttctctgcctcagcctccagagtagctgggattacaggtgcgtgccaccatgcctggctaattttttgtatttttagtagagacggggtttcaccatcttggccaggctggtcttgaactcctgaccttgtgatccacctggctcggcctgccagagtgctgggattacaggcaggagccaccgcgcctggccttcctcggggctttctatccttgggcccccgggtgcctgacggggctgcaggagcacgggagcccacggtgttccgggactgcaggccggccaccctccacccaggagctccagggagcggaggggcaagatggggcagggcagggcagctgagaacacaggctgagcccagcgcgtggggtgtgggcaggtgacggtctctgcaagcccaagtctcctcctgggtctgggggtgagatgtggctgaagtgctgctcaggggtcagcctcagtactggctcccgggccttcagccaggccgtgctgtgcgggggcttgttccagaccctccccaggactgaartgctgtctcatctttctcctcacagaggccctcagtggaccgcgaggtctccccgcccaggccttgtgacggccgtgccgctggccccgggcctgccggtagctgcctttctgcagccagactgttaacaggctctctgcggaccctcaccagtgcctaactagatcctggccccaggccttcctccctgccctctcgggcctgatgagccgcacccggcattcaccccgccctgggctccgctaaccccgtcttcggaggccgaaggagtgaggtcttcagcccgtgctgaggcggcctcctcgtgcgctcagatctggacgccacctggcttgcggggcttggggctccctcctctggttggggggttggatggagggtgcggagtgcagcgtcccctcccagcctccaggcctgtgcaagacggccccacaatcagcaaccaggcagtgaggaggaggctctgggtctccccaacacatgtgggacttgtctgatcccctgaagacacggactcagtctagtgcccatgggaccctgacatctgaccctgcgggcccctttctacggccggcaagtagctgtgggcccagagcccacctcagaccagtagatgagggtttcggtgaattgttttgtctcttttgagtttgttttcatcgtcactctatttatagcaagcactgttttttttcattttacagcagtgatgtaaagcttcctttttcactgggcctattgaagctaataaggaaagttgggttaaagaaaatactaagtaaataacaggcctgtaggcagaccgttacctagatggcagccacttgctggaccggccagggccgatgccctcagcctccagcaatgccccctgagtggatctgatgaactttattgtacagaggattctgacactgtgaaaggttgagagactcacacagcttgggaggggcaaggcagggagggagggatccaggtcggccctgctgcagtctcgggactctccggcacaaatcctcaagcccctgcctctggggtccccaccagacttcatgcacaggacagggacatgaggagggaaggcctctgtggagctttgccgtcttctagggcacagttcaaactgtggctgcttctgcctcccaggggacccgtggcaacatctggagatatttcagtcctcacagctggggccaggctgttggcctctggtgggcagaggcccggggtgctgctcggtgtgctgaggagaccaacccggagtaacctggctcccgaagtccagagcaccgaggctgcggggtgccgctcttggggacgccccagacacccctgagcagctccccgagtttctctgtggaggaaatgggtgggggtgtccagccatggctgatgccagaggctctgcaggtctaggaggccttcaagagactcacttctctagtcactctgcgtcccctgcatggcggtggggctctgaggctgagggcacaccccagccctctacgttcccagcagctcctgggctggggggccaggagtccctccaaccagggggcaggcrgagcagtgtccctccaaccagggggcaggcggagcagtgtccctccaaccagggggcaggcggagcagtgtccctccaaccagggggcaggcggagcagtgtccctccaaccagggggcaggcggagcagtgtccctccaaccagggggcaggcggagcagtgtccctccaaccagggggcaggcggagcagtgtccctccaaccagggggcaggcggagcagtgtccctccaaccagggggcaggcggagcagtgtccctccaaccagggggcaggcggagcagtgtccctccaaccagggggcaggcggagcagtgtccctccaaccagggggcaggcggagcagtgtccctccaaccagggggcaggcggagcagtgtccctccaaccagggggcaggcggagcagtgtccctccaaccagggggcaggcggagcagtgtccctccaaccagggggcaggcggagcagtgtccctccaaccagggggcaggcggagcagtgacgcttctgtttagaggcgtgtcctggcccttgtggcctttagtccccacctcagccccgttgtcactgggaaaggatagcttcagccaggtggagccatgtgcccagggcccttgcctagagggggaccagcccggtctcagcccagcccccaccggacccagcacctgccctgctccccagagcctagccgtggccgagccccagcctcagccccggggggtcaccagcctcctgcccgtctttggtggttgtggtttgaatatggaggcagttgtccagtcaggggcagggtgagcggccgcctctgggcttgcgtgctgggacttgtgcggtacagactgggtgtcccagtgacggcttccgaggggaggggcgggccaggacagaggtggactccatcggggcagctgctggtacaaccacctatagactagcccctccaggcaagacccagaactgggtgggagatttgacggccggcctgtctgccatgagctggagctgccggagagcccagaaggcacaggggtgacccagggcagccttgagctgtcctcagtgcagtgcccttgtgctcgggatgctcacggcatcccttcctgaggccgagagagagcacttcagagaatcytgagatgtgagcggaggtcaggccccggggtgatgcccaggatgatgcccaggggatccttattccctgaggccggcagccatgtgggtgcagtcgccagtagcccctgccctcggttaggcacccaagggagcccccaggcagagctgggcagcttcgttttccagaccttcactggggaagaacaaarcgttttgtgagggacgagggacaggaaacagaggccaccctgcaggttgtcacatttagggaaacagaggctgccctgcaggatgtcacccctagggagacagaggctgccctgcaggatgtcacctctagggagacaggggccaccacaggatgtcaggtctagggagacagaggccgccccgcaggatgtcacatctagggagacagaggccgccccgccagatgtcaggtstarggacacagaggccgccccgcaggatgtcaggtctagggaacagaggccgccccgcaggatgtcatgtctagggacacagaggccgccccaccagatgtcaggtctagggacacagaggccgccccgcaggatgtcacatctagggagacagaggccgccccgccagatrtcaggtctagggacacagaggccgccccgcaggatgtcaggtctagggacacagaggccgccccgccagatgtcaggtctagggacacagaggctgccccgcaggatgtcaggtctagggaacagaggccgccccacaggatgtcacgtctagggagacagaggcagccccacaggatgtcacgtctagggagacagaggccgccccgcaggatgtcacatctagggagacagaggcagccccgccggatgtcacgtctagggagacagaggccgccctgcaggatgtcaggtctagggaacagaggccgccctgcaggatgtcacgtctagggaacagagggagccctgcagggtgtcaggtctacggagagcaccagctgaggggctggggctgtgcctggggcctgtctcctccctcctctgcagggctgccactggcatccactccttgctggcaaggtccccatcatgggtgccataaggtccccagagaaaaacataaagtcctggcacctggggccactcagatcccacttgtggggcttccaggtgggatgcgctccgcctcgcagccacctgccccacctgtgggcagcactgacttttcaaagccctttgcacggtagccgaaacacatatccctgtggctctgccctgatccttccctgtgcagaatgagttggaatcaacggggagatgcaagctggaagggccgatatggagacgcctggtgaacctgcagccccaggaggctgtcgttgccactgtggcctggtcagggttctgatcatcacagctgctgcgcacccagctgtctgcctgagcgttctgggaagtggctcttccttcacaccagggggaggcaggctggggaagcccggcgccatctcccactgcctctctcaggcatctggccctcctgcgtgtggggttgtgtgtggaggtctgctccgtctctgcaggcctctctcaggtgcctggccctcctgcgtatggggtttggtgtggaggtctgctccatccctccacctctcccatgcaggccgagtcgggggacgccccccagatctgagctgtgtctgggtggcctttcagagcctcagtggaaaggcgtggtggtccaggtgggttgcaagtcatgacctgggccccctgccctgacctgggatctcccagaggtggtcaggccctgtccctgaagccaggaggggcagaggctctgactgcccgtgctcgtgaagcattcctgctgggcctactttccagctgggggccccttgccctgggaccccatggtggcctagtctgtggcctctgtggctttcctgtgggcctcgtgtctgtgtagcccatgcgtcctcgccaccatgtgccctgcgcatgttctcactatcccagtctgccctgcactgtggcgtgggtctgaccctagcagccccgccaggtaggaggaggcaccgcgggcgtcctggtgccgggacagggtcagcaagacctgaatgagtttcagggctgaccccaggacgcctgtccctcaggtgtgcagaggtgggggcaccacatgggagccggagacgccgtggacgccaccctctcacacgcagagcccctgggtrgaagggaggcctcagaaaccaaggatttcagagatctccaagccaggtggaggctgagccaaggcaaaaacaaaagccattcatcccctgtcatgcccagagtgggccaggaacggagttggggtccggccttggggtgcaactggccagcccatgtccccactcagatcccagcaccgctatctcctggttgtggcgagcaggggactctgcctgtgctccaagactcccaacactgccaccgacgggcgcgccagtgatgagttccctgctctcagcctgagcccgtgctgaggaaaagcaagcctaagaaattaaagcagcttttaaatgttagacctaccaattaaaaaaaagcagtcacatggaaaygtgcattttccagaactctgttgtttactccgtcataattaatacaggcagggaggaaagttcgggctctgtggacagcggttgccagcgtgggccacagccaagggactcggccctggggacgggaggaagggctgcctctgcaggttctgcagggccggggtggacaagagcctccctgggcccccagcctggaggtccccaggcaccacctgccttcctggactgagtggatgagaaagacaaggactggctgggacatcagagcctcagagggggcgtcgtgctggcctagccgggcaggcctcagatgtagcaggaccaggacgtcccccggcccctggtgagccctggccttgcccacactcctgtgtcctcttttttgctccaaggcccctcttcctcctgtccagctggcccagcccttccttgtcctttcccaggcagccctggtccaggggctcatcctcgggcccagccccctcacctgagccccgttcatcccagccgcagcagggcagaaactcaaaagatggcagcgaggggaccgtcctgttcctctgtctgaaaactcagctgcacacgcggggtgggggactgtgaggagtgcctatgtgacagcagaggcctgactgtgggtcatggggccagcaagggaccaggctgtggctggctgcctcccggggcatgaccaggacaccggcaggcagccctaccttgtgccgccccccgagcacagcaaaggcgggtttcaggggccctgagcactgagtcagaggctgtggaaagtcatcgcacccaccctcgcccgagacgtgggacagccgtgcctcctggtggggctgctgatgaaatcctcgggaaggtgccagtacggtccgcgctcgcggctcttgcctaagaaaccgtggctctggctgctgttggtgaggagtcctggaggttcccagagcctcgggcaccgagggggagaccctgacactgtcctgcctgccccaccagtctgctccccrcagctcctcgtcctcacccgagtgctgctggagggttggcaggaggcgtgaccagcagggtccagcacagtcagggtttcctggggggtccaggaaacaggatgagctgctgtgtggcmgctcatggtcagctcggtctgaaggcctccctggggacacacaggcagcgaggtccaggctccctctccctcccccagggtgacagagcctgggagaggcccgcaggagtccctccagccgttgtggcccgagaccacgttccagggttgggttacgygtggaacgtggaggcacgcggggtgcgcgtgggccctgcmgctggcaggaagcagggactggtctggagcgyggcggggctrtgccatcttcggggctgtgccatcttcccttctgggtttgtggaggagccgcgagcagctcctcctgaacttttctttattaatgaatcttatctctgctcacacagcacgcagcggatacaggccgcgggtgataagcagagagcgagcaggccccaatgagaaattacctgctcgtagccagcagattagccgacagctggccagcgggggctgtgggggtgggcggtgctccgcgcgctggttcccccttcccatcccccaaccccggcaggggmcgctggaggcagggggcccccacagaggctggcctgtggggactggcgggttcttccccgagcacctgggacaggctgagcccagagcgtggccccacgtcttcagccagaaccgaagcgagatgttccttcccttcatttctccctgcgcccaacccgacctgctggccccacaggcacacccctccccggtccagccatgtccctattcagaggcacgtgtggagaggcgtcagaagcaggagggcgcggggccttgccacaggctgaaggtctgtgtccctctaaaatccatackttgaaattctaacgcccaagatgagggattaggaagtgcagcccttggactgggattagcactttatgaagaagccgagagctccctcmccgcaccccacgtgagcgcaccgcgaggaagtgcctsccctcagcagacaccacgtctgccggcgccttgagttcccacttccactccagaacctgagcagccaatgtctgctgctcataagccaccctgtctgtggggttccagcagctggacgcaaagagacagagcattggtaccaagagtggggtgcagctgtaacagaccccgaaagcctctctggagctggggagtgggagaggctggaagggttggggtggagcctgtgaaaagcagatgttgccgagaacaggccatgaaaggtgatgctggtgagggctcaggaggaagggaggagcactgtggagggagcccccatcttcctgcacaaggaatgctcccagaatcttaggagggggcacggacaaggccgctctgaggaggccgtgggtgtgtgtggtggtgaggggagacccgcctcgggtggagctgggctgggctgggctgggcccgggccgtgttttctggaaagtgagtgtgtgagggatgagactggagatttggccacagctctttccaggccaggcgttgaggtgcagcctttcctcccgctgttatagtcagatgcgggcacagaggggcggcctaggatggcatcaagcagaaggaagcggaacttaagcacctggggaatgctcagcttgtcgctgtcatcgctgctggagaaaacgagagcaaccctagggagagaaccctagggtgtggcccgcaaccgtttgatagggaggctcgtgtgggtgtgacytcaggccccgtctgccactgcggcagagacaccgccagctggaaccaaagaggagggagacgggaaggatgagggaggctgtcgacttggacttgacatgacaggaccacagagctgtcggccggcaaacacgcgcggctcttcaccgcagaggaagggtgaccctgaaggtggttcggaaaactcccagccgccgatgccttcttcagaggggaccgcagcccacgtgcctcccacaggccaggagctctgccagcggtgggcgcggggcctccccagtggacgagaggtggagcatggagccacagcggcagctctcaggcctctgggcctcacgggacttgcccctcggggtttggcctgcctggggcctggcaccctccctcttgcctttcccccttttgaaatgggagcgtccgtcccctcctgtcctgcctttgtctcccccgtatgtgacgccagtgaggttgagaggagactttggagttgatggttggtgagactgttggggctgctggggtggagaaggatgtgggttctgtggggacaggggcaggatgctggggaccgaggtttgtgtcccgcagttcccacgtggaaaccgaatccccactgtgaggggcatgaggaggcggggtcttcgggaggtgctgaggtggtagggtggggccctcgtgaatgggattaacatccttatagaggggaccccagagtccccccgccccttcccccgtgtgacagacagtgagaaagctccatcaccaaacaccaagtctgcctgtgccttaccctgcccttgtggcctccaggcctgtgagaagtgaactctgtttacgagccacctagtctgcagcggccgagaggaccaatacaggcttccacagggtaggttcccccacagcgggggttggggacgagctgccggggcccaggacgtccgctcgctgctggggctggggcagtctcagccactcccagccccagcgggctcagtacccaacaccgaggcaccggggccatggtgggtgcggcctgtcctgggtgctcagtgttggggctcagagaatgtaaagagcctggggcgggggtggaggtgccccaggggcagaggctgggcagccccgtgagtgatgtggcctccgccacgcctggatggggtggataaatgtacccgacgcccgtgatcgagctggtaattacccttcacaatgagtgatattaatcgtgaagctcccagtgcacggcatgagaatggcgccgggagctggcggcagcaggagaagccatttattagcctgataaatgaccaaaagatggcctttctggctggctcctgacaggactttctgataacagggccgagagtccacctgtcagacggccaggtggggcctgcccggtcctcccctgctcggccacccaggctgctcggagtgaaatcgtaggttgggagggggtgcagaggcagggccccttgcaggcgagtcccagctgcctcctgtcattgggcggggatggaagggtgggacaggaaggaggcagtgtccttctgagctcagcctgggagaggcasggggcccccgtgcagagggaggcgtgtgggtgtgcagggcggcggggacagtgtttctgagctggtgatcagtctgctgtggtcaggcaggcagggtgggggctggagcggggtcaggcatggcagtggcaaggaagcatggcataaggtcctctgtgcccaggaggacactggtgctaagcgtctgctgtcacctgcttctgtctgtcactgccgtctgatgcctgaccgggctgagcgtgtgtttgttgaatgaaggcagggctgccgtgtgcgtcctccctgccaggcccctccacctccgctctttccagagggaccgggctacctgctgttgctgtgccacccacaggggaggcaggtgtcagctccacacgcgtggggccttctcgccaggcctgtcccgacacagagggcagtcccgtgaggtggcaagttcccacagtcagcagtgccgctgctgttagaaggtggtggtggactgagatgacatccgcagtcccttccgcatcagggcccccacctcctgtacatccttggggtctcagcccagatgcacttcctcggggctctccctggctctcccgggctccagtctcctggtgcatgtcgttatcagctcccactccacactgggacaggaccctgagccttgagtcctgcgggtgcctcggccgccctgcgctgtgagctggcatgtgctcagtgcttggtgcgtgctagaggagcacgtgaaggcccggatraatgatgcagacatgggctccagggacagcggcccgtcctcggaggcgccccttccaggctcagcacgtgcggctctcagagtctcatttgttggctctcctggccttagagggcagcccgagggtcccagcagggcrtcttggctgggtgggctcaggaggcaggggaacagcaagtccggagtcattacaaggcctgtgccgacaccgggtgatttagcggtatgattacttcctaatgcagtatctcgcaaarctttttattagatttctccccttttccttccaaagtctctttggaaataaacacctggggctgttatacttcataccactcagtttaattaacttttaaatcacataacgtcacccggacctctcagatggcggcggtcgggccagggtggaagcctggctgccccagcctctccgcccagggagcggggcattgccccatctcagcctcagggatcctgagcctggactcccccyagtgcaaggtccattgagggggacccttggaggggcagtggtagctcctggggctctgagtctaagggtggcagagacaccagccccaagccaggtcctcccagtccgggaaacccagtgagctccacagcctagtgctacgctgcaggtgtgggggcctgaacccagctgccgtcatccctgagaaactgcccaaacggtgcctctcgccaggtcagcaggatcctcgcccagtgctgggtcacgtccatcccaacctgtgtccccacaggaagcactttcttccctggggcttctccccgacccgctctgccccaagtctgggtcctgccctgggtctcgggcctcaggagggcccctccccaggccaacagattccagaacaatcttgtgacatctgcccccaacgtgggcaccagtgaaggttcccagcccctctcgttgccgctgacactgtccgcccacccgtgccgggccctgcctccccgagctcttcccaccattggtcccacccattgtttctgccactccagctcccgggcagcagccaggcgaaccagctgttggcaggcaggcgactctagctcccygggcagcacctaggaggcctggcctttggcaggcaggcgtcacagatcagttaggcccttctgcgcctgcctgggatgcwgaacaggtttcgcgacactgtaagtgcctgttcctgagaaagcagaggtcgccggcactgaaggctgtgtccccagcaccttcccctgtgtggacctccygccgtcttcctcgccacgccttcactaactgttccattctagttttcttcttcttgggaccgttttggttggtgattggtgactttccaggaatcgtgcattcctcgagttttcagactagccgtgctgtcccggggccccgagcagattcctctggccctggtcactggggtgacgcacagttcatcaggggcttcctgggcactgctggggacgcctctcatccacgaggatggcacgttcgaggtctgagctgtcccagcacggcctccctgtcggggtttcccgtgacctcgagtcccatctccaggacgaacgtgcagacaccctcccccaccttctccatgggctcagccatcagcccccaaccctgtgccrgccgaggccaagctcttgctgccggctctggtctgggcgtgggtcacccccaccttccaccctgtgccggccgaggccgggctcctgccgcccgctctggtctgggcatgggtcaccccacagggttgccgccatcagtcagcagttgggctgggagggcyacatgagtgcctrtagattctggcacagacgcttgtggcctgtgggcttacttcctgccctccctgccaccttgttggctccagccgggctgccacggtggacgcagggtcacagaagcttagggcaacacatttgtggtcctcgacccacggacgcgacgccaggcccttctcgtgtctcttcctgctctctgatgcccggaagctgcttcctatgggggtcccacacggggtcaggcaggtttcggtgtgccctccccactccccatcccaggaggggaggagctcctagttctgaggctgctctgtgcacggtctggcctgcagtgaacatgtgtttgctgttgtcgcaatcactgctgtcaccagtggctgggcagggccagtatgcaggggtggatagtgcggtgcctgatcacagggctagccctgtgccctggggtgcctgttcccctctgcgaacttgggcaaccatggctttgggggtccccggacctgggtccagccccgtgccttctccggcccaggccggctctgccgagtcacctgtgcagctccccggagtcaagcacaggctcggggcagtgagatcatctgcccaggccctgacccaccgtctggagccctgcaggaacttggggtacccccacctggacccactagaggaagcctgggccccacagccagtgtaaagcagcagcttctgttcatggtaccagggggctgagctgggcccaggcagctgggtggctccagaggtggcagggggtgagttcctaggaggcagggtgggcgcctcgtaagatagaactcttgtgggaaaggatgtctagcgatgggagctgcctggaggcgtgggtccagaggggccctcgggacctgactgggcgcctgtcggttccgtcctgttgccccagaaggggaggcctgcccaggggttcaggaccgaacaccaggtccaggggaagccgctgccccggccgccgctcayccacaaccactcagattaaggcgaacgagagtggtgagaacaaacgcctcacagagctgttccggaaattagatttttccccttaaggtcactcactccactggaaaattaaccaatattttcctaatcaaagcggggctgtttcttcctyggaggaaggtggccgcccttccrgcgcttgtcattcatcttggaggcaactgctgccgcgtgggctcttgttttattaaataaactccggtttttatggcygcctctcagtgccgcccgccccccgtccagggagagtggcctcaggtgtcgggcgccgcgccgtcctgcttccgctgccgctgccctsactgcggggtcaccttccctccacagcccctcagggccctcccagagccggcgtctgctgatccagcctcccctgtaccccagggggctctttacacctggggttccacctttagcccaggtgggagcagggagccgtcttgaagtctcacctaggacgccaggacgctgccgcttcccgttcttgggccacgccgagcacgacttcttggggcctgtccagcagtgcaggctgaggagggcgtggacccagtcggccacctcagtgaggtcctggctgccccctgcagacagccctgagcacccccgcctgcctgccactgtctcgacggggagggccgaccatcaggggtccaggcagcacttcataaagcaaagcttcacccggctaagacgtgtgggctgcttgggggctctgtgtctgcaaaacagtacctgtgaaaataaggaaccgtaggagacgtgggctggaaggacggctggtaaacatggcccctcctcacttggagatttgtgctgccaataacgaggacatggatgaggggcctcccacagagcagcgcttcccaagtgccgctgagtgaagaagccctcgacagcctcgcacagcatcagctccctgaccccgcatgtgcgtacgtgtgtgtgtgtgcatgtgtgtacgtgtgtgtgtgcatgtctgtgtgtgcacgtgtatgtgtgtgtgcatgtgtgcacgtgtatgtgtgtgtgcatgtgtccgtgcatgtgcatttgtgtgtgtgtgtgtgtacatgtacacccgtgctcacaaacaggctggagaactacatgccgtcgcctctgtgcccccgctggtgtgattctgagtgactgggtgatrggtgatgagtgttatttttatatttcaaaatagtgtgagaaggaggctgtcctattgaggcacagaccagtgggcaaggaccttggtggtggggggcacacaatcctctgggggacctgggctgcccctgtggggatgtggcatcccttgggatgctgtgggcagcacagtcacctccagggcccctggcttatcctcagcaactcagaattaagtgacatcttcgtccttctctggaccagttgttttccagagcaggtcagacagagctcagcttccccatctgccaggattcagcsctgggctctcggaaccaggagcgcaaatcgctggtgctcggggtccatggtgccccttgagggctcacacagccttcccatgacccttgtcttctactcctggtagggycttgaatcccaggagatcttgctctcccataagaaaagcagctgtgaaagcacagccgggcccggtgactggcccaagcctccgaggaggyggcaagcttggatggagtgtcctattcagcrtgagggcccggcatttccaccagtattcaaatggagccggaaacttcctgtttccattggcctgagaccccgggctgtccgtctgccctggcatgcacacagcccacccacacttctgtctacccgagtggcygatggtcagccgcacacaccaggaagcctttgctggggccggtggtggtgatgcttccrgcacgggctgcttgcttgttggcatctgtgagtcctgacccttcctggggctgcagcaggcgtgagtgttgttgagggagggagagtggcctgcggacccagccctgagagcgacactaggtctgtgtgcccccaggagctcctccatcatcgtctctgcacaccccagccccgtcccaccacatcccacgctgggactcccagccgcttctctgtcatgagagtccacagttcatttgaaaaccagtgtggtcaggggctgagactggcttgcatctgggtggcctgttagccctggagaaaccggctgtgtaggtgagcagctgcgtgggtgagagtgggagcattgcaggtcacagggaccctctgtcccctcagcacgtgggagcctcacttgacacagcaagtggaggcctggagccggccaaggggtgctaggcaggccgattcgttcattcttgtacacagcacgcagcaagtgtgttccgtgtcccgggcccagggacgccgaagcgatgggaacccaggcctgcccagagctgaggtctccccagtgtatgcgtccaggctttgggagatgggccgagggcagctgctggagggggcgaggcctgcccagggctgagatctccatgctgtgtgcatcccggtttcagaacatgggccgaaggcagctgctggacagtgccaggactggtctggtctctcccatggaaccttccagctgagcttcccctgcagtggccgcccagtgggggctgggttgtgtgggacagaggacagctaaagggtagaggtctccactgtctcctggtagatacatcgggccccccacatcttcccaagtcacgtaacgctgcacaccctggtccgccccgtggtacctccgcgagcaccgcctgccatgcctggtttgctgctctgtaatccagcrgctcctgcagtcctggcacgttcggttgtgtcccgaaagaaaaccagtgcttcctaaacagaaamggacaakcgtcagttggaaaagatgtgtggccttcaaacaaacaccctggaccagggaggaactccytgttcccaggacagacgggaaagtcagaggcctttaaaacatcatttccaaaatgaaatcacagaaagatacctgatggwtgtgagcagattatctgtattccattcttggggccaaggagcaaatcagctgcagaacatgttttgaaatgtctctttgtaatgaatgtggtcaatgaaaacgcggagccatcagcaggaggcgaccgtcccaccgcaagatgaagaacctcccgtgataccattcaagccccacgagctggcagagagsaaacagcagcttcatacaggctgcgggtgctgatgaaatggaaaaggcacttcacacatcttgcacacgcaaattgcatcaggcggagtattctttgcaaagaatgaagcacttcctcctccttggctcctatgagggggagcggtcggggggcgtctggagcagggacgggccggcctcaggcttctcatcccctcgctccgggaacaacagaaatgcaaacacagcatgtcttcctgagccacgggcacggggccgggcactcggtcaccctttccttccgcccattccttgtgggggcagctcctggtcccagtgacctcccagggccgggcagtaaccttcgtggctggacacactcggcccaagcatcccctggtatctgtagtctccggttccggagggcacctcgggcacgagtgacccttggcatctcacggggtctcttggatgctggctcctgtggtggctgtggtgtcatccatcctgctggtgtttataaacctcctgaaccctctatggaaacactgtccgtgagggctgaccccctttatgtcccgtgtcctggctggaacctcaagtgtctttgcagagctggaggaaagggcagtgttccaggcccaggagctgtcagccatggacgtccaggactgcagcgccgggggcggcctgtgctgctgaccagcccctggccctgcgggaagggcagcagggggagactggccctggaaggttccccactgtggtctggggccggatggggctggtcccttcttcagttctggacgctggtgctttagggaaatgcctggggtttcagctacagcctgagactgcctgtgtggctgtcccttccccagtgacgctgaacgcatgtgcacatctccctggtcacgggcaccatcctggcaccaactgagtctcttggtctgtttctgagcacctcccctcccttggggagcgtggagagaagagcctgacacagctttgtccccgaggcagcaggaggcctttcctggggcttggagggatctctgcctccccagaaacagctcctggctctgaatgcccaagagcctgagggcagagaggacgccagaggtggtgtggagcgtgtccatctcctaaacagcgcgctcctccccgtgagccggaacccgacgcgtgtctgcgtggagcatgtccgtctcctaaacagcgctcttccccgtgaaccagagccggacgcgtgtctgcgtggagcatgtccgtctcctaaacagcgctcttccccgtgaaccagagccggacgcgtgtctgcgtggagcacgtccgtctcctaaacagagctcttccccgtgaaccagagccggacgcgtctctgcgtggagcacgtccatctcctaaacagcgctcttccccgtgaaccagagtccgacgcgtgtctgcttgtttccgagctgctgtttgtggtttgagtccccatgcagggcagcggagggaggtggcaagggctgtaacacaccaaggtcagagccgccggcctctcccacattgacattctgtgcactgcctgtgtgtgatcaagtctccctccggagcgctgggccctgcgtcagcctcaggaaagctacagacaagataggaatcatgcgtctccccaccctgagcccagcaggctgtgccaggtgtcaagtagctggtcagcgtatcagccacacagcattgctaggagggaagaggagaccccttcgctctgctctccccgctgcagtcagggcctgcctcccgcgcccgccaggtggggccttggctgcacagaccctgtgcccactgtgagtccaggagcctcgggctcaggsccctcctccccgcacccctgtcctccttctgatggcgggacagtgaccctggctgtgcccactcactgaccagcagcatactgtctccgtcctggcagcagctgtgcgaggcaggctttcctgtcccactcgcagaggaggacacgctcaggtgctggagtggcttgcacggtacggccacagccctgctgactgtacccacgcgcccctccacccctgcaggagcatcgaaggatcggatgcaaccagacgggtcccctctgtcagtgcccggcctgtgccaagccacagcaggatgtcctgggggaagcctggagaaaggagtgctgggccctggactccccccagctttggggggatggtcaccaaggggaggtgctgggcacgtggcagcctcggggagcaccttcctgggccagctgtaggcccgtcccaagctgcgtcccctgcctgcgcctctccctgggccgcctctgccccctgcagggctccgtgtcaagctccttcagcggggtgggacctcgaatgccrtccatgtcccacacctcgcgtstcagggtctgcagtggagcacccaaccggcgtctctccccaggtctccccccagcctggaggtggccccttgtgcccctgggcccctacctgtccagcagcagcagctggggctccctgtccactgggagtgcttcctcaagcatgaggttttggcaggggggcctgtgggaccaccacacttctccccaagggcacaccggggatggcagagggtcgtgggaaagtgttgaccctcgtcaggtcccyggggagcccctggcaggccgttctgtggctggatgtgagttaagcggttcagccgtgtgtgaggctccgtgacaccagccaggacacacctggagttgtggggatttttagttgccttctggtggtagtgaaaccgtgcagccttgcacaagtgttcctgcataggctccacttgctgcccttcccggccccactcacatcctgagtgtgtgctcaggcccctcagaagaaaccaaacttctgagtgtcccctccccgcccctagccatggagtggccgtggctgaagtggaagagattcagaggctgacagccgaggggaggtttgaacctcactaaaatcrttcggagctsacgctcgtttcagcattgcccacgctgtctgggtaggaggtgaattcgcctccacgtggcctgccgtggggcttcttcttgcagcgggctctcctgggtgctccaggaagacggagctgggacaaagtgtgcccactccagaagtgagtcttcagctcaggtctcctcccggccttggtttctgactccttcgtgttaggaaggaggcccccaggaggaagcacgcactttggcaatgagacgttttaattgcatcttaaaatagcattgcagtaaagaacactaaaccgtgactaaccaattgcacttcaggaggccctcagcacagtcagacacggggaagcgcggaaaagctgcccacttgtggacgcccatcaagccccctcaggaggggctggatgacagaggaggtctacaccgcacctgggccccttccccaggttcagccttcattgcggcctccctggccgtgagggacgtctgcgcaggagctccccggggccagctttgcctgaatgtggaagatggagggaagagtgttaccgtttagttgatttactgmcgaagaacctgtaaggcccaggaaracagagaaagacgccagaaagagcatcattctgcarggttcaaggtgaacctggctcgctttcagaggagtagggcaacgagggcacccagacyctaattacacmggatcccggcactgtgccatcggggcctcatgtgtggtcttggtggagaatgaccagggctgctctctagcccccgtcctccagatggtccccagagggactgacacactcaaggaatgtgctactgggaagccaggatgccatttcagtaccagcagccccactgtgggcctcacttgaaggctgtgctggagcccggcctcggactcaccccagccagcccctgagctccaggcagtgtaccctccccatccgggaaccagccgcaaggcagcccgtgtgctgagccacagggagggccagctgggcgaggrgctgacatgtgggacgcagctgtgcagcactcagaggccctgcccaccctcccctccaggacacagcctgaccgtgccctgggcctcggctgccttgcaggggcccaggtgaggagtgggaggtggaggcctctgcagctgcaggcagtagctactcagtaaatgatgggcccagcgatggacgaaggacgaaggcctccctcggggacctgaagaagcatagctgtctgtccctcgccgggkctcaggtggctgcagttactcagctcgcctgggacaggcctggggggccagtgagcacgcggcattgtggcagctcaggcaggcatgcgccggaagggattctggcggcctgtggactgggagaacctttccagctgccaagagttgccctttggatcctaagtgcagggccaagcccggctgtgacggctgaggccgggctcctggaggcaaggccacctcaggcctccagggccggagccgcagggagctgctgggtttccacagggccacgggggctgcggccacacggagcgggagcacaggtgggaagggtgtctgtgaaaagtgaaatctgtcgccgcttcctctggcttaattaccggcatggtagttgcagagttgaaatgcagctttaaaagcctttgtgagtarttagtgtcaaacacacaagatctacaaagccataaactcacagcttggtgatattaccaagtactaattaagaaaaaaaaagaaaattccctttcatgatcaaattttcagccctgccaaagacgaaaaacaaggcaatttgcagcggatggtgacgccggagggtaagtggcgtccacaggaagatggcggccgagcgcggcgagcaggcagggtctggctgagggctggggtggtgacggcgtgatwgtgcctggctaccgggttctcagccagggagcacctgattcccagcagagatggaatcccagctcaggaaggggagactcatgcgagggcagaagcgaggcacccgcccagaaggattgggggtctccccrtttcacaggtggggacactgaggctgagctcacagccaggacggggacagcagagtgacggccragaccatctgccccgcgagggaagcagcgcccaccttccttggtggtccgggaaggccggactggccccttgggtccccaccggcctcagccactgtgggctcrtccagcttcaggcaggcgcccggccactcacctgggaggctctgagaacgacagcttctgtctcgtgagtgacgtggtgcccgctttcatcctggggcccacagctgccaggagaggccaggccgaggtcaggaggctcagcagccggttccgtgacttcctctttgctgaggaggtcaggacagaagcttctagatgacaggccgctcaacttggtataaaacagcaaatttctgtgcctgtgctgtcgggctgtgaatgacttctcgtctgtttcatgagatgcagcttcagcccagggaggcatcagatgcagccgggcgagacgcggagccaagagctgtcctcgccccccatgtgagtgactggagagacgaaattctcaaagtcttgtcacttacggggatatttttaacccaggaccagggaagcacagctctcattggtggccgtgtgctctggcgcttgggcagtgggcagcagccaggttatcgggacgtgctcaggcccaacaggacccccagagccgcacctgccccccacagagtagagccggcccgggagcrgccttggtcacatctaatcccaccagccgccggcagtggagagctgtgcctggcccagagatttgggcatcacatccaggctgcaaacgcacggggaccacctggccccgccagggtttgctctatcctggcttggcctgcgtggcctctcgccgtctgcacggtccactcacccgagtcagggctggggcatgcagggagtgtgcagtgacattgggcagagggaggctgctcaggtccaagtaggcagagaaaccgcatgcccaggccgctaaaaccttgaactgcaggagccctgaactgctgttgctgttttattgttttgttttgttgtcagatggagtctcattctgttgcccaggctggagtgcagtggcgcgatcttggctcactgcaacctctgcctcccgggctcaagcgattctcctgcctcagcctccygagtagctgggattacaggcgcccgccaccatgcctggctttttttgtatttttagtagagacggggttttgccatgttggccaggctggtctggaactcctgagctcaggtgatccatctgccttggcctcccaaagtgctgggattacaggtgtgagccaccacgcctggcttgttttactgtttatgacgcggctctgctgctgctaggacagatacttgtacagcccgattcaaagactgtgcagaggcgtctcccagataccccggggcgcactgcagtcaaggaaggctgcctggaggaggtggcctggagctggggctcacgggtgaattagagtttgtctggctgggttggggagatgtttctggcctcaggatctcacttgctcacgctcaccggctccagggcacccagcgtgcagggagagcagaggggtaggcctcgggctccaggccaaagttggggaaagagagwgtcagacctgggcttgggggatgactctgatgtcgtcctcatgggggatggttgaggaaagggtggggtgtggctcactcgtctggccctcacccatgtggaatgcccgccgtgctgggccccgctgcaggtgctggatgcgcagcagtaatgcgggggtcctgctccgcctgggcacgtcttccagcagggattggggggccgatggccaggcagggtctgtgctccatgcctaggtggttatggggggaggcggggagcctgggccctggccgtgggtggacctgtggcttgctgacctggtgcccagctgccccacctcccaagctgtgagaagccaggaccagccccatcctccatccagatggtctctgacattgccctgggagccggggggaggcgggggggatgttctaactgaagggcctgggcagcctagagcccttctgtatcttctggccaatggttttatctggtccactgcctcccaagcctgcacatcccatctcgcgcgtttaaactgttagaaagttactcctttgactaagccggaaatgctctctatggccctgtggatctgcgtccagttctccacgacattctgtttttggagcctttgtgaagaggctgggggtttgtcagccccactcggaagcgaacaggctggttccccgccccaggcccagcttgtcctgcgggcagctggcctgagagccaagcactccccaggccatggcaccgggtgggcaggatgctttcctgccaggcagggggcaggacgctttcatgccaggcaggaggcagagccctccctgggaccccgagtgtctgtcctgggtggggactagacggtgaccaccacctcgaccccgggcaagcccacctagccccaccctcccaccaagccctgctccacctacacgaagctgcggccagccccttttgcccccaacctaaatgactgaggagtctgttagggagggcctccctgttgctctaaagagcaggaacaggacatccctgccccagggcacggaggcagctggccatctgcgagtgggacccgccgcggttggccaagctcaggccatatgagctgggactggcaggcagttcctggctgcctcaaatctggggtccagactctctgctgacctcccagagcccggcgtgtctttgyacactctgtccttgtccccagcctcctccccgccccagggtgtgcctggaaccttaggtagtcttacctgtcagtcataccttcttctcggccagggactgtggatggcaggacgttcwccccgtggtcagtggctgggcctttctcatgaagcagcttgattgagatgtcatctacagagcgtgcagccatcaycacagtctatcttggaatgaatgcctttatcaccctggaaggaaacgtgccccatagccatcctctcccagtcccagccgtcggcagccgctgtctgtgttgwctctagactccgctacctgcagtgttgcagggagatgggctcagcggcgagtggtctctggcatctggcatctttcgctgagcgtaaggttttcacggttcgctcacattggaccacgtgctgacgctccatttgttactgatgaatcatacggtctagtgtgtggatagaccatggttgtttatccgttcatccgttgatagaacatttgaattgcttccgtttggggctattacacacagtgctgctgtgaacattcgtgtacaagcttgtgtgtggaaatgcatttttgtttctcttgggtgtacacccataagcggaagtgccagggtcacatggtaatttaactktgagctttgtaaggagctgcctgttctcccagcttctccccgtcctccccagcacgcgccactgtctgcttttatgatgcttttccatcccaggggctgcgggtgccgctgggttagagggtccgtgaacctcctgagattcaaatgcaaaatgtgaagtgggtgttggcgtgggtttcgggtagagggactgcagcccctgcacggggttaggaatatgtttcccagtccaggcagagctacgcgggaatcacctctagacacccaagagggagcagttttgtctggagaagcagcacgctgccgtgtttcaccaggctggcctgtgacagctggacctgcccccgatgccaccacctcctcctgccagggcttccctgtttgctgagtctgcgttattgatgagctaccatctgtataaccgcacccgtgaggccatcaaggcannnnnnnnnnnnnnnnnnnnnnnnnnnnnnnnnnnnnnnnnnnnnnnnnnnnnnnnnnnnnnnnnnnnnnnnnnnnnnnnnnnnnnnnnnnnnnnnnnnnnnnnnnnnnnnnnnnnnnnnnnnnnnnnnnnnnnnnnnnnnnnnnnnnnnnnnnnnnnnnnnnnnnnnnnnnnnnnnnnnnnnnnnnnnnnnnnnnnnnnnnnnnnnnnnnnnnnnnnnnnnnnnnnnnnnnnnnnnnnnnnnnnnnnnnnnnnnnnnnnnnnnnnnnnnnnnnnnnnnnnnnnnnnnnnnnnnnnnnnnnnnnnnnnnnnnnnnnnnnnnnnnnnnnnnnnnnnnnnnnnnnnnnnnnnnnnnnnnnnnnnnnnnnnnnnnnnnnnnnnnnnnnnnnnnnnnnnnnnnnnnnnnnnnnnnnnnnnnnnnnnnnnnnnnnnnnnnnnnnnnnnnnnnnnnnnnnnnnnnnnnnnnnnnnnnnnnnnnnnnnnnnnnnnnnnnnnnnnnnnnnnnnnnnnnnnnnnnnnnnnnnnnnnnnnnnnnnnnnnnnnnnnnnnnnnnnnnnnnnnnnnnnnnnnnnnnnnnnnnnnnnnnnnnnnnnnnnnnnnnnnnnnnnnnnnnnnnnnnnnnnnnnnnnnnnnnnnnnnnnnnnnnnnnnnnnnnnnnnnnnnnnnnnnnnnnnnnnnnnnnnnnnnnnnnnnnnnnnnnnnnnnnnnnnnnnnnnnnnnnnnnnnnnnnnnnnnnnnnnnnnnnnnnnnnnnnnnnnnnnnnnnnnnnnnnnnnnnnnnnnnnnnnnnnnnnnnnnnnnnnnnnnnnnnnnnnnnnnnnnnnnnnnnnnnnnnnnnnnnnnnnnnnnnnnnnnnnnnnnnnnnnnnnnnnnnnnnnnnnnnnnnnnnnnnnnnnnnnnnnnnnnnnnnnnnnnnnnnnnnnnnnnnnnnnnnnnnnnnnnnnnnnnnnnnnnnnnnnnnnnnnnnnnnnnnnnnnnnnnnnnnnnnnnnnnnnnnnnnnnnnnnnnnnnnnnnnnnnnnnnnnnnnnnnnnnnnnnnnnnnnnnnnnnnnnnnnnnnnnnnnnnnnnnnnnnnnnnnnnnnnnnnnnnnnnnnnnnnnnnnnnnnnnnnnnnnnnnnnnnnnnnnnnnnnnnnnnnnnnnnnnnnnnnnnnnnnnnnnnnnnnnnnnnnnnnnnnnnnnnnnnnnnnnnnnnnnnnnnnnnnnnnnnnnnnnnnnnnnnnnnnnnnnnnnnnnnnnnnnnnnnnnnnnnnnnnnnnnnnnnnttatagttctaaattttacatttgtgttcatgatccattttgagtttttttttatatggtgcaaggtctggattgactctttttcattttttattgcatatgaacgtccagttactccagcatcaagatcattcttttttactgaatagccttttgcatctttgtcagcctgctaggattttaattggaattacgctgactctatagatcattttggggataattgacatcttaacaatatggaaacttctaatctatgaacagtttctctcagcaatgtgttctcattttcagtgtgcgggtatcagaggcatttgaaccagagtgactccattttgaataaggactgggtgaaataagactgagacctacagggctgctttcccagaaggttaggcgttcgtagtcacargatgagagataggaggtccgcacaagatgcaagtcacaaagacttggctgataaaacaggttgcagtaaagaagctgaccccaaacccaccaaaaccaagacagccatgaaaatgacctctggtcagccaggcacggtggctcatgcctgtaatcccagcactttgggaggctgaggcaggcagatcatgagatcaggagttcaagaacagcctgaccaacatggtaaaaccccatctctactaaaaatacaaaaattagccgggcacggtggtgcatgcctgtaatcccagctactcaggaggctgaggcaggagaattgcttgaacccaggaggcggaggttgtggtgagctgagattgcgccactgcactccagcctgggcggcagagtgagactccgtcttaaaaaaagaaaaaagaaagtgacctctggtcatcctcactgctcattatactgtaattataatgcattagcatatgacacgacactcccaccagtgccatgacagcttacaaatgccatggcaatgtcaggaatttcccctatatggtctaaaagggggaagaaccctcagttctgggaattgcctacccctttcccggaaaactcatgaataatccaccccttcattagcatataatcaagaaatacagtataagtgttagtcgagcagcccacgtcactgctctgcctatggagtagccattcttctgtttctttactttcctaataaacttgctttcacttcactgtatggactcacctcaaattctttcttgtgtgagatccaagaaccctcttttggggtctagattgagaccccttcctgataacataggtatttcacatctttttcagatttatcccaagtattttagattttgatattattataaaagagttttgtttttacatttaatttctgttgctactatataaaaacaattcatttgtatattgatctttttattttgcaacttcgctaaactcatgtgttagttccagtagcttcttagtatatctgatgggattttctccttagacaatgatattatctgtaagtacacttgcacttccacttgcccacactggatgcttgygaagttccttgttcttgtgttatttcactagctggaaccttcaggatgatgctgaatacaagcagtgagagtgaacatccttgtcctgtttcagatctgagggagaagcatccaatcttcagccattaagtgtggtattctctgtacgtcattcatagataccctttctcaggctgaggaagttctcttctaatcctagtttgctgagattttttttttttttttgaggaatgcctgttgggtttgatcagatgctttttctgcatttattgagttgatcatatggttttccttttgtactttgttaatatgtggaattactttgattttctagggttaaaccaaccttgtattcttaggataaaccccacttagtcatactacattatctttttttatatgttattggatgtgaattgctaaccgttttgttttgaatttttgcataaatattccttagggttgttccatagttttgggggggtgcggcttgtaatgtcttctgatttgtatatcatagtaatgttggtctcacagagtgagttggaaagcattcctcctcttcagttttcttaaagagttcatgtagaattcttgattaaaacaaactggaagaaaagagttaatgtagaattgatattatttcttttttaaatagttgatccaattcatcagtaaacccattgaaccttgaagttttcttcctgaggttttaactacacatcagtgtcttgatagacatagagttattcacattgtctttttcttttgtggtgagctttagtagtttgtatcttcagaagtttgtccattttatctgttttcaaaggtattggcataaagttgttcataatttctcttactatccttttaacatctgtaggatctgtagtgctatcatccctcttcttcctgatgttaataatttgtctcttctcttttattccaggtcagtctggctagaaacagctttgggttttattatttctactgcttttttgttttctttcaccattgttgctttgatctttattttctttcttctgcttactttgtctaatttgcccttctttagttccttaagatcgaagctgaagtccctgatttgagaccttcttttttttaatgtggacattcagtgctataagtttccccctagtttctgctctagtggcatcccacaaattctgatattttgtttttatcttcattcagttcaaatcacttaactaacctcccttttgatttcttctttgacgtatgggttatttagaagtgtgttagtttccacattttttgaaaatctccagatgccgttctgttactaatttctcatttaatttcattattgtcagagaacattctcggaacggtctaaatccttctactttttttggagacggagtctcattctgtcacccaggctggagtgcatggcgcaatctcagctcactgcaacctctgccttccaggttcaagtgattctcctgcctcctacctcagcctcccgagtaactgggattacaggcacgtgccaccacgcctggctaatttttgtatttttagtagagatggggtttcaccatgttggccaggctggtctcgaactcctgatctcaggtgatccacctgcctyggcctcccaaagtgctgggattacaggcgtgagccactgcatctggtcacatttcttgaaatttgttttaaggtccatccagaatgttactgccttggtaaatgttgtgtgtgtacttgaaatctgtgtgtatcctgtatcctgctggaatgtgctatatcgatgtcaagtagctgacatttttaataatgtttgcgaagcttttatatccttgccaattttctgtcttcctgttctatcagttattgatagatgaatrttgacatctctgactattattacagatttctctattccttcttgcattccagtttttgtttcatatataaatggacgcttttatcattatgaaatgacctttattgctagtaatattctttgctctgaaatctgctttgtttgatacagagttgcactgtcartaagcaaccttgggtatatcacgcatttggttccagatcactgtgattaaaccaatatcacaataaagcaagtgccatgcattttgtttcccagtgcatataaaagttatgtttatcctatgctatagtctgtcaagtgtacaatagcattatgtctttaaaaaacaatgtacatgttctgattttaaaaatactttattgcttaaaaatgctaatgatcacccgaacctttagccagttgtaatctctttgctggtggaggttcttgctttgatggtgatggctgctgacagatcagggtggtggttgctgaaggttggggtggctgtgacagtttcttaaaaacaccagtgggctgggtgctgtggctcaagcctgtaatcccagcactttgggaggctgaggcaagtggatcacttgaggccagtagttcgagaccagcctggccaacatggtgaaaccctgtctctactacaaacacaaaaattagccgggcatggtggcacgtacctgtaatcccagctacttgggaggctgaggcatgaaaatcgcttgaacctgggaggtggaggttgcagtgagctgagatcacatcactgcactccagcctgggcaacagagcacgacttccatccccacccccaccccccaccccgcccccgccaaaaaaaaaaaaaaaacacagcaatgaagctggccacattgattgactcttcctttcatgaaagatttctctgtagcatgcaatgctctctaaaaccattttacctacagtagaacttctttctatcttggagccaakcctctcarcccctcaaactgctttatcaactaagttgatgtactttgctgtcatttttcaacaatgttcacagcattttcaccaggagcagattccatctcaagaaaccactttctttgttcattcataagcagcagctcctcatccattcaagcttgatcatgagattgcagcagtttagtcacatcttcaggctctgcttctaattctaattctcttgctattttcaccacatnnnnnnnnnnnnnnnnnnnnnnnnnnnnnnnnnnnnnnnnnnnnnnnnnnnnnnnnnnnnnnnnnnnnnnnnnnnnnnnnnnnnnnnnnnnnnnnnnnnnnnnnnnnnnnnnnnnnnnnnnnnnnnnnnnnnnnnnnnnnnnnnnnnnnnnnnnnnnnnnnnnnnnnnnnnnnnnnnnnnnnnnnnnnnnnnnnnnnnnnnnnnnnnnnnnnnnnnnnnnnnnnnnnnnnnnnnnnnnnnnnnnnnnnnnnnnnnnnnnnnnnnnnnnnnnnnnnnnnnnnnnnnnnnnnncatcagagcccagtaactagttgcattgtcagtgagcaataatattttgaaaggaattttgttttctgagcaggaggtctcaacagtgggcttaaaatattcagtgcactgtgctacgtttgaacagatgtgctgtcatccaggctttgttgttccactgatagagcacagacagagaagacttagcatcattcttaagggccccaagagctcatttaccgtctccatattagcagtaagcctgttctgctttcttatcattcatgtgttcgttggaatagcccttgtgatttcctttacgaacttctcctttgcaggctagctgtgtggtgcaagagacctagcttttggcctcagttttcaacatgccttcctcactaaacctaattatctctagcttttgatttaaagtgagagacatgtgagtcttctttcacttgaacacctagaagccattctagggttattaatgggcctggtttcaatattgttgtgacggtcgtgtctcaggaaatggggaggcctaaggagaaggagagagatgggggatggctggtcagtggagcagtcagaacacacacatttatcagttaagtttgctctcttatgggcactgtttgtggagctccgaaaccattacaatggtgacatcaaagatcacagatgacagagtaccataaaagatatactagtaatgaaaaagttgraaatatatacgacacagacatgaagtgaatccacgcttttggaaaaatagtgccaatagacttgccagacacagaccttaaacttgtaaaaaatgcagtgtctgtgaggcacagtcaggccacggatgaagcgaggtgtgctcatgtgaacacagggcgaattggcttctgtgagcacgctgtatctgcttcacgttacttttaatctactgcgtcttcatagttaaaatgtgcttcttaaaagcaggatatagctgagtcttaaatatgcataraatctgacattctctgccttttcactgggccatttacatttaaattgattactactttgattagataagtctatcatcttgttatttgttttctgtttgtcctgtctgtcctttgttcttttttcttccctctttttctgcctttcttggattgaattttttacaagttcatgtgcctccttttttgatttgttaactgtattttttacaggttgtgttaggatttagggcacgtagatctttaacagtcatcctcgaatgatacgacaccgccttatgtgtagtgtgagaacctgacagtcacatacttccagtcttctccttcctgccttagtcatctgcttataatrtattttatttatgcacatgataaaccccacaatactttgtttttatttctgtttagtcagctatctttgaaagagatgtaaataataattgtaaatgttgtatatgtctgcccatgcagctcccacccctcattcatggaaggagtagagctgttcttccttcttcttgtgtargcccatgtttgtttttatttttatttattttttttgagacagagtctcactctgtcgcccaggctggagtgcagtggcacgatctcggctcactgcaacctccgcctcccaggttaaagcgattctcctgcctcagcctcccgagtagctgggattacagggatgtgccactgcacgtggccaatttttgtatttttagtagaaacagggtttcaccatgttggccaggctggtcttgaactcctgacctcaggtgatcctcccacctcggcctcccacagtgctgggattacaggcgtgagccaccggcctggcctgttgtgtaagcccctgtttgcatcctcattttccttctgtctgaagggcttcctttaatattcttgcagtgtgaatcagctgctttttgggatattttaagctcttgcacacctgaagaagtctttatttggggggagatatttccactgggtggagaattctgggctttgtctttctgtactttacagaggtgatctcactgtcttcttaattccagtatttcctctgagaagtctgctgtcattctcatctttgttcctctgtcggtcagttgtcwtttcttcctctgactgcttttaagatttcatctgtactactggttttgagcagtttgattatgatgtactttgtgtactttaatgttgtttcctccccctgcctttttttttttttttggtggttggggttctttgaacttctcagatctctcagtttacacttttccacacatttcagaaaattggggccactactttttcaagactctttgctgtccccaccactggcraccagtccttgaataacatcgctgcagaactcactggctcgtggcttctggggtcaggaatccaagtgtggctgagctggctctctgctcagagacctcaccagccacagtcctcttggctctgctggggaaggtcccaygtccaggtacacccatgtggccgtcggaaggattctgcttctatccgtggttgggctgccgcgcttggtcctatggcagctcctcgccgtgtgggccgctcacgcayggcagctggcgggtcagagctctgagaaccagggtgggagccgcagaagtcacggctgctgtgacgtgactgcagaggggaagccagcacttgcgccccactttgcatccgctgtaagtcacgctgaagggctggcgctgatgcgggtggtgcctggaggtggggaccatcaggagccatttcagaagtgccaccagcctgcctccaggactcctgccctacgtgtcaggccaygtgacgtcgccccacagcccacgcccaatgtgctgcctcctttatgtctatctttccgttttttcctttttgtttgtatgcgcttttctttctttttctcatctgtttcatctcggacggtttccgtggttgtatctgcagcttcactgatcctgttttcgccatgtctgatctggcayggatccgtcccccgtacttgttgtcttcatccttagaaggtcaatttggctcttttttgtcccttttatgtctatcctcaattttttgggcatatggagcaaagttacagtgacttaatgtgatctgccgcttctgacgtcaggtcagccctaggtctgtttcactcagctgattttctctttgttgagtgctgcgaggctgtgtgtgcatgtgtgcgtgtgcctgtgcatgcacgtgtgtgtgtgttcctataaatattcgtgagctctgttcggagacacagttcaggtacttggaaacagcctggttctctgggtctcggtttaggaaatgtgaggtgggagcagggcagcgtctgtctggggctcacaccgccccttgctgcggggtgtccatctcagtgctgtgccctggagccgcctagttcgcaggctttcccgcgaggctgccggagacaggcactgstccagcccagtgtgagcttcgggtgccattttctgggtttttctctctaatgctccaggttttctcagcctctcacygagcactccagcgaactcagccctcctctgtggcactcttttcggcgccctggctccagctccagccctgtccctcaactcgggtcccgcgaggccctgcctgggctgtgactgtctccccaggctcgccccgtctctcagggcccgccacccttcctgactgaaaactgttgtttcacatttgatgcctcatattctggctgtttcagatggcaggtgcatctgtccttgtggctctgtctcggccggaagctgccggccgccctctgaggtgggaaaataggcattttgtctccattttacattcaggaaacttcagctcagagagacaaactgatgggccccggggcccacagcagataagaggggcagcctcacaggagggcgggcctgcatctccggccctcctcaccccgcatccccagcatcacattgccctaagcgtggcgctccacgaaacgtcactgccagcagcatgggcctcgcctgggtgggaggtgagaaggcgcagaggccgctgacgtcctctcctgttctcattcggctacatctggaaagggtggtgctgtctagcccgggcccaggaggggaggaccccacacccgggacgggctcaggaggggaggaccccacacccgggacgggctcaggaggggaggaccccacagccgggacgggctcaggaggggaggcccccacacccgggacgggctcaggaggggaggcccccacacccgggacgggctcaggaggggaggcccccacacccgggacgggctcaggaggggaggcccccacacccgggacgggctcaggaggggaggaccccacacccgggacgggctcaggaggggaggcccccacacccgggacgggctcaggaggggaggccccacacccgggacgggctcaggaggggaggccccacacccggacgggctcaggaggggaggaccccacacccgggacgggctcaggaggggaggaccccacacctgggcggggctcagggagccactgggcgagggctgtgctgcagctcctccctcctcacccgtgtgcctgatctgagcacctgtcctgcctgcccgctgcgtccccttttttcccttaaccttcgttgtgttctgtgctcctgctgccctcggggccagtccctgtcttttaacccacactcagccccttctcccaccttctccatccccgccacctcctctaactcatccctgtggcctccatgcccttccacggcccttggagccgcccgtggcggatgccactcacagcaggggctgcgcaggccgccccaccccgagccggcgcccccactccctcggctcccctccggctgcggctgcaggagcagctgcgtgtggctgtaaagcagaacgcccgtgtgcgagggggagctgtataaatagaataataataataataattgttggtttgggatttttctgcgactgctggggtgcctggccttgcccgccccgccagtcactcttgaaggaaaggtcaccctcgccgggaagataaaccccaataacgctggtataattagcacaggcagtatttagatgctttcctcggtacaattaggcaggaataattggctgagctattttccccgtgccggacacactttttgccagcttccgttctttggaacttcatgccgggacatttgttctcggcgttctgtccaagctgtcctgacccagttgccgccaggccctcagcgcggtgctcacgcggcagcatctgcgaggcctcttttgggcccggctgtgtcgtctcccccgagggacgccggagggacagtggggcagagaggggtgggagctgagggtcgtgcacacagcagggtgtcctggggtcaaacctggacctctggaccaggagctccgcggagctgagctgggctgggcctggagctggagggcttgtgcagggtggggctgggccggccatgggcatccatgagggagtgaggccatgagcgggggagtcaggcataggctgtaacaagtcctgtggccagcctggaggaggaggccctcggccgaggtaatacaccagcagcgagaagcttgctctctccctcctcagagcgcggacgggccaggcagtgactgtcagggctcggtggtggctgctgctcctggatcaccttcgggccgtggatgtgcagcaggcaggctggccccacagcacctgagactcctgtgcagagcccagctgtgagttgtgaggctgccaggagtcctcggtatcccggtctaacaggttgcgtagaccacggtagcaccagccattttcacgctgtacccggcaggctcagcacggtcttgacgttatcacgcctgaactttgggatacagatcactgctgccgaggtcatgaagccaagctggggccgcgccgacctccaaccctggggctgggaccgtgctggcctccaaccccgcctggggctgggactgtgccgaccgccaaccctggggctgggactgtgctcatcccagggctgggactatgctgacctccaaccccggggctgggactgtgctgacctctaacccccagcagcacctgctgggatgagagcacacattacccaggtttatcacctctggaccctgatgccatggtccaaggccttcagcccctgagacgttttagggaagggagggcagccctggccgtggaggctcgtgcagagctgtgtgcatggtgagactgcccagcactgttcacaggcgctcagacgggcaccgcaaagacccgtggacagagctgtgccccacctgggatttgcacaagcccaacctgggtgccctggccgctgggtgccgaggggcttgggcccgtgtctctcacacctcagcagcagccctatgacaggtagcctcagcggactctgctgtggccacctgaccagcgccacccaccccaaccagctggctgggctcacgctgtgacccacgcctggcgtctgtggtgccaccagccaagatgccagccatgacgccagcctggcaccccaggcccaggacatctggggcaggtgggtgggcagcaccggcctcagcagcccacagaggggcctcccacagagtgtctggagacactccaggcagacgggcagatgagcaagacgcccgagggttgcaggccaggtggataaggattggggcttgcatgtgtccgcagtggggaacccgtgtgctcagcggcctgtcttgaagctgttccgctcttgcagatataatttagatatacatttttcctaattacaaatatgcagcatataaaaaaatctggaaaatgcagagaaccatgagtcactttccgtcccagcactccgagttaaccgccattaacattttgatgattttctaagagtccttttgcactctgtgagtgtgggtgtgagagtgtgtgtcgtgctgcagtgtgaacttgaagggttttctcacccctgaagttcagggctgactctcggcggacgctgctgagtcttctccccggctcgccccatgtgtgcatgaaagtgcctgggacgcgtcagattctcaacttgagacgcccggaragtcttttgaagttgaaaacactttgatwtcctgacagcctcaagacaaaaaaaaatctccccttcgctggctttgagagcaggtgtmttctacaagcgaggttcacagggacctatggctgccccggcagatgccatccaggcacgcccctctcctctcccgcgggtcctggtgggggagcctctgtgggaagcctgkgggctccggggcctggcagacaaccagtcctgctgcagcgaggtggggacaaggccgggagcagctcacttcccagtagaggccatccgatggcgccagggcacggggcagctgctgtcctcatggcccggggtaacgtgggcacagggtttcctcatcccactgtgctctgtgtctcccctgagcccggtgattttacgcacctgacttcgttagtcttctcggcaatgcccagcgtgcagaccaggctcaagagaggtgtgtcggtgtgcccagggtcacgcagcttcctggtggccaagccgaggttagaagctagttctggtgggtgcgaaagcccccgatgtcggcagctctgccaccaggcccgcacaagcaggtggtgtaagaggggaggcgttggggccggcagtgctcaagtcaggattgagccgtctatctggaaggtctgttgagggtgtgtgctggtggccgggaggtggtggcaggctgactacctgccattttcctgcagtgcctaggcccaggagagggagcagcccccggtcaggacccagctgcaggacaccccatcctcatggaccttgcttcccgctctccgtccccccacaaatgggctcccagcataacttcccccgagggctcctttcctctccccacacagagccctgctccggagcggcgcttgcagcacaccaatgacaggaggattgggcttcagggaagcaggcgcctggagctgtgtccagttaggtgcgtggcgcttgcagatccaagcatgaaatattcatgcctcccccggcccagcagctgcggcttctcatctggaacaagggggtgcttctcccaggaaggccagtgggagcaggggtgtgtctgagaatgcctgggcgctctgccctcacgatggccgctgatgccacaggcccggcctctgtgcccaggccactctccagcctggtgaggtctgttctgggaaaagagagaagcaagacagatgtgggccttgccctgtggggccagggcacaggcaggaatcccacttggggttaagacgctgcagtcacccctccaggtgccrgggtcccctgtggccgtggcgttctaggagagatgggcagggagacgctggcgccctgtcgtgtagcttatccttgtatctgcttcacaggctcttccactgtgcaatttcctaaaattttggcgaggcccatttatccattttaattttattctgtggattgtgctttggtgttgagtgtcagagctctgcctcatccagatcctgaagatttcttttttaacataattctgtgttttacatgtaagttcgtgatacagtttgagttaaattttatttgagatgtgaggtttcggtcaaaaaaatttttttttaactaagtgtgtccagctcctccggctccagctgtagcaaagacaaggctgcccttcctccactgaagcgcctttgtgacttttctgtgacttttccgtatcgattaatagggtcatatgttgtttattctttagcctgttgatatagcagattacattgattgattttcaaataccaagctagcctcgtacacctaaacgaagtcccacttggtcacggcataatnnnnnnnnnnnnnnnnnnnnnnnnnnnnnnnnnnnnnnnnnnnnnnnnnnnnnnnnnnnnnnnnnnnnnnnnnnnnnnnnnnnnnnnnnnnnnnnnnnnnnnnnnnnnnnnnnnnnnnnnnnnnnnnnnnnnnnnnnnnnnnnnnnnnnnnnnnnnnnnnnnnnnnnnnnnnnnnnnnnnnnnnnnnnnnnnnnnnnnnnnnnnnnnnnnnnnnnnnnnnnnnnnnnnnnnnnnnnnnnnnnnnnnnnnnnnnnnnnnnnnnnnnnnnnnnnnnnnnnnnnnnnnnnnnnnnnnnnnnnnnnnnnnnnnnnnnnnnnnnnnnnnnnnnnnnnnnnnnnnnnnnnnnnnnnnnnnnnnnnnnnnnnnnnnnnnnnnnnnnnnnnnnnnnnnnnnnnnnnnnnnnnnnnnnnnnnnnnnnnnnnnnnnnnnnnnnnnnnnnnnnnnnnnnnnnngtctccacatctcccctccagtgctgccccagccatgtctgtctgacgtaggagccgtataacgctgtgctgtagctgtacggttctcaacatcaggaagggcaattcctctactcttcttttttggaattgctttccatatacattttacaataatcttgtgtctctctaccaaaaaaaaaaaaaaaaatgctggccgggcatggtggctcacgcctgtaatcccaacacttggggaagccaaggcaaaaggatcgcttgagcccaggagttgggagaccagcctgggcaacacagggagaccccatctctatgaaaaaaatacagccatgagtggtggtgcgcacctgtagttacagctacttggcacgttgaggcaggaagattgcctgaggctgcagtgagccaagaccacaccactgcactccagcctgggtgacagaataagaccctctttccaaaaaaaaaaaaaaatatatatatatatatatatatgctgaggtttggacagcaattaccttaaaaccaaagatcaattttggaaaaattgatttactataagtcttccagttcataaacattgtatctatttatacaaacattcttttkattcctttcgattcctttcatcagtatttcctaactttctgcaaacagacactatacaagtttttgttagatgtatacccgagtatttaagatgttctgtaaattatattgccttttaattttgtttttcacttgtttgcaattgctttatagaaatgtggttaatttttgtatgttcatcttatttcctgcaaccttcgtggactcacttagtgttccaggagttttctgcagattgctcaggattttccacgtgrgccgtcacgtcattctaggagttttctgcagattgcttagggttttccacgtgtgccgtcatgtgatttccgagtagggacagttctgttcttttccaatccctatgctgctgctttccttttcttacctgcatgccctggcgtgaggagctcccatgctgggttgaggatgagtggggaaagccagctctccgctgaccgaatgagggaaggcggccagactcttccgtgaagsagcgtgagctgagggttcttcgtggtgctttttaccaagtcggaggactttcccttgattcctgctttgcaagagttcttgtcaggaatggagattaaattttttcaaatgctttgcctgtgccaataggatcatatcattgtcttcctttagcctgttgatagggtggataacattgattgattttcaaatttgaactagccgtcgttgtacacctaaactgaatcccacttggtcagggtgtgatactctttttcgtgtgttgctggattccatttgttagtccttgttgagtatttttgcagctaagctcatgagagactgatacttatttttctttgtgtgcgcaccatccttgttggtttcagtacagggttcatagtggaaaggtgtttctctgtcttttgttaactgaaaaaggattgtgtaaaattggtattaattcatatttaatgttcggtaaaactttctagtgaaacyatctgggactggagattttgagtagcattttaattagaacaaacttgatttatttaatggttataggactaccgaggctattttatcttggcacgttttggtagtatgtggttttcgaggaatccatccagtttgttatgagcatcaagttttgttgtagtattttttattgttattttaatagcttctggatctattataatatttccatttcatttctgatattggtcatttcactctcccccccsccttttttttttttgagatggagtctcgctgtgttgctcaggctggagtgcagtggcacgatctcggctcactgcaagctccgcctcctgggttcatgccattctcctgcctcagcctcccaaggagctgggactacaggcacccgccaccacacccggctaattttttgtatttttagtagagatggggtttcactgtgttagccaggatggtcttgatctcctgacctcgtgatccgcccacctcggcctcccaaagtgctgggattacaggcgttccccctttttaatctttgtcagttttgccaggggtttatcaatttatcgttgctggtctttctaacaaatttttgagacagggtttcacttctgttgcccaggctggagtgcagtggtgtgatcatagctcactacagcctcaaactcctaggcccacgtgatcccacatacctggggctacaggtgtatgccaccacacnnnnnnnnnnnnnnnnnnnnnnnnnnnnnnnnnnnnnnnnnnnnnnnnnnnnnnnnnnnnnnnnnnnnnnnnnnnnnnnnnnnnnnnnnnnnnnnnnnnnnnnnnnnnnnnnnnnnnnnnnnnnnnnnnnnnnnnnnnnnnnnnnnnnnnnnnnnnnnnnnnnnnnnnnnnnnnnnnnnnnnnnnnnnnnnnnnnnnnnnnnnnnnnnnnnnnnnnnnnnnnnnnnnnnnnnnnnnnnnnnnnnnnnnnnnnnnnnnnnnnnnnnnnnnnnnnnnnnnnnnnnnnnnnnnnnnnnnnnnnnnnnnnnnnnnnnnnnnnnnnnnnnnnnnnnnnnnnnnnnnnnnnnnnnnnnnnnnnnnnnnnnnnnnnnnnnnnnnnnnnnnnnnnnnnnnnnnnngtttctggttttgatgtccactggtgtggcctccacctcttcacgccaccccacagatgaacagcattcacataacttcccagtatctcgaagtagcatcgtttccatttcctgcgtgtcttctcattttactgcattatttcagctttccttgtttgagccaggattcagggcttccttcattccatctctagcttcctcccctcgagtttcccagttcatggagtttctcttggaccctcagcagcagggggtcttgttcttgacaggaatccctcacacttcccccttggcctccgagccccaccacatcctgcggttggtggtgtgtggagaaagtggtgtgtggagagagttggtggtgtgcgctgtctctgctctccaagccctttgtcagcccccacccctccctcactccgtgcctcttrtccgtgcccgctgggacaccatggggctcggctcaggggatggtgggaccagcgcttagtaagactagtcagccctaggcaccgagtgagcactgctcacgtggcagagctggaatgggggccgggcacacamtccctggcccacgtgttccacggacatgctgcagaggtccccggccctccagggcaggccctctctgcttccagaggggcaggtgagccccaggccaggccagcgagggtctggactagagtgcagtggccacartggacgccgcgagtgtcttcattaagagtgagtgtctcagtctcccccagggcgcccgccagccacasggccgctatgtgcgcagactagacaggtggcagctcgggccggccaggcagagggagaggaagccagagcctgcgcgcaggcagcctcagaartatttccagccacagccaacgtgtcttactggcaatttgctttttaaaaaattgcagtttaattttaagtgagcagcccgtaattacagtgatttacgaggtacctggggactgtgtgatatttgaacatggcagagggctgagcagcgatggcagagatggatgggcccggcgccactcattcagcaggtcctgctaatgccggagcgttagaccgaggtggagcctcccaatgtggctgggtacrctgggggaaacggagtcagaggtgggctgcacrgcaggtcgacttgttcaccgggggctggtgttttgcaaacgctgggtctgccttcgtgtggggtttgagctgggagagtagcactggtcactcctgcctgtctccgtccacccccacccccacctggagggcagcccggtatcttagggcgtcattcttccagagccgcctgaggccggcagagaggaggtgctgtaggagccgtgagtgggttgcccggcctaccattgggagcagctgtcttgctgacgctggcggggtgcacctgtttcaaataaagaatgatcagagctcacgcctgtaatcctcacgtcgtgggcagctgaggcaggaggatcacgtcaggccaggagtttgagaccagccaggccaggagtttgagaccagcctgggcaaaatagctaaagtctatctatctctcaaaaaaatttaaaaattagccaggtgtgctggcacatgcctgtcattccaactgctcaggaggctgaggtggatcacttgagtccgggagctcgaggctgagtgacccgttatcatgccactgcactccagcctgggtgacagagtgagactcgtctctaaaaaaaaatatttttagaaatgaacggccaggctcccaaagcctgccagcctctgagggccggggaaggcgggtgcctggaaaacagctattctctggtccagcctggccagagtctgcaccacagtgcgtcaggcccagccaggttgccagccctgggttgggaggagggcgaagggccggctgaggagacttcttcccacactgcctccccacccctgcccggcagctgcaggagaatcagcccctctgacatttagggggagaaattcagaatcaagagcagaaggcagaagtgaaaggattttctcagcgaaaggtcagagtggtttctcttgtttttgtttaaaaatggtttgtgttgaactatgacaaggccaaatgtactaaggcagcagaaacagggggagggcagggggagggcacggggacggctcctgagaaacaggaggtgcaggaacaggtcaggtcgcagggcctctggggcagcacgtgctccaaaggtggtgaggggaggggcgacaccatcagggcggggcccagcccaggcatgctccggtggacaggggagctgccaggaccaagctggatggagccaggccgccctgtggctcctggggagggttcccagagggctgccgggcggagggagcgctttccaaaacggtttcctgagctccgatgcacacacatgcagctcaccctcacgtctagcgctccattagtctaccgttccgttcctcccggcacattcagtgcgcagccgcgaccagtctaaccgtggcacatttccactggccctgagccctgacgtgcccctccaggacatcccctgggcacggagttgtgtcgacaggtctctgtgactggctgggcgtgttttcggggtttgcccgcgtggcagcgtgtatcagagttcggctgtacgaagcggtgttgacgggtaaacccggttttgtgtctccctccggcggttgagggctggttccgcgttccatctgttggtgatgggatcgtgttgccgtggacacccgtgccgaggtctgtgcgtggactgcgctcagaccccctggctgcgcgcccgggcgggtgctgggcccatggactctgcgtccagctctttgaggagctgccggctgtttgcagtggccgcaccacacacgctcccgccagcgacgcggagggtctgattcccctcgacccagcagctcatggtggttgctctcagtggccgtcggcgcgaggcggctccgtgtctcgctcagttgcggttcacgtttccccggtgcccagcgtcctggcatgagctcattggccgtgtgtggctcttctctggagaaatgttcaagggccccttgtttaattggcyctttcctcttcatggtggagttgtgggagttctgggcatattctgggtacaggacttttcagggacgtggtttcagagggagctttgtggtgggccgggtttgtgtcctgcctgacctggggctgtgtgggtgctgaccggggtggggctggctctcgggggcagctcagaagggcctctgtccactccccacacagcccaggaccgtggcacagcagcttgctcagacctgctgtgtgactcctgccctgtgtcccctggggcctgcagcgctgtctggaagctcctccttgcccgttctccagttacaggaggccgccctctgggctgcagaatccacagagccagactccccctgggcccccagcgcccccctgcacaagtggggaaactagatcatggggcccaggcagtgtggaaggcgttgcaggacttgcccagggcgtggggtcctccagcctcagtgaagagtggcactagggcctggcacaggtgctggagccccccaggtggaggaaggagcaaggtggcagccccttgggtgggcacaccccacagtgcctgggacccccaactgcctgggtagatgacagtgtagacaacagagaccttgccctgggttaattcagtccctttaggtgacctggaataaggcctggcagggttgaggacgcatctacccctgtccaggtcctcagactgagggaagcccccatggctggaggggctgtgtagggagggaggggagagggagaggcctgtcgggctgaccgctgtcttgtctctttcttgactgccccgcaggccaccagcccctcgggttccaagatgcagctactggagacagagttctcacacaccgtgggcgagctcatcgaggtgcacctgcggcgccaggacagcatccctgccttcctcagctcgctcaccctcgagctcttcagccgccagaccgtggcgtagcctgcaggctcgggggcatagccggagccactctgcttggcctgacctgcaggtcccctgccccgccagccacaggctgggtgcacgtcctgcctctccagccccacagggcagcagcatgactgacagacacgctgggacctacgtcgggcttcctgctggggcggccagcacyctctccacgtgcagaccccatgcgtcccggagcctggtgtgtgggcgtcggccaccagcctgggttcctcaccttgtgaaataaaatcttctcccctagacactcccactcgccctgtgtatctgtggcctagccctakcakggtgggcgggaggaggggaaggagctccctcagcagccgccgccatctgcagcccggacaacgttagggtgagtcaggcatctctgctcagggagtgcacaggtggcagctgggaccaagggtggctggggtgccctccccaccaccatgggctgaggcccctccgcgtagcagcttccagctctgcctcaaggccgggccccagctccaggacttccctttgctgatggaacccggatggaggcacaggggctggggggactgtcctcacagataagggtgcatcgaggggagactgccctctgtgcccatctctccagggccaagagagggcctggacccggctggcagcaccaaacccaggggtgtggggtggctccgccccatggggcagatggagcatctggccctggaggctggagagcgagtcccctcctcccaactcggcggccccggccttctccagccatggggaatatgagccgatgattcagaggtgcagctgccgctatctgagcccagcagaggggagctggtgcagccaggggaacggccttgctccagagcctccaatgctgagacggagggagacccatggtgggggcgggggcagggggaggaaggagcagggaggcgtggaccctgccacctgcctgcgaactgtgggcctgggccagggccacgcccgggactgccgcctccacccagactcctcaaaggtggggcagctccgccggctctgccannnnnnnnnnnnnnnnnnnnnnnnnnnnnnnnnnnnnnnnnnnnnnnnnnnnnnnnnnnnnnnnnnnnnnnnnnnnnnnnnnnnnnnnnnnnnnnnnnnnnnnnnnnnnnnnnnnnnnnnnnnnnnnnnnnnnnnnnnnnnnnnnnnnnnnnnnnnnnnnnnnnnnnnnnnnnnnnnnnnnnnnnnnnnnnnnnnnnnnnnnnnnnnnnnnnnnnnnnnnnnnnnnnnnnnnnnnnnnnnnnnnnnnnnnnnnnnnnnnnnnnnnnnnnnnnnnnnnnnnnnnnnnnnnnnnnnnnnnnnnnnnnnnnnnnnnnnnnnnnnnnnnnnnnnnnnnnnnnnnnnnnnnnnnnnnnnnnnnnnnnnnnnnnnnnnnacgaggctttgtgcgggacgcaggctgtgcagacaagagaagtgagatgtctccatgtcacgtgaaggttgttctgccctggctcggcccctggacacacatgtgcctcagacagacacacagccccgccagagctgggcaaccactggctctcacactgaaacccggagtcccagactgttcggccccatcgcagccctggggtggccacagccccatgtctcagctgagcacagcggggcccacacaggatgctgctcccacagccacagataatcagaacggggccctggtctagcctttgggctgtcctctgccaataccccccaggtcaatcccagggtcctggcaccccagcccccaccaccctgctttccccatcaccattcctgccgtgccacagcctgagagccgaggtgcctgcctccacccaccctttcaccgccagcagccccggtgacggcccccacacacactcatggacctggggcttctgggaccgagccccactcagctggcccttcaggaccagggagccagcaccaccctggctgtgaacacagagggacaggggccggttcttgtcaaggcaatttaggagatggggtccgactggaccctgaaggcggatgggaccccaccaggtaggaagcggggatagggtgggcccagaggctggaggtcaggggccatcctgggggaggacagagggctgagccctcaggcagaacagaagcccgcagcctctgccccaggggcagcagggggagtggtccctggtgggcgacagccgggtccaggtccaggcaggagcccccccaaaggtggtggtcttgattgcaaggccagagctaaactccagccagcccaggtgggaatggaacttaccaggaggatttggggcagaggctgagaaaatggagagtggggaggtgggctcagcctcaggaggcactggcacggctccccccgtggacacacaccccactgactcccgcggtggacacacaccccactgactcccccggtggacacacaccccacggctcccccggtggacacacaccccactgactcccccggtggacacacacccctcagctccgggaccctgggaccactggctctgccatcaccgatgcataacctggtggctgaggagcaatggtcacggcctccaaccacaccagaaaaaccgcagcaggggttcccacagccacagaccctcatggccacaggactccacccactgtccccaagcccttgtgtcaccttcccaagatctgaggctgctgaaccttctggttgctgcagcctgggccacggcccacacctgccttccaccccggcttctgtggcatcaagacgggcttggcagctaaagggccacaaacaagccccctgtccccaggtgcaatctcaagtctgcatctggacccggggcgccttcctgacttggtctccccttccccgtccacatccgcatccggaccaggggtaccctcctgccttggtctccccttccccctccacagccagggatctccaaagcaccttcctttcggggagcccggggccggcacctcccctgccggctccccgggagggtctacaagaggctgggccccccagccagcgctgagatgcaccagctccggccggcaggcggctctgctctgatcatgggattttcctttccccgggaagaggcagaggcggggctggagcagccctcacacccccaagggacgtgtctgggtgggctggagagagcagaggtctctgataacatgtgtcccttgcgggctgatttaataaaccttccccacgagtttgtcaaatcctcttcacgcgtctgccaggtggaatgggaaagaaacagcgtgtgaggaccccaggaggcgccaccggtcccctgtccctgcccagccctggctgccgggccagagaaagttctggttctggcagattccccgcttccccccagctccttagtgggcacccaacgctaaatggttcttaagccgctaatgactaattttaagggattagtgctgcagcaatcaactgtaattgccaggatgtaacaggatttggggggccccagggctccctccagcctcccggcaggccggagaggacagtgccacctgccggggtctctgagggatcaacctccctccctccctcccactgcacctggcaccgggcagccagcacaagaccattgcagggttagtctgtctctttccttcccacagacaactcgtgcaagttttggagaaatccctgggttttctgcagcccctcacttctcagagtggggtccctggaagcacctgagaaaggcaggtcctcaggtcctgcctggagcaactgtgagaatctacctttaacaagtctctcccgcagctcgtacacacagaggctctcatcggcttggaacttgccaattggcaatgctcatcctcatcccatactgatcctgcaagtctggtcttgtcaggagaggagacctcagtgcagaaagccagggactggcccaccaacgcctcctgcaagtctgtgttgggcagggactcaaaccctgctctcttgactgcaaattcagctgcccctccaggccccagcgtctgagttaaacttggcccattgccctcctgttaaaatgtcaccaggacaccatgggcaggcgagggctgggaccttcatccagagacagcattggagggagactcagaggtccaggggctcagaacctcgggctatacatacaggagtgtgtttacaggcatgtacatgcagaggtgtgggcatgcaccactgccactcctggacacatgacccgtgtacacgtgcacatacaggcatgtgcagtgcatgtccccaggcttggtttgtgtgtatacatgtgccgtgtgtgtgcataactgcatttgtgtattggtgtgtggccctgtgtgcacatgtgtatgtacagatgtgtgtacgtgcatgtatccctgtatggtttgtgtacatgagcatgtgtgtacatgtgatgtgtgcatgtgtgaccacgtgtattggtgtgtcatatgtgcacataggtgcatatgtgctcctgtgtgcaagcatgacttcacatgtgcgtactggtgtgggccatgtgtacacgtgttcatgtgtgcacacatgactgcatgtgtgttggtgcatagccatgtgtgcacatggttgcatgtgtgtgcacctgaggacaggcggcttcaccagaatgcttaaatcgctgcttgcggcccagagaggaggagttccctgtccgaagtcgcacagtgagagacggccggcaaggaggcgccaggagcccggtccagacatcagctggcccagcctggcagtctcgttttgttttatgttttctttaactgcacaattcaaatacatttttaacactaaaacaaaacaaagttccctccaacaatatgagaggaacgtagagtgaaaaggagaagtcccttctggcccccatcccagactctcccgcctgtgggtggatgtgcacacctaccatatggacacacgaaaacacacggttctgcctccctgggtggtctgtgtgcttttaaaatccctacgtattgttccgcagcttgctttttctcacttcacaatatgtcttggaaattttccatagacgcgtgtactgatctgtttcactggattttgctgttgttgccaacactctcaagaaattttattgaaaacggtgacacacagaaacaccagattctcattttaaagtaaaactgacagcatttttcagaacttccatagttctgaaccatttgtgtcactatctttcaaagcaaaacaaaacaccgagtcccagatcccaacgagcagaggtggccctctgagagccacggggagaggctccggggaaacaggccctgccgattgatgtcctgatcttggacctgggcccccagaacctcgagaaagaactggtgcggcggaggccgccccggcgggtcgtagtctggggtttgtttacagcggcaggagctgcccaattgatccttacccatgagtaagccctcccttcccctcatctcctgagccagctctatcctttcttccggcgttccccactacctggcgttttgttcaatgcatagtttatttttgatagacatagactgcacatctgttccagcagatacagtcatgtttcagacagattagcgtcctcacagaacagcgctaatagagacgccacgcgaaccgcatacgtaacttgacattttttagtagccacgttaaatagtaagcagaagccagtgaaattaatgttagcaaatacacctctaacccaatctatccaacatggcatcgtgtcgacgtgtgaccaatgcgaacggtgaatgggaccttccacagtcggctttggtctcggggatcccgctggattttccacttgtccctctcggttgggcccagccaccccgggcgcccctggctctggcgtgtcacacccgtggggaaggaggggccttgtcacgttcaccgagggagctggcgcctgacagtcctggctcacaccggtgcacaggtgtgtgcgggtgaatccatgctgcgtggtgacaggtgatgttgtgctgtgtccctactcgactaatgagaaaactggaaccagagaacaggggaagcggctgtcccagctctggtgtcgctgggcacgggcggaggcggtggcagagccaggcctggctccctcctgggcagagggacagaggtgagcagtgagcactgcccaccaaggaccggggacctggagctcatggcccctcagcttcctctgagcaccccctcctcccagacggagccaggggctgggcagccaggcgcaccccggccgggacatcaggagacctcagttgaatgctggctcagcccagcctgcgggatggtcgtgggcaagggtcctcccctccctgggcctcagtcttcgcatctggaaaacggaccacatgacctgccaggggtgtccacctggcccagcacccagcccgggtaggggacaccccagggcgcagtatgtggcctcttcagcataacactataattagcccaattacccaccgctttcatgcttttttttaatttaaaatggaaattaaattttgcagcaggtttacaggctgttaacggaattcactaatcaaay

SEQ ID NO: 97041 - DNA, 58646 bp, Homo sapiens
aaggtgggcggatcacttgaggtcaggaatttgagaccagcctgggcaacatggtgaaaccccgtctctacgaaaaatacaaaaattaggtgggtgtggaggcgtgtgcctgaaatcccagctacttgggaggctgaggcaccaagaatcgtttgaactggggaggcggaggttgcagtgagctgagatcctgccactgcactctagcctgggcaacagagcgagactccatctcaaaaaaaaaaacaaaaaacccaacaaaacaaaaaaccaccatctactatcccatcagttcataaataaagactttctaattcccaaaatatggaaatgacatcattttagatgaatatccatttgtttaactttttgttttagaataatttcacacataaaatttgctacaatagtacgatgaactcctatatactcttcacccagattcaccagttgctaatgttttgctatattaggtttatgagtttcttttttaaaaaaaaaatttttaagacagagtctcactctgtcacccaggctggagtgcagtggctcaatctcggctcacggcaacctctctctcctgagttcaagcaattctcctgcttcagcctcccaagtagctgagattacaggtgtatgccaccatacccagttaatttttgtattttgagtagaaacatggtttcaccatgttggccaagctgttctggaactcctgacctcaaatgatccaccacctcggcctccaaaagtgcagggattacaggcatgagctactgtgcacagccttggtttatgattctgtctctctacattcatacacacagagaaagagaacacgtgcacaagacagaatactccctgtttatataaatttctttactgaattatttgagagtaaattatagacattgcacctctttaccctgaaatacttatgtactatcaccaaaaccaggaaacttaacatcattgatataatattataatctacataattgattaaaattttgccaattatcctaataatgtcccctctccctccccctgctgctacttctctctcttctccccttctcctcctccccaccctccttttcttcctccttctctacaccctcttcctcctctttttcttttctttttcctcttctaggcattgctttctctggcccaggatccattctaggatcacacgttgcttttggttgtcatgtctcttcagtttccttcaatctgttgacagtttcctcaggctttcttttgtctttcatgacattgacatttgtgtgtatgaaaagtacaggcctgttattgagtagaaggtccctcagttggagtttgtctgatgtttgctcatggttacactcaagtaatgcatttttgccaaaataccacagaaatgatacgtcctttctcattgcatgacatcagaaggcatatgacattggtttgtcctatttaagagatgttaactttgctctcttagttaaaagggtggccaccagatttctccactgtcaaattaccattttcccctttgtaattagtaaataatttgttaagtggattaataagtcttttaaaggaaataaaatcttcattttacgtcttcctaaatgagtctttttttttttttttttttttttgagttggagtctcgcactgttgcccgggctagagtgcgatggcgtaatcttggctcattgcaacctctgcttcctgggttcatgcgattctcctgcctcagcctcccaagtagctgggattacaggtgcaccccaccacacctgactaattttttgtacttttagtagtgatggggtttcactgtgttggcgaaactggtctcgaactcctgaccttgtgatctgcctgcctcagcctcccaaagtgttaggattacaggcgtgagccaccccacccggccaataagtcttttaaaggaaaaaaggctttttgaaaaattcataacataatccttattttggactgactcttaaaaaccctggcacaagaatgcaagcaaattactcatttatctatcaaatccttgagtactgcatgtgccaggtactgctccagaccctgccttctccatctaactccctctttagtcatcctggacagactggccccaggcttgggtccccaaagtcatttcttgagccgcttgaaggcaggagctgatacagagacacagtaggtagtggttctggaatctagtgtacccacagtgtaacaaggagacctgctctcaactctatggatacagcaaggctcttctgtgatgaaagaaataatattgctgacatatgtgtttatattttaattagctttctctgagttacactgtagtaacaaataacccaaaactcttagtggcttacagtaagaagggtttatttcttatgcacattttatgtcggctgtggtcattggtggttctgctctgtgttgtcctctccattctgggatctgggcagaagatgtagcctctatttgaaatatgtaatcctcatggcagagggaaaaggaaagtgatagaagtctgccatagttcttaaaccttctgcagggaaaagcatagtcatttccacttacatttattggccacctcaagtcgtgtgaccatgcccgccattaatgggacagtgaagtgtattcctcctaaaaaggagtgccgcaagtcacatagcaaaaggagaggacgtataatcacctcacaggaaaggatagaataaatcagaaccaataatgcaaccaactatggtagaattcttttttttttttaattgaaacagagtttcactcttgttgtccaggctggagtgcagtggtgcgatctcggctcactgcaacctccgcctcccaggttcaagcaattcccctgccccttctgagtagctaggattacaggcgcctgccaccacgcctggctaattttttgtatttttagtagagacggggtttcaccatgttggccacactggtctggaactcctgaccccaggtgatccacccgcctcggcatcccaaagtgctgggataacaggtgtgagccaccgcacccagccggtagaattattttatacaggttctctgcaccaaccttccaatttacagaaaacagagagggccagaggaacaagttaaacaacaccatgaagaaacactcactcaatccaaaatgtggaacattctgtaagaaagctggcctggagtcttcaaaaagacaatgttatagaaaaagaaagaagcgactcttccagcttaaaggatacaacaattcataagcttggattgaatctgatttttaaaaatctataattagggacaattgggtaaaatgttatataaactaaatattagatgatattagagaattattgttaactttttaggcatgataatgattttgtagttatgtaggggaatgtccctcttttaggagatacatgcaaatatattcagaggtgaagtgacataacatttgcaatttactttcaaaaggttaagcaaaaaagtattcatggctgggcatggtggctcatgcctataatcccagcactttgagaggccgaggtgggcagatcacctgaggtcgggagttcaagaccagtctgaccaacatggagaaaccctgtctccactaaaaatacaaaatcagctgggcgtggtggcgcatgcctgaaatcccagctcctcgggaggctgaggcaggagaatcatttgaacccaggaggcggatgttgtggtgagccgagattgcgccattgcactccagcctgggcaacaagagagaaactccatctcaaaatatatatatatatttataaagagagagagcaaagttgtataatgcctaaaatgttgaagcttggtggagagtggaggggtgttaatactattccttcaaatttgctgtttttaaaattcgtaaaaataaaaaaataggagaagtatataggtgtagttgtgattaataaaaataaagcggcagagtgcagtggcctcacacctgtaatcccagcagtttgggagtctgaggcggggtggatcacgaggtcaggagtttaataccagcctgaccaacatggtaaaaccccgtctctattaaaatcagaaaaattagccagtcatggtggtgggcgccattaatcccactactcaggaggctgaggcaggagaatcccttgaacccaggaggcggaggttgcagtgagccgagactgcaccattgcactccagcctgggcaacagagcgagacttggtctcaaaaaataaataaataaataaataaagctcactttaaaacgtttctgaatttatcttaaacaaagtaacatgaggagaaaaagaaaaattattttgaaaaagaataaaatgtttctgaacttatagtattttttaaatcgttataattttctctattggtttaatctccactaacatatgaggagaaagcccttaatttttattttattttatcttaatttttttagagacagcgtctcagtctgtcaaccaggctggagtgcagtgccacgatcatagctcactgtagcctcaaactcccagcactgtgggaggctgaggcaggaggatcacttgagcccacgaatttgaagctgtagtgagctatgatcacgctactgcacaaagtgagaccccgtctcaaaaaaattaaaaataaataaataaggtagaaagcctcctaattaagcctttctggaaagtcttaactaatatactgtattatatgaaacaccttacaaacttcatatccactttgtcttgggaatttaactaagaaaagaaccgtggatttctgtaaagattcagcaacaaggaagttcatcccagcattatttacttcagtgaaaaaaaaatgggtataatttaagtgttccaacaatagttggttaaataaactatggcccagtcacccaaagaaaggaatacaatacagccatcaaaaattatgttgtgggccgggtgtggtggctcattcctgtaatcccagcattttgggaggctgaggtgggtggatcatttgaggccaggagtttgagaccagcctgagcaacatgcgaaaccccgtctctacaaaaaatacaaaaattaaccaggtgtggtggtacatgtctgtaatcccagctaactcaggaggctgaggtgggatgattgcttgagcccagaaggctaaggctgcagtgaccagagactgcaccactgcactccagcctaggtaataaagcaagaccatgtctccaaataataaaataaaataaaaggtattgcagaacaacaagtgaaagatactcatacaatgtatttaacaagtggaaagatactcgtacaatatatttagtttatgaaacaacagtatgtactgtataatcctgtttttgttaaaaaaagaaaaaaaacagaaaaaagactggaagaatatacactcaagtgcctaatatcttggttatctctggaggttggatttacagataatttttattattttatttttccttatatctactttaaaaatgttataaagtgaatgtgaattacttttaaattaagaaaaaaacataaaaatgatatttgaaggaaggctactgaattgccaaatattttcttctgaagaacatgaaggagcccccttgtgggtccctggacccttaatcagagctgagaccaacccaagccgcaaggtggcagtgctgttcgctgaggctgcccttgggctgagcactcttgggccacacccgtgagagtgccccctcccccagtttcccttttaccccaacacacatgggcaccccctgaaagaagagacaacttggtgtgcacagctgctctgcccatctttgcacctaagtccagggtgacaggggagtggagacgacaaatcaagaatgtcctttccttggaggaaactgggaggcttcccccaacaaccattgtctctgaatgtggctccagctgccagattgtgtyygygtgtgtgtgtgtgtgtgtgtgtgtgtgtgtgtgtgtgtgtgtgtgtattctgcatgttttgcttattgtatcgtttttcttggatgttgtgtatttgttttaatgtttagaacttgttcttttatttcagaacaatatgaacagaacacaatgttgaagaaaatacatttactttgtacccaattctatgcatattttcttctgctttccagtccacacgttgttcatcatattggaaatcctctctayacctgctttgaagcaggatcaatgcactatactgatataatttcagcaaataactactgacatgaattcataaatggcatcattttgcattctgctctgtaggcttataataaaagtacttcgtctacaaagcaataatgcaactttatttataaaatcattttccaattaagaaaattttcaatggtttataaaagtggacatttgcacaatctttttcataattcatgaaattgtttaaagtgtaaaattcagtattttttagtatattcacagaattctgcaacatcaccagaataaattttagaatataattgaatcttgaacaacgtggaggttaggggtgccagcctccctgcagctaaaaatccatgtataacttttgactcccccagagcttaactactaatagccttctgtttacctgaagccttagtgataacataaacagttgattaacgcatattttgtctgctatatgtattatactcttacaataaagtaagctagagaaaaggaatgctatcaggaaactcataagaaagaaaaaactatgtttactattcattaagtggaagtggatcatcataaagatcttcatccttgtcatcttcgcgttgagtaggctgaggaggaggaggaaaacgggttggtcttgctgtcttggggtggcacagtcagaagaaactttgtctatcagtggaccagtgcagttcaaacctgtgttgttcaagagtcaactgtattttcatcacccccgaaaaagaaaccctatatccattagcagtcactcctcatttcccctatatatttgcatattctagacattgcatatagatgggattatacaacgcgtgtcttttgtgacacttttctcacttggcataacgttttcaaggttcatccacgttgtagcatgtatcagtacttcattcctttgtagtgccaaataatattccattgtatggaattttatktatccatccatcaatggatggatatttgggttatttccactttgggctactatgaataatgctgctatgaatattcatatacacgtttttgtgtgggatatacctaggagtgaaattgctgcatcatatgactgttttccaaagtggatgcaccactgtacgttcccactaacaatgtatgagggttccagtttctctacatcctcgcagactcttgttattgtctatctttttgataatagccatcctaatgagtgttaagtggtatctcattgtagttttgatttgcctttccatgatggctagtggccatttctgtatcttctttggagctatgtctattcagatcctttgcccattgtttaattgggttatttgtcattttatgattgagttgttaaagttcttcataaattctagacagcagtcccttatcagatatctgatttgcagatattttatgccattctgtgaattgtcttttcaccttcctattggtgttctttgaagcaccaaaatttataattgtgataaagtccagtttatctatttttttcttttgtcacttgtgctttggcccataccaaggtcacaaatattattcctatattttcttcctatatttcttctaagaaatatatggtttctccaaagtaatgcagattatttaaaaaaagagaaaaaaagaaataygtggcatgtagggtgtcagataggggtccaatttcattcctttgcagttgtatatccagttgtcccaacaccatttgttaaaaatactatttttttcyccattcaattgtcttgacactcttgttgaaaatcaattaatcataaatgaaagggtatacttctggactcacaattctattctattgctttatgtctatccttatggcagtaccacactgtcttgattaccacggttttataggaagttttgaaattaggaagtgtgagccctccaactttgttcttctttttcaagactgttttggctattctggattcctggaatttctatatgaattttagaatcagcttgtcaatttctaccaaaaaatccagctgtgattttgctgtagattgcaatgaatctgtagatcattttggggaaaactggcatcttaaccatgttaagtcttctgatcaatgaacatagaacgtctttcctttaatttaggtgtacatctgctttttaaatgttactgggcagggagcttaaatatcagatggttctagtttattctcaaacacttgggtaacttgagtaaagcccattaagcatgtagatgtcactcagcaaagcctgaggaggacagtccctacctttgcagtacggacagttgctcagcataactcagaggtgctgccacaggtttctggttttcctttcttttttttttttttttttgaaactatttcgctcttgttgcccagactgaagggcagtggcgcagtctcactcactgcaacttcggtctccagggttcaagcgattctcccgcctcaacctcccgagtagtggggattataggagtatgccaccacgcctggctaatttttgtatttttagtagagagtgwgttttcgccatgttagtcaggctggtcttcaactcctgaacttacctaaggtcaggagtttgagactagcctggccaacatagtgaaacctcatctctactaagtgatccacccacctcagcctcccaaagtgctgggattacaagagtgagccactgtacctggccagctgctggttatctgttacaagaaaaggtggataagcgctgggcgcggtggctcatgcctgtaatcccagcactttgggaggctgaggtgggtggatcacctgaggtcagaagttcaagaccaggctgaccaacatggagaaaccccgtctccactaaaaatacaaaattagccaggcatagtggcgcatgcctgtaatcctagctactcaggaggctgaggcaggagaattgcctgaacctgggaggcggaggttgtggtgagccaaaatcccgccattgcactctagcctgggcaacaagagcgaaactccatctcaaaaaaaaaaaaaaaaaaggaaaaggtggataagtctctctggatttattttccttacctgtaaaaaggaaataaccataattacctcaactacttcagtaaaattgtgttgaacaaattttttgaattataaaagtaaataggtaaaagatagtttattaaataggatataaaaagggtcaataaacaaatgaaaatatgctcaatatcaatagccaactgagaaatgcaaattaaagccacagtgaaatacacacccaccagaatggctaaaattaaagactgatactaccaagtcctgatgaacacatggaacaattagaactctcattcattgctggtgggagtgttaaatgggacaaccactttagaaaacatattggcagtttttaaaaataaaactaacagacataacagtagttccattttgtggtatttacccaagataaaagaaaatgtatattcacagaacagctgtacatgaatgttcatagctgttttattcacagtagccaaaaactggacacaaatatcagttgacgggagaatggataagtaaattgtggtatatccagaacaattaaagacaagtcagtaatttaaaagaagaacaaattattgatacacacaacatgcataatctttttttttttttttttttttttttttgagacgggagtctggctctgtcgcccaggctggagtgcgatggcgcgatctcggctctgcaagctccagcctcccaggttgacgccattctcctgcctcagcctcccgagtagctgggactataggcacccgccaccacgcccagctaattttttgtatttttagtagagacggggtttcaccgtgttagccaggatgatctcgatctcctgacctcgtgatccgcccacctcggcctccccaaagtgctgggattacaggcctgagccaccgcgcccagccacaacatgcataatcttaaaaatattatgttgagtgaaagaagccagacacaaaagagtatgtactgtataactggatttatgtaaaattctagaatggacaaaactaagctatagggacagcagatcagtggttgcctggggcttatgggggttggggcaattggctgcaaagaggcatgagagaactttctggaatgatggaaaggctctgtcttcattggggtggtggttacatgtgtgtatacctttggaaaaattcatcaagctgttctttttctttctttttttttttttttggagactgggtcttgttctgttgctcaggttttctacagcctcgacctcctggggtcaagcaatcctcctgcctcagcctcctgtgtagctatgattacaggcctatgccactatgcccagctaattttttaattttttgtagaggcagagtctcgctatgttgcccaggctggtctcccaactcctggggctcaagcattcccctcactcagcttcccaaagtgctgggattacaggcatgagtcaccatgcccagccaagctgttcttttttttttttgagatggagtctcactctgtcgcccaggctggagtgcagtggcacaatctcaactcaccgcaacctctgccacccgggttcaagcaattctgcctcagcctccagagtagctcggattacaggcgcctgccactgtgcttggctaattttgttgtatttttagttgagatggggttttaccatcttggccgggctggtctcgaactcctgacctcgtgatccacttaccttcaactcccaaattggtgggattacaggcgtgagccactgcgcccggccaatttttgtatttttagtagagacagggtttcactatgttggccaggctagtctcaaactcctgaccttaggtaatccgcccgcctcagcctcccaaagtggtgggattacaggcatgagccaccatgtatggctgagcactcttcctctaaagtctccccaaactatgttatgtctcctaaattctgaaaaagtccttctaaatattctaaagccacactcttttagacttatttccaagacctcagggaggcctaccagtccttctcaggccactgtaactgacctgaagtgtcctcttacccagacctcagctcctttgacctcaccctggcaggccactgggacctcgcctgctcctcagagctgaccctgcctgacaccccttgtttctcccttaagctttgagtgcagagacccaggacattcaggattcagccacaggtgctcagggaatactgggtggcctctggcctgggttctccaagccttagaagccacccacccataatgtctggtccacccaatgccctggcccttggatgctcatactttgstgtctctccttaggtataaataaaatagtgtcaataattacatatctttgtccttggccttttttttttttctctccatgacctgcaagtcaccgtggatggtggctggggtggttgggctttactgttctttcccactgagagtgcagacgaaagacctctgcaacaacacctgtgaactgcctggtgcctgtgtgggcccactgcggcctcacctcacacaatgtgggctgtgtagaccagagccagagaaagttaaagctgctcatgcactagggataaacacaattgacagtggttactgtccttccagaacattttttttcatgaaaatatgtgggcttgtttgtaagtgtgtgttggggggtcatttgtttttaacaggctgggctcatgctctttcagctcaataaatrtttattgattagctactgtatgccaggtactgttttatataactgaaaataatactgtaacttgctgttttttcttaaaagcataaaatctttccacatcagtacataatgatctccatcattattattgacagtcacatggtagtccatagcaaggcagtttcacaactccagaatttaactaattttagacattcagattgtctccatatacttttccattacaagtaatgctgcagtgaatgcctttgtcatatgaccttgtacacatttgtaaatatttctaatagactcctataagggaaactgcttaattagaacaaatgtgctggctgggcgcagtggctcacacctgtaatcccagcattttcggaggccgaggcgggcagatcacctaaggtcaggagttcaagaccagcctggctaacatggcaaaaacccatctctactaaagatacaaaaattagctgggcatggtggcatgtgcctgtagtcttggcttctcaggatgctgaggcaggagaatcgcttgaacctgggaggtggaggttgcagtgagcgtcactgcactccagcctgggtgataaagcgagactctgactcataaaaataataataataaagtaaatatactgaattttttattttactttcttttttgagacagggtcttgccagagcagcagtacaccgatacaggagtacagttatgtgatctcagctcactgcaacctctgcctcccaggttcaaatgatcctcccgtctcagccttccaagtagctgggattataggtgcaggccaccatgctgggccgatttttgtatttttagtagagacaggctttcactgtgttgcctaggctggtctcgaactgctttttttttttgtaacactgtctcactctgtcacctaggctagagtgcagtggcacgatctcagctcactgcaacctctgcctcccgggttcaagcatttctcctgcctcagccttccgagtagctgggactacagatgtgggccaccatgcctatctaatttttgtatttttagtagagacagggtttcaccatgttgcccaggctgatctcgaactcctgatctcaagcgatccacctgcctcggcctcccaaggtgctgggattacaggcgagagccaccgcaccccaccgaatgttcttaattgttgtacataggtgctatggtttgaatatttgtaccctccaaaactcttgttgaaacttaattcccagtgtggcagtattgggaggtggggtctttaagaggtgattggataatgagggctctgctttctcacagatgggttctttcattcataaattcgtggattaatgggttactgtgggaggggagctggtggctttataagaagaggaagagagacctgagctagcacattagcacgttcagccccctcaccatgtggtgctgtgctctgccttgggacgctgaagagagttcccaccagcaagaaggctctcaccagatacagccccttgaccttggacttctcagcctccataagagtaagaaatacacttcttttctttataaattgctcagttttagatattctgttataagcaacagaaaacagactaagataccaggtatcaagattgtacccattcattccgctactactagtgtacaagaaggccctttcccctactccctgtggcctatcttcagtaattttgtcaatttgatagataaaaatgggcaataatcttttcaacagaaatcagcctcagcggtcgatactgactgagcagtttacaaccttcagcacagggcacttctaaagtgtaaactgagagaggcgaagctctggccgctctcatggggaagattcggatttggctaacacttgcacggtcagtcatgtacgttcacacacttggtcttctttctccctcaccaccaccctctaaggtaaatgtcattatctcattttttcagatgaggaaacaggcccagagagactaacttctctaaatcaaaaagttaagaagtaacagcccagggggtgggggagtctgagagtgaagggaagagtagcagaggcaaggccatcattaaccctggagcttgcgtggagccaggactgggtctcaaggcaaggccagaccaagggaggagtggaggagggaatgacatgaaattctttgccatgggatgcagactgtggaatctgttttgcctgtgctcaaggcttgtcctggttgggcatgaggtagaggctgcaaagagtccagggccctcaaatccagggaggggaagacgccaggtctggtaatgcagaaggcctgaggagagattgggcagggatgttaccctggtgatgacggaggtgggttggagttgattatatgggtgcaggccttgtccacaagcgaatgggaaacttcttccgtcctcctagctggcctgcccaaagcccttagcacagatcccatttctcaaaaaactattaaaaaaaagagaagaaaagaaaagtaaaagaaaacccctcaacagtcctctttgcataatggtggctctgagcctgggatttccaaggacagactcgtgtctaaccacctctggctccagcacgtgctgagtggtattcagcgctcagcattctgaagaaatattttcagcagtctttcggtggggacccagtaggcagctaagtgcctttgtctggagattctcttccctggtgaaggtcagctcagctggacaggcttccagggtcacagaaacctctgtggacccacacgtacactagaagctgccgctctgcaggggtggcttcatctcagccccttttcccacacaaccttggtgcacaatatgctactctctgccaggggtcttaaggggaagcttaacacatggcagcatcactggagtggtggtttgccrgtgttttcagatgacagaggtccgaagaatacagaaaagggccttgcatcctgaacctggtgaaattgtggcccaggatcacaggaaaagagcacacctttcctcagtctttttatttgtgaaaatagtacaaataatagaaactctattctttggttggttatgtgtttattcttaggaaatgcgtttatatgcagagagaaaaagcagagggagagagagcaagcacatgcacataatgtggtaacgtcagtgaatctggggaaaaggtatttggaaattccttgtacattcaacttttctgtaagtttgaaattgtatcaaaataaaaagtgagtactctcttcccgcagtgcatatactaaaattggaacatacagagattagcatggcccctgcgcaaggatgatcagatggtttggatggtttttttttttttttttttgagacggagtctcgctctatcgcccaggctggagtgcagtggcgcgatctcggctcactgcaaactccgcctcccgggttcacaccattcttctgcctcagcctcctgagtagctgggactacaggcacccgccactgcgcctggctaattttttgtgtttttagtagagacggggtttcagtgtgttagccaggatggtctcgatctcctgaccttgtgatctgcctgcctcggcctcccaaagtgctgggattacaggtgtgagccactgcgcccagccggttgggatgctttgtcccttccaaatctcgtgttaaaatgtgacctcaggccgggcgtgatggctcacacctgcaatcccagcgttttgggagaccaaggtgggtggatcacctgaggtcaggagttcgagaccagcctggccaacatggtgaaaccccatctctactaaaaatacaaaaagtgagccaggcgtggtggcacatgcctgtaatcccagctacttgggaggctgaggcaggagaactacttgaacctgggaggtagaggtcgcagtgagccaagattgtgccattgcactccagcctgggcaacgagcgaaactacatctcaaaaaaaaaaaaaaaaaaagtgacctccaatgttggaggtgggcctaatgggagatgtttgggtcatgggagcagatgcctcatgaatggcttggtactgtccttatggtagtgagtgagctctcactctgagttcacgtgagatctggttgtttaaaagagcctggcacctcctctctctttttctctctctctccctctctctctctctctggttgtttaaaagagcctggcacctcctctctctctctctctcttgcttggtccctctcttgccatgtgacacactaggtccgctttgccttccaccatgattgtaagcttcctgaggcctcaccagcagcagatgctggtgccatgcttctcatacagcctgtagaaccgtaagccaaataaaccacttttctttataaattacccagtctcaggtattcctttttttttttttgagacaggatctcactctgtcacccaggctggagtgcagtggcacaatcttggaactgactcccgggctcaagtgatactcccaccttagttagcttcctgggtagctgggattataggcgtgcgccaccacccggctaatttttgtattttttgtagaaacagggttttgccatgttgcccaggctggtcttgaactcctgagctcaagcaatccacccatctcagccttcaaaagtgctgggtttacaggcatgggccaccgcacctggccagatattcctttagagcaatgcaaagtggactgatacagatgacatgcaaatttgtgaagtgttccatattttttactgcatgttctcatttataagtgggagctaaatgtgtacacatgaacacagagtgtggaatagtagacactggagacttgggagggtaggagggtgggaggtgggtgaaggataggaaatcagggggtacaatgtgcattatttagatgatggttacactaaaagcccagacttcaacactgtgtaatatatctatgtaacaaaacttcacctataccccttaaatttatatttctttttttttattttttttttgagacagagtctcactctgtcacccaggctggagtgcagtggcgggacctcggctcactgcaacctccgcctcccaggttcaagcgattctcctgcctcagcttcccgagtagctgatattacaggtgtgagccaccgtgcctggccaaatttatatttttaaaaagtaacaaaaagaattacaaaaaccagaggagcatttttaggtaaattaatcttcattcccacaagactagcgcaagattgggtttaaattttgcatagattttgatttttgttgttgttgttgtttgagacagggtcttgctctgtcaccaaggctggaatgcagaggcatgatcaccactctctgcagcctcaacctcctgagctcaagcaatcctcctacctcagccttccaagtagctggcaccacagacacacatcaccacacttggctaattttttttagagatggggtctatgttgctcaggctgctctcaaactcctgactcaagcgatccacccacctcggcttcctaaagattttgtgtttttttttwaaatatgaaaagacatgttattattattattagtgcatacaccagattgcactgtctccaatggcaaatgaggcagagggtaatatttctctttaattccccaagaacctcaatatcatctgtcttctggaggttccggtttcttctgacatctgtgctaatgtccacgaagatgccaaccgtacttagcataaagaacattttgctaagttgttctattatgggttctcgctcaaggtgttcacttttttcttctctagttttcagcacttgaccatgtgtttcttcattattatacacaggatctggtcaagggataggttttgtgcgttcatatggaatgtctatagaaggatggtaacatactattgtcctggcatcaggtgtcaaagcaaattctactttgcaattgtagtcacctggaaaagaagagtacgtagatttatgacaaacataaggctccattttggattgaagataaatgtttccagrtagttctctttgatatcacccgtcttactgctgctactgccatgtagcaagacacttatcaggtagtatgaaaaaagatgcttcaaagagaatctgcttctgggcacattaattttcatccctgcttcacagctgctcaccatgagcccatcatcttgtctccttatttttgcatagatcttaaattatttttacccagttgtaatcatggacaaatttgtagtctgctttttttcacttaacattagttataaactgttccatactgctgcatattctttgtaattataattttaatgatttataatttaattgttttacttgaatttgttttctttctttttttttttttttttttttttttgagagagaatctcactctgtcacccaggctggaatgcagtggcatgatcacagatcactgcagcctcgacttcccgggttcagttgatcctcccacttcaggctggcgcgtgccaccagacctggctaattttttttattttttgtagagrtagggggtttcaccatgttgcccaggctggtctcaaactcctgtgctcaagcaatcctcctgcctcagcttctcaaagtgttgggattacaggcatgagccattgcacctggccaayttacaatattatatatcataatttctattctcctgttggtggacatgtaagaggaagaggataatggttcatcatgagctctgtaccaggtgctgcccaccacaggctacatacaggcattatcttgtttgaccctcatgatcctgctatgccccaggctctgttctagtcttgggaacacatcagcaaattaaatagacaaaatggaacttacattctagttggtgtcagggtcgggggcagatgtgcaattaaaagtatacataatgctgaagaattaaatgttgaaggagtttaaattttgaaagtgtttgctatacataattgtcctgcattattattattttatttatttattttgagatggagtttccctctgttgcccaggctggagtgcagtggcgtgatctcarctcactgcaacctctgcctcctgggttcaagcgattctcctgcctcagaaggagtagctgggactacaagtgcgcaccaccacgcccggctaatttttgtattttagtagagacggmgtttcaccatattggccaagctggtctcgaactgctgaccttgtaatccacccacctcagctcccaaagtgctgggattacaggcatgagccaccatgcctggccattgtcctgcattgttataaagagttttcagcacgttttttaaaaaaggatacacataataaataagaaaagtatgtattataagatgccaaataatgtgtaaaaatagcagagtaaggagagtaatgggtttaggaggagggagtgttttcatttgaaatagagtaattggggtagaccacaccgagaacatttgagcaaagacttggaggagatgagagcaatccctgaataacacatgaagaaatcaaatkacttttacaatatgktctcgctatgccgttagaaagcaggcattagaagggctaagatcccaagaggggctggtgaaacttgtatatatctacatcattggctaaaatataaatcagcccagttcttttgtgaagcattatgtcaattcacacagccatttaaaatattaatgacttttgacctggtaatcccactcctgggaatttgtcctaaggaaatttttgcaaagaagagaaaaagctctatgtggaaagatcactgcagcagtatccatttgtcttagtcaggtctaaccttagtcaggtttatttctcacagttccgaggttggagtctgagaattgggggccagcagggtycagttctgggagaaagccctcttctgggtctccagctgtattaatccattctcacactgctataagaacatactggagactgggtaatttgtacaggaaagaggtttaattggctcacagtttggcatggctggggacgcctcaagaaacttacattcatggcagaaggggaagcaaatatgttcttcttcacagggcagcaggaaggagaatgagagccgactgaagggggaagccccttctaaaaccatcagatctcgtgagaacttactatcacaagaatagcatgagggaaactgcccccttgattcagttacctcccgctgggtccttcccaccacacgtggggattgtgggaactacaattcaagatgagacttggattgggacacagccaaaccatatcaccaactgtctacttctcattgtatcctcacatggcagaagagaactagctaggtctctggcccctttttgtaagggcactaatcccattgataaagggtccactctcatgacctaattacctccccaaagttccatctccatataccatcacatcaggattagtgtttsaacatgtatattttagagggacacaaacacacagtccattgcaccatcaaagtgaggaagtgatgggctcagaatggtcttggagtcagatgtcagggtctgaaggcttggctgtatgatctgccacttggtatctgtgtggtcttgggtttagtgacttgatcttcccgagcccatgcctgccgtgatggaaggaaatcagtttgggaaagtcctgggggaccagactgtggagggtcttgactgctaagccagcgactccaggctctgtgcagtcagcaggagaatcattacaggtatttgatcagagctgtgcatcaggaagattaacgtgacggtggcatataagatgaatggaatgggggagaatgcagaggtggggaggccacttaggagacttctgcagtagtctacatgagaggcaatgactaattaaatgaaacagcccaaactgtatgagcaccttgtaggtgatgagccattatcatagatctccagcctctccatagcatctgttttaaagtctgcactgaacagaaatattacagaataatgctttatatttctaaccctttgcagttcaaaaagtgctttcatgagcattctctcatttgatctagggtgtttacaaatttatattttgaaggagtttttccacatattgaaattgggcctatagatttatagttttcagggcccgccccttctctcctcctccactcagcttcctttcgttcagtcttcaggcacttcatggttctttattccttttcacaaccaaaaaaaaaaaagaaaaaaaatagtgcatgctgaacaacacaccaggctccttgctaagtctctccaaaagcagggaagtcatcagtgtgcgggatttgagcacatgtggtttatttaatcattcgttcatctttctctgattgcagtggagtttcacacgttccaccatatgctgtccctgaaatgctctgcacacactagtgagagcccatgagggggcctagcctttgccttccctccttgtctgccaggattgaaggaggaaatcaggttgggaaagtcctgtgggaccaaattgtggaggagcttgactgctaagccaaggactccagactctatgctgtcagcaagagaaacataggtatttgatcagagctgcccatgaggaaggttaatccagcagcgactcccttaatccagcagtgactccctccagcttcagcccttccccagtctcagggttggagggagtgtcttttgctggagtcccccaaaggggtcccaagtcaccaggagacacaggactagcgatcacccaggaggcctgcagcctgggtctccactgtgattgaggcttcctaactctggcttcttgggcttccagaagcactaatgagcagggctgagcagtaattaagactgtgctctgttccacatcatcacgcagcacagctgcaactgctgggaggaaggggaaggagagaagaccgggaagatgcctttagccctgtcttcccactctgaacctacttgctctcaggctctccagtgcagcaaggaggggttggtaaagccatgggatgagggaacagctacaggagatggctgcccagggctggggaaatagcgttcagacaccagccagctgttgmtgctccattctgcatcccaggtggggtgccaatgggccaagccatgattttctcagaggtgaggacccctgtcttgcaaccagcctggcactacaggccctgcagcaggagggggctgtgatctggccagggggagctgggtggaggacgagtatgacacatgaaattatgagtctcggaccttctctggctcacatcccagaacaggggcctctcttggcaagggcccactgcaagaayaagtactcaatgagcaacacagagccaagctctggaggttcacaggtcacactacaagccagttcattccacggaacacactctccagtggagaagtggaggtcaaaacagagtcatgactgctacgatggtgatgagaaaaagttccatggggccacagagtcacctagggtcgactgaggacagcttcacttatatggtggcacttgaactgaaccttgaagtagaagagggattcaccagaaaatatggttttggcaaagggaatagagaacaaaggcaggtggcatgagatagtcagctgccaggagacgtggtgggcctggcccagagcatgagtggagcgagaagggaaggattctggagaaaggaaccaagagaatctagaattctaaaggaccaccaggggctccaggcctggcaggagcaactaacaggatgacccaccttccccaacttacaccacctcaggcgctgggcagatgctctgtgactttatcagtatccctggggagtggtgccagccccaggtgctgagctggaggggggatcacagaggaatcaagggactcaaggagggaaggcagctggagggaaggggcttgggcagaacgaaagaggaaggggcttggccctgggctctcatccactcctgaagcccatgcagggaacagtgaatgatgcagtgcctgtgtcccaaggtcccagcctcgtgtgggaccatcggggcactagcagccttcctgtctcctaccccttgctctgggggccacgggtacatgaaggtttccagaacccagggaagaggccagaggttcagtaatagctctacaggagcataactagagagtgatgaccaactcccaaaatacagaatgtttattttgagctccacaatacatgtcagtcagagaaaggttcgagtctcaaaaatgctggctcttggccagacgcgttggctcatgcctgtaatcccagcactttgggaggctgaggtgggcggatcacttgaggtcaggagttcaagaccaacctggccaacatggtgaaaccccgtctctactaaaaatagaaaaattagccaggcatggcagtgggcacctgtaatctcagctactggggaggctgaggcaggagaattgcttgaacctgggaggtggaggttgcagtgagccgagatggtgccactgcattccagcctgggtgatagagtaagactccgcctcagaaaaaaaagctggagcttcagtaatgctgaccacttttaaatatatgtaatcagcactcatttcaaatagtcttttagcagcatgctaacttatgactacaaggtctgcggtcccctctcctgccaagtgtccccttcccctgtacaagtggcccagaggcagttctccaaggggatttggggactgtactcctgtataaaagaaagcctgtggtgctgctgtgttaagttacccacctattggctggtgagtgcccccttcatgtctttcctgaaggtagattttcagtaaataagaagaccacattttttattctgaggctatggtcttgttttccatagcagtgtgtcccagaaagctcgagatctcttgcatggccatgatttgaaagtctggaaatgggatccactggtaagctatgttctccatggagctcacctgaggctgccctgcacccctcgcctctccctcaaggggtcacagggcacctgtgggcacctctttctgctgcctgtatgtccgccccaataggagaaagagggggcatagagggaaatgagtctccttcactggttcgaattagcgggaagcctgtgagtccaagcccccctcaaattcaggcaacgaccaatccggcttccctttctgtgcccttgtcagagaagaggccgctgggcccaggcctgtccctttcctccaacctggcaggcatgggaagcaactgtggaggaattttagagctgggagaagcagagggaggattggaaagccttttattttctttgaacttttccatttaaaatatttctatttttaaaagaataatttggttctttttaatttagcatgttttccttagagcaataaaggcttttgcaatatggaaaaggtgacatttgatctgaaggagtctgggggagctctgagtatagggaactgacctttagtacccacccatgagcgctgccaactgggggcctgaggtctagtgcttgccacaggtgggctcaccgcaggagcctgctggtgaccagcctgtccctcttcccatgggttctctagctggctctgactaaagccctgtctctctcttggctctctcgccarctgtcccacttctcagcttctccctttcttcattcagcccagcccagaagccctgagggctgggccagagggaagtagttgttgctgtttctccccagctcccgctcaaacctgacaccacagaaaggtcaatcccacatggttctgcacatccctgcctggcccgccctggctgttaccatgacgactgctgggctggaaatgtccttcgccacctctgctcagcacactggtggctgtcccacgctccatcctcagaaaagctgctgctgccaggggttctggagttacagggcctatgggaataagacagaccgacagagacgaggaagatagacagatacagtcagaggcacacactaacagagtcaaagagagacaggcatacataggagcaccgagagtgcgaaggtgcgaggaagtgaggtgtcgacacagcctcagccgtgcaggactgcaggaaaaataaagcaaagtggagcctgagacagagacaagagacaaacggaggcacaggggacacgggggcccgtggcaccacagcaagaggccaggcagaggaagagaggaaaagcagagaccaaggcagtcagctctccgctgcccctgctcccatcccaggaaatttccttgcccaataggtctctcttggcctcctgctctctgagatgtcaggcagggtctgtctgagttgatttgttggccaggctgttcctctggctggacaacatttgccaccttaagaggggccctcccctaataagagtgatcaaactgttgccacacacacacacacacacacacacacacacacacacacaccccgctccttgcccttgattccatgtcaccccaaactcatcataaatacctactcagcctcacttcgcccaggtggtgaaatgggcattggaacagtgtgaagggttgattttcaaattgcggcaaaatctagggaataagtgtgaacctcagagatgatgatgcccctggaggtaatgaatgggcaagaggagggaaaagacagactgaacagtgagtaccagacaagagtgtggggcccagagggtgggagaagggatcagggaagagagagacaggctcagagctctgactagggcaatccagaggagtggtaacaggagggctgggccaactggattggcctttagtgcctggcagggaacactgcctctaacatcagtgccatgatttcccatctttgaagtgtctccaaggctttgagggaggcttctcagggtctttgaattctttgtcgttcttcttagcatttttttctttttctttttctttttttttttttttgaggtggcgtctcgctctgttgtgcaggctggagagcaatggcgtgatatcggctcactgcaacctccgcctcctgggttcaagctattctccttcttcagcctcccgagtagctgggattacaggcgcctgccaccatgcctgggtaattttttgtatttttagtagaaacagggtttcaccatgctggccaggctggtctccaactcctggcctcaggtgatctgcctgccttggcctcccaaagtgctgggattacaggtgtgagccactgcacccagcccagcattttcttcttagaaaatgattaggctgtcaatacaggaaactctggggccgggccagtctctcatctatcctaaccttgaccacagtgtgaaaggacagtagagtcagtgcccctaatgtcaccatgttccaagctcacatatgagtgttgaacaggtgccagcctggagcgtccattgccctggtgccctcagtccagagagcccagtgagaagctgggccaagaaggaagacttgaacccaagagagcagtgtgtggacattcagactaggctgggctgaactcacccccggggagaaccacttcccacactgggccacagagaccaaaatgtcaaaaccaaaggtcccgcacagccctggaaggcggatcctggcctgggcgggaaagagactgtgccagatgctcacgcgctgcctcacatccctccagcccatttctgtgaccagccgcagctgcagcggatgcttctggtacatgctcagtttccctcctctctcctctgygtgaggcttttcttagcccctgcagggctgcctgaaagtggcaggggcttaatacctccaaagagcaaacctcaaccaatgaaggatgggcactggtggaactgcagcccaratgtgccccgtcagtcagtggcaaaattctgagctgtaatattttttttttttttttgagacggagtctcgctctgtcacccaggctggagtgcagtggctccatctcggctcactgcaacctccgcctcccgggttcaagcaattctcctgtctcatcctcccaagtagctgggactatgggcacacaccaccaacccggctaatttttgtatttttagtagagacatggttttgccatgttggccaggctggtctcgaactcctgacctcaggtgatccacccgcctcagcctcccacagtgttgggattacaggccaccgcgcttagcctaagccataatctttatgtctcctcagagtgatcccagggcgacagccctaactacccacagtggacctactcaacacagggagctgtctcattctcctccctccctcactcctgctcaccccctaaaatcagccacctacatacaggtccttgtctcaaggtacacgttcagagaacataaaacagcacaagagcgacctttttgtgatcttccaacccaagagtctgtccctcagggttgagctaagataagaactgttggagggctctgcctctgaccactgactggtaggtgatcaggtgtttgtcattattatctagggaggagaaagaagaactcaccagctctccctcccaaatgctggggagaccagggctgacttaacagcagcaagcccccataggtctccagtagccaaccacagattttcataattggaaaggaccttaggggtgacctgatccaactttctacacaatgcaggaatcccctttacaacctttctgacatctgctgacacacctccagtgacagggaattactatcttctacaaggccaccctattgttgaacagctattagaaagttcttaacactgaatggtaattggtcttcctgaaactccctgccattggtcctagtttgtcctttgtacttcagtgtgtctcagctttctacccaatactccttcaaatattttaaagccaaccgggtctctcttaaatctcttttctatggaaaacaatcttattgtcttgtcctgtcttcaaataactcgatctgagcctgctcaccctggacccctcctctagggagcattgcagtttgtcgatgttcctctgtaggaaaagaccctgttgcaagaatggcaccaccttgaagcaaaactgccataatgactgatgtttgactcctgcataccaaggcattcctgtggcaaggtcaagaaacaatgcctgggccgggcgcagtggctsatgcctgtaatcccagcactttgggaggctgaggcgggaggatcacgaggtcaggagattgagaccatcctggctaacacggtgaaaccccgtctctactaaaaaatacaaaaaattagccgggcatggtggcaggcacctgtagtcccagctactcaggaggttgaggcaggagaatggtgtgaacccgggagcagaggttgccactgcactccagcctgggggacagagcgagactttgtctcaaaagaaaaaaaaaaaaaagatgcctggccaggtggggtggctcatgcctgtaatcccaacactttggaaggccaaggtaggaggattgtttgagcccaggagtatgagaccagcctgggcaacatactgagacttttcttaaaaaaaaaaaaaattagccaggggtatagtcacagcaaactcaggaggctgaggagggaggacagcttgagcccgggaggttgaggctgcaataagctgtgataatgccactacactctagcctgggtgacagagccagactctgtctaaaaaaaaaaacaaaatggaaaagaaagagaaaaaagaaaagaaagaatgcctgtagcataaataacccctcataaagatgcttatctaacctccccagtggtcatgaaacttgcaataaagtctgaggtgtgaccagctgcacatgttttcccctaaaaacttgttatacaaaggatactttctggagggcgggcatggaaaccaccatctcgtgaccaaccaaggtatggcttctgtgcataagtttctattaagcatttatctctgagaaactagattcgtcagcctctctctctgttttgtttttgttgtygttgttgttgttkttttgagacagagtcccactctgtcgcccaggctggaatgcagtggcatgatcttggctcactgcaacctctgcctcccaggttcaagagattcttctgcctcagcctcctaagtagctgggagtacaggcgcacgccaccgtgcccagctaatttttgtatttttagtagaaatggagtttccccatattggccaggctggtctcaaactcctaacctcgtgatccacccacctcagcctcccaaagtgctgggattacaggtatgagccactgcacccgggcttatcagcctgtttctttggcccctcagctctcttggcctttaggggtaggtttgcatagacctgctcactgcagaacatcctcttgcaatgtggtgcccagacgatgctttcagagaggcatgaccactgcagaatatatttttacactactatgtcccaggtacayaggtacatttccactattgattcctagaattataacttttttttagcagcacataacactgctgactccattgaactgttaagacactgaacacctgtttggggttttccataccactttcccctttcttcagccaacagcaatcctctttcacttcccattctcatatggttctggtgggactgtttaccacagtatcctgtacccctaaccatagatcttgcccttgtcatagtcagtgctccaatgatgagcatgtgacccaggccaagccaatctgagtccctcccctggaatgtatttatttatttgagacaggatcttgctctgtcgcccaggatagggtgcggtagggcaatcatagctcactgcagcctcaacctcctgggctcaagcaatcctcccacctcarcatcccgagtagctggactacaggcatgcagtaccaygccaggctaatttttaaattttktttttgtagagacggggtctctttctgttgcccaggctggtctcaaactcctgggctcaagtgatcctcccaccttggcctcccaaagtgctgggattgttaagcctaaaccactgtgcggagccccctggcatctattatatggggttggaaagtgttatctttcctctggacttcctaaactggaatcatgtcagcccagagctccctgtgctataccaacacacagagagagtcaacagtgggaggaagagaggctaaagatactgctggagtcctgaggtccagctaactgaagccagctctatatgtcttagrctagaattgagtccggcttggattttttttttcaacagccttggaaaactttccagagtctggcttcttggcttctgtcactagaacaaactaataaatactctgttcttctctgtcctctagttgtgtagttaatttctgatcccaaatgaaagatttcacatttatctgtatcatgtttcatactttgtcccatcactctagtctatagaaaaattttagaattgttattcttttattcaattacctactcctctcacttttgataaggttaccttctattcactcaaccaaatcattgataaagatgttgagctgaacagaggaaaaagaaaccaacaacatgtcagtttatcaatccaagagtttacctttgggatgattgttctaacaactgtgggtctcctctaccatactcttacccaatgtacactccgcatcctgtctgccttgatcaggyaccatgctgaagaccacactgcaccttggcattctgctaagccaatatttgatggtctcatccccaaaggatgtaagattaaagagccaaaactggtcctggaaatatctgttctttaaaatgctcataaactctcagtaacctatctgctttcttctgcacacayayacacacacacacacacaatccctctcacctttgcctcctccctttctacttatctgctamagaagtaatttttaaaagtggattacgtcaaaatgaagggaggagagagtcagtttgtttgggaaaagaaaacctttactttagagcaatgtgtgacacaacacttgggacagaggaggtggagagaatggggggagatgaacatctctctgccacacattgactaataggaatagtacattgagggcttaggaaaggctggggctggaggctagggaatcgaggagcaaaggcccactactgttccactttggcctgtaggaggtggtgtggggtacyagcagagagcacaggcactggagagctaggcttggctctccatcctggcaccaccacctgctaaccacccactactacctgctgagagcctgcagctcccaagacagacactcaggtgccacacttccctccactcagtgaccaagcctcagtggttctccttgcaaatgctcccatatccacttctctctagccttgccgccacacctcattcatgtaactatcatctcttcaaakatttattctgcctcattctctctctcttcaccttctgaggctggaatcacatgtatattagactgttattgtcccatagctcttataggttttgctttgttttgcttttcccccatcccagtttctctttgtgttttagttcagagaatttttattgaccagttcaagttcactggttcttcacctatgcctacctactgaaaagcctgtggaagcaattcatctctaatatcatgtttatttctagcatttccatttgactttattttttctttttctttccttttttttttttttctgagatagggtctcaccctgtcacccaggctggagggcagtggcatgatcttggctcactgcaacctcygccttctgggttcaagtgattctcttgcctcagcctcccaagtagctgggaccacaggcacgagccaccatgcctggctaatttctgtattttttggtgagatgaggtctcatgttgcccaggctggtctcaaactcctgtgctcatgtgctcctcctgccttggcctcccaaagtgctggtattacaggcatgagccaccacgtccagccccatttcactttctcttagtttccatgtctctgccaaaattccctatctgttcatgcaagttgcccacccttccccaccagaccccatagtaattataattattttaagtccctctgtgatagttccaacatctgtgtcatttgtgagtctggttctgttgattcatcttctgataatggattgggttgttttcttcttgtctttttgtgtgttttgcaattttttttttttttgagacagtcttgctctgttgcccaggctggagtgtagtggggccatctcagctcactgcaacctcaccctcccaggttcaagtgattctcctgcctcagcctgtggagtagctgggactacaggcacacaccaccaacacctggctaatttttgtatttttagtagagatggggtttcgccatgttgaccaggctggtctgaaactcctgacctcaggtgatmcacctgtctcggcctcccaaagtgctaggattacaagtgtgagccatagcgcctgacctatgttttgcagttttttaactgaatgcccatggtgtataaaacagcagagactgaggtaaatagtatctgtatctgggagtggggctgcytcttctgtcagcctgttggtctsgggggttgagtcagtcttgttaggaattggacagggtttgggtttggttgtgctctcattaccttcagtgcaccccaggtttcaaattcctctagtggtgggctgcttagagtggggactggggtgtcagggcttcctcagtgctgctgtcccacactcagcttttcagctggcagaagacttctgttgcttgtgatctggtgccaggctcaggcagggcagggcagggttgattctgttaccctggcccggcttcagtcttaaataggtcctaggcacccgagcttcagcagtgggactttctcagtgtttctgtccctcttccctatggaagccaaactctgccttatatgtggttcatctgggattagccaaagttcttgccctccccacaacagagtggaccttcgcttgaatcttcagcccaggacagtttcctgcttctgcccctgggtagggggtttctgcttctagtcccaggagcaatgggtctttgcctgttcaagaagggcaagaaggttttgacacctcaccagaagcagataagttttgcttttattcctcccactgaagcaaaagtttgttacccctcccgccatggcttaaggcttttgcttaaaggagaggattgtggaagttgaggctttttgccttccaccagcagccgccttgatcaacctctgcatgcatgcatcaccaaggaagaacagtccctccctttcctgacctgttcccacttttctccatgaaccccaggggaggcctgtacaaaaaaggttgcctttgcacgcactctcgtgtctagaatcctattcagctattctaaactgatatgctaggccacatgtggactttacaaatttgttaacatttttattgtctttttcttacccacttgtaagacagccacatctttgccaaagttgaaacagttgatgggtcactatctctccttctatttcctctcactcctattcatttctatgaactcagctcccctaacactatctctcctttatttggttgccttgtggccttggctttctgatgggctcaagaaaagttatgattttgtacctgctttttcacattgttaggacggaagggacattttcttgcagtattctacatcctaagtggaaaaagtcctcaagtactatcatctctttcttagacaactgcaaccacctcacagctggtctcctgtgtccaattttgcccctctccctactgtagccagcrtaagtattaaattctgcaaccatcgcagactagagggggctgcaaaataaaatacttaaaaattagctacttaaaacctgaagcttagcttatggtgcattggttatctattgctgagtaacaaatcaacccaaaacttagtggtttaaaccatgacatttattgaatctgtagggctttgcagggacagcttgtctctgtaccacttggtgtcacctgggacagcttaaaaactgggggatgaaatcatttgaattacttacttatatgtctgatgcctggggtgggaagactcaaacagctgggactccctgggcttctctacctctctgtggccgacttcttacatgccggctcagaactaccaaggagcatgctgagagagagagagagagaccccaggtggagtgctttcatgaccttgcctcagaagtcccattatttatgctgtactctattagcaaggcagttacataggtctgcccaggttcaaagggagggaatattgactgaagatctcaggggaggagtgtccacatcacactggaacatgaatgagtgggatgggatacactgatttggccatctttggaaaatacaatctgccatacatgattctacttgttctgtaatagtgaaaaaataacaagaaaaattgaagtagaaaataaaaacaaagaaaaaccatttcacatagacatgtatcgctgccaagtgtgaataacttgtccaccctcaatcactttaattatggcaaacccatggcagccataaccttctagatgtaaatctcatcttgtcactgcccctcttaaaatcagccattagctccctgttctcccacaataaactccaaactccttaacatggtttataaaatccttcacacctggccttgtttagtaatttccaccctcacctctcgtctrtccctcctttgttctttgtgctccagctacactgaactaccttccatcctccaagttcccttttgcttttagggctttgcacatgctgttttcctcttccaggactcctcttggtccccatgctcttactcttctatttcctctcactcctattcatttctatggactcagckcccctaacacggcctctctcctacccmactccaactggtctagggctctcatatctccttcccatgtgctctcaaagcaccttgtgcttacaacttccacagaattaatgaggtaggctctaytcccccctccatcattctatgtgggaagatgccgttctgctttatttaacaccatgcaccatgcctggaacatggcaggggctcaacaaatattggttagatgaatgaatctctgccttaaataacctatttctgggctcaagtaaacagccctcgcacaaacctaacatcccaatggcagtatcctatcttgagtcttataactgacgtagggccaaagctggttgggataatttagaattttcaagaaaaccttgcctgcttcatgtggctggggctgttctcagccttggaggactccttccaaaacagggccagggagaggctccagggcttccgtcttccagcaatggtcctggtgggcaggtctgcttggaagggtgcacctcggccacagctggcrggacgtttgtttacttgctgtgcctgcagccagggcctatttctggatcaggtattggatgcatgcctgtgtcactccagccctgatctygccaggcgctgagtgatgagcacgtgtgtgtgccgggagagaacagcagcagtcccttaggttatctgcctggctgcagcccagccttctctgggtgtaccaagtcattacggcttggcccgtgttggtgattaccctcccctggctctaaagctttagcactaaatattgctccatttgctctaacttgctgtctatttcactaaggaggaagaaggaagaaagtcaggggtgataagtaagattctaccaacttacaaatcttactaggttgaggaagccctaactggagttccttggagttttcagggtcaaaggaaagagatcagcattttaggccaatactattttttcctatggttagtcccattactgaaaaggaactggaacatgaagaggtcacttgacttatttgtgaccattcagtaagccacaagacagataaaagacagcacccaagactctcagtttcaaatttagtgccacttcactagcctaagataaatctgtattaacaagttagctttgggagctagtgtcaaatttggttttggtaaatggagtttcacctttttttagagccattgtttacgctgtcacctctaaatcaattaagaaactatagctacaactcactgggttcccttccgtggagtcgtgcagagctcctctcacaccgcacccaggtttacacatgggctagaaaccattcaacttacaaactctgtttcagttcctctaaagcgattctccaccctctcatattccaatttctgtttctgaggtagaaaatgggaagtagggaaaaggcaaagctagaatcttgcctgaatgacagaaacactattttcgggtacagaaacattctcttaccatcccatgatctgcactttgggagagtgttttgggacctcattgctttttttttcttaaactgttgtttctgaggaagaataattgttgtttgtttatcatgcagggagaataaaaattttagtttttctttctttaaaaaatccatcctggcagggcacggtggctgacgcctgtaatcccaccactttgggaggccgaggcgggcggatcatgaggtcaggagatccagaccatcctggctaacacggtgaaaccccgtctctactaaaaatacaaaaaattagccgggcgtggtggtgggcgcctgtagtcccagctactcgggaggctgaggcaggagaatggtgtgaacccgggaggcagagcttgcagtgagccaagatggcgccactgcactccagcctgggcaagagagtgagactccatctcaaaacaaaaaaatccatcctgaaagccatcagatggccctggagaggagtgaggcctggcatctgaactccaggtggagatggcagcctgcaagcctggatgaccgtcaatattctggcttcctcaatgtacccaggggccacagagagccactctctgtgtcacacgtatcctgccaataaaatgcagtaggaataaagcgactaaatctactaataaaggtgttaacccagtccagacaacatggcgaaatcccatctctacaaaaaatataaaaaataagctgggcatggtggtatgcacctgtagtcccagatactcgggagcctgaggcaggatcacctgagcccaggaggtcaagactgcagtgagctgagaccgtgccactgccctccagccctcctggtgatagagtgagaccctgtctcaaaaaaaaaaaaaaaaaaaaaaaaaaaaggttaaccattagtcaatgaaaagagaggaaagggccaggcatggtgacttgcacctgtaatcccagcactttgagaggccaaggtggaaggatagcttgagcccagaggttcgagactaacctgggcaaaataatgcgaccctgtctctacaaaaattttttttaaaaattagccaggcatagtrgcacatgcctatagtcccagctactcaggggaagctgaggcagaaggatggattgagcctgggaggttgaggctgtagtgagccatgattgtcactacactccagcttgggtgatagagtgaggagaccttgtctcaaaaaaacaaaaaaaaaataaagaaggaaaaaagaggagcggccaggcrcggtggctcatgcgtgtaatcccagcactttgggaggctgaggcgggcagatcacctgaggtcaggagttcgagaccagcctcaacatggagaaaccccaaatctactaaaaaaaatacaaaattagccgggcgtggtggtgcatgcctgtaatcccagctactcaggaggctgaagcaggagaattgcttgaacccgggaggcagaggttgcggggagccaagatcgcgccattgcactcgagcctgggcaacaagggcaaaactccatctcaaaaaaaaaaaaaaaaaaaaagaggaaagtatatttgaatattacaataaaaatatttgtatcactaagcaagtatatggaaccacctaattggttcctatccttttgggcaagacaaatacttgatttagaaatgagcaaacaatagccgggtgtagtggtttgcacctgtaattccaactactcaggaggctgaggtgggaggatcacctgagctcaggagtttgaggttacagtgaactatatgattgtaccattgcactccagcctgggcaacaaagtgagacctcaaaaaaaaaaaaaaaaaaaaaaaaaaagcaaatgttctcagaagatttatttattctattttttcttttagctcctctctcgatcggaagatttttacagccaccctactgatctttagggatttgtaaactattacccaggaagaaggcccatggagctaaggcctcagaacaccaaagtctggactgtctgagggcacatgctaataacaggaggctggcaaagtggccagctcccatgcctttgcatgcatttgtctttacctcctgctgcctgggaacatccttccaggagcaatcgagtcaacagcaccacagacactgctattccgttgagaaaagttttatatggaaacacatactgatcatgaacacaataaacagggagggaagctcgggctcagccaggaaacctgccacaaggaagatgtttggaactatccaggagtagtgtcaaacactaacaccatatttacaagtctaatttggaacctggccctttttaagtgcaggaggaagttggaggagaagccatgcatgaagtaaaaaatacatatacacagacataaacacccacattttcacacttcttttgcccatttgttccacaaggaacaaatgagagaragaagcccagcctctctccctggagtccgtatacttactacagatttgttagagaagccccagatggggcttggattcaaggagcagacttcactcttactggccccactcacgtgacaattcaccaagggaatgcttgggacacaagcatgaatgtccggaagaggcaagaaaatatatggctcacttaacttacacattacacataagaggcctcagtttctccaagtactttcacatttgatctttagcagacttctaacctgcagagacagagctcagccaagctgtgagacacagaggaaagcagcattttgatccagtgtgcactgggtcagycacttcatccgagacrgtcacacatgccagccccargtaagtccctgggggcttgcagctgttttctttgtggagtggaaatttgggttttttccttcagtggatttctccctgctgctgtcactgagctccacgctgctcgctctggacccgagacagctgctcggcgtgtgtgtgtgtgtgtgtgtgtgtgtaatttactgttctgctgctgctggcttgtccccggctgctggctcgtcctcggccactggcttctcaacctgtgactctggaggaatcagatactggacctcctctgtgctgacggctactttatctggctggagccacctcttgaaatgttccaaggtgctatgaaagggcagaataaaagggtggctgtgtcagacctcactgattaattacttaatgattatctcagttactcaaacactaccttcccgcccaccagcaatttcttcctacaattgtttttcactgctaaactgggaagtacaaggatactcctaatggcagctgtgcatcctggcagctctgcgcataatttaccccatagtgggcactttgactacaggcagcagcaggcccccttcaaatgcagagcctctgaaggcttgatgagaaccgctgaagagtttaygcctcagtcctaaagacctaaagataggtcttttttcactcaaaacaggagaggagagaaattgtcaaggggaagaaacactcaaataaataccaaattattattgaggcagaaatctgagtatcttttgcctcttatagctgaggcagtctgggactcaattatagcacttacttgcactaagtgattttttttttgtgtggggtttttgtttgtttatttcatcctatagcaagtccctaagataaaaacatctgagcagcaaatattccccacaagagaatgaccactatgccagagggctgtctttttgtttggatctgtagggagaggggagatgtaattgtcaagctcaaggtcccctacccgccttccttacaggaccctataccytaaagctattagacgttcacagtaaaatataaatgactagaaataatgtaaaccttattctatgctcctcaatagcacaaagtcttaacccaagaaagaataccataacagcagattttaggcatctcttggtatatgggggaatttatgttttggatagtcggatttctcagcccattactcccttgccaaaagcataccacaaggaggatcacctacctggcyctcacatacgtgaagacctatacaaccccattgtaaaatggcctctgtttaaaagataaactttgaagaactagtgtttcctggtgtttgttctggataatgatagaaagaaacattcccacagatgtaggctctsgggaaaaatctaaatgtcagagggcaatgagagcrgctgattgactctagtgctcacagctcaggggaatcaggtgtgacacagcatttaatcttcatttaccacacttttcatcaaattgttcaaattatttccatagagaagggaaatctacattattttacatattgataaatacataggaacatgctgatctgatttcagagaaagaggatttctacttgaaaatgacacaggagaaagttttgtcttttcttctcagagctggagagaagagaggtattcagggggacagaatataagtaaataccaaattatcagtgggtcaggagtctgcatcttcaaatctcctatgtttggagcaatttaagacttaattaggttggacctttagagatagaaaagagcaaaatgtatataatttcctgaaccctcagaggagagttggcctgaccttagatgctacgctgatttctgaagcatctagaggcatgctgattaagcatttgagataatgtaagtgaaagtattttacacatttgcaagtaaatgtacctatgaagttttattcacatactgtcctgatttcggcagcagtacttcttctgatatgatgggattctcaacaccaatgtccatatgttggaaactcaagttaaatcacattcccctaagatcttttgttaaaattcaattttttactcccccccattgatttttactttgaataatttcttaccaaactctaaaattctgtaggaaggataatattagtaacagccaacacttctatagtgcttaccatgtgctaggcattgttctataccctttacaaatagtaactcatttaaccctcataacaacttatgaggtaagagctgattgctcccatttcacagatcaggaaactgaggcacacwtaggttacttacccaagaacatacaaccagtaagtggcagagccgatttcctgagtgtcgarccccattcctgctcattgtggcagggcagcatgccctctctatctttctgcatctaaactacttgcaggtactgttcaagtcctgcctccctctatggcaaaacaccaaagccaggagggagctcagtggcctctcaattcccaaagcacattctgtcacttctactcaactggcccttctcttattaatgcctggtattgttaggtatgtctttatatatatttgtcatctgccctcaagtagttttgaggacaaaaacaaatgggtttaaaacttccttacaccattccctccatgacaccaagcacagtgctatcacacagtggatgcttaataaattcattaatttagtctgcgtaaattcattgagtggctacaatctgacaaaaattctgtaaggcaggccaggtgcagtggctcccgcttgtaatcccagcactttgtgaggccgaggcaggcagatcacctgaggtcagaagtttgagaccagcctggccaacatggtgaaactccatctctactaaaaatacaaaaattagccrggtgttgtggcacacgcctgtagtcccggctactcaggaagctgaggcacaagaattgcttgaacccaggaggcagagattgcagtgagycgagatcgtgccactgcactccagcctgggcaacagagcgagattccatctcaaaaaaaaaaaaaaaaaatctgtaaagcagtggaaattcagaggtaagaagagatgaagagatagttccagaaaataatctctctgaggagtaaatggtttttccttttgttacagtaacatggtttccaaacctcatgagaaagaattcaagaacataagagagactgattagttactactttctcaagttcattgcatacttaaaaatgaacacaatgctttatccttaactctattcaatctgtgaccaacacgtagctgcagtatttgccttttggcaaaaaagtctkttcttaaaaatctactgctgggctaaaaacaaatagaacaactacataaaggatgatttcagctggaactagacggggaatygattacctctcatcagaatcaagtccatccacaaagaactctgaagctaacttctcctggaggaaccgatcccagcattccttcttggcttgggccagagttcgaagcatgtccttggaagtcacttcctgatttaaacctttgattcttcttagcttcttctctagagagagaagtagagcttaacaaggaaaatgagcatgacatgaaattttaactaaatctaaaactcaaaatactaacttaaaaaatctctcaccgatgaggacatscacactccctgccaaagaggtcattttttaaggacagataaaagggaattgaacattcttcctttttccttcacaaagtcctcaccctgcattgtatcaaataaatgtttaacccgagaaaagggaaaagccataggttctcataaataagtcaatggcatgttttctttgaaatcacgtaagcccagcaggtatctctctaaggaatgcttgttttccctggtttgacatgtgtatactactgtcttttttcaactccttgaaaataatctctctgaggagtaagtggttttttctttttgttacagtaacatgaagtggtttccaaatctcatgagaaagaattagagaaaatgatgaaagatccarcggttcattagatattaaaattgacttgatgagaactcaataagagacctttaaaatctctatgtgtgattaaattcttaataaaaakaatctcccaacattttttaaagttgctcaacttgtggcctagatgttggagtctaataaaaacaaatgtcttctaaycccatgacagtgctccatatggcttcttgatgatagaggttaaattactcttgtttgcattttaactctaattgtttaacagatttcccctttcgaagaatacaagaaaggacatcaccatttaccgtctgccttaatttagtttgccttcaactataagtacataggttaatgatggcatggtggggtggtgaacatcaagcttagaaccaatagaaactatgatttgcagttctgttttcatttctaaaaaagtcacatcagctaacacccactgatcaaaacaaataccttttgttcctgttattaccaccatgagctcacccatgtaaaaaaaacctgcagttgataaatgttaaatatttgcagggtttgttttctccttgaggatataaaaagggttatccatagcatacatttaagtttttaattattgctgttatcagtggattctctttgatataggttatttarcaataaaaacaatcttcatattgtctggcctcagttgtcaaagtggaaggtactcttttgggccggaaaaggtcttcctctctctaagtatgctgagtccctggtcaggtgtgatttcaatagggcaagcagaaacaggcactaacacgtcccttctgccgctgtctcccagtccrtgccataggcaacagaaatgactcttattttcttcagagatgaaaacttcttaactgactttagagaagatcattaactttccaagccagtcttcactaatcaaaatcatcactgtcttcattacactttttctttctttctttttttttttgagacggagtctcgctctgtcacccaggctggagtgcagtggcacgatctcactcagctcactgcaagctccgcctcctgggttcaagcgattctcctgcctcagcctcccaagtagctgagattacaggcgcacaccatcacacgtggctaatttttgtatttttagtagaaacaggattttgtcatgttggccaggatggtcttgaactcctgacctcatgtgatctgcctgcctcggcctcccaaattgctctctctctttctcttccttcctctctctctttctcaacaaggtcttgctctgtcacccaggctggagtgcagtggcatgatcacagctcactgtaaccttgaacaactgctaggctcaagcaatcctcccacctcagccccctggtagctgagattacaggcatctaccacttcaggctaatttttaaaaatgtatttgtaaagacagtctcactatgttgcccaggctggtctcaaactcttggcctacacgtgaccctcccacatcggcctctcagagcgctgggattataggtgtgagccaccatgcctgactttcatgaaagtttcttagaagcccttgtcatacagcaccaacaagccaagggatctcgttctatagctttatccaattgttgcctcttctccttatcatcattaaacagatgctttggctaccacatgcagaattttcatcccctaggccatggctgcaagcattgctatcctatctttggtggcttcctggcaaatttcacattactccctatctttctatcactccacctatgtttttctcatatctttttcctccagtacatcattaacaaaatcccttttgtttttgcaagatatttcttagctatcatgcaagctctcttctgactcttctttctgtctttcctcagaagctccttctacctgaattgcctttccttcctcaaaaaattattcccaggtttgtagctgatcttcgacaaagcatataacaacacaaattggggaaaggacatcctatgtaacaaatggttctgggaaaactggctagccacctgtagaagaataaaactagatccctatctctcaccttatacaaaaatcaactcaagatggatataagacttgaaatcttcaaaattctaaaagaaaacctaggaaaaactcttccagacattggcctaggcaatttttattttgagatggagtctcgctctgttgcccaggctagagtgcagtggtgcgatttcagctcactgcaacctctgcctcctgggttcaagcgattctcctgtctcagcctcccgagtagctgggactataggtgtgcgccaccacgcccagctaatttktrtatttttattagagacagggtttcaccatgttggccaggatggtctcgatctcttgaccttgtgatctgcctgcctcggtctcccaaagtgctgggattacaggcgtgagccaccgtgcccggcctaggcaaaaaatttatgactaagatcccaaaagtaaatgcaacaataacaaaaataaataaatcggatctaattaaactaaaaacttccgtacagcaaaagaaataatcagagtaaacagacaacccatggaatgggagaaagtatttgcaaactatgtatctaacaaaggactaatatccagaatctacaaggtgctcaaacaaatcagaaagaaaaaaacaatcccatcaaaaagtgggcaaatgacatgaatagacatttctcaatgggatttgagaagatatacaaatggctaacaaacatatgaaaaaatgctcaaaatcactaatcatcagggaaatgcaagtcaaaatggtgagctaccacctcaccccagccagaatggccactattaaaaagtcaaaagacaatagatgttggcatggatgtggtaaaaagagaatccttatacactgctgatgggaatgtaaatcagtacaacctctatggaaaacatatggagatttctcaaagaactaagagtaaatctaccatttgatccagcaatcccactacgaggtgtttacccaaaggaaaagaagtcgttatatcaaaaagatacctgcacgcatgtttcataattcataattgcaaagatatggaaccaacctaagtgcccatcgagcaatgagtagataaagaaaatatggaatatatacaccatagaacactactcagccataagaaataataaaataatgtcttctgcagcaacttagatggagctggaggccattatcctctaagtgaagtaactcaggaatggaaaacaaaatgccatacgttctcacttataagtgggagctaagctatgggtacacaaaggtatacaaagtggtatattggccgggcacggtggctcacacctgtaatcccagcactctgggaggccgaggtgggtggatcacgaagtcaggagttcgagaccactctgaccaacatggtgaaactctctatctactgaaaatacaaaaatgagccaggcgtggtggtgggcgactgtaatcccagctactcaggaggctgaggcagcagaattgcttgaacccgtgaggcggaggttgcagtgagtcgagatcgtgccactgcattccagcctgggcaacagaatgagactcygtctcaaaaaaamaaaacaaaacaayaaccaaaaaaaaaacaaaacacaaagtggtatactggactttggagattcagaagtggggaggtttggagaggggtgagggataaaaaactacacattgggtacaatgtccactacttgggtgatgggtgcactaaaatctcagacttcaccactatacaattaatccatgtagccaaaaaccgcttgtacaccaaaagctattgaaataaaaaaattagggccaagcgcggtggcacacgcctgtaatcccagcacttcaggaggccaaggtaagccttattcccaggtttggctttgtgaaacatggatgaatctcatggttgttccacaataaaaggatattacaattctaaagactgcccatcaccgccctagactgatatttctttttcccctagcatgggacaatttgaatctctttcctgtgtttggaatctctctagatacttatactatggccrcaggacagggtactgaaaatgtgttcaggaaatatatttttttttttaaagraatatawaactatttattaaccactgttcagtatttacaataaagtaaacaatatacagttggataacattttgattactacaaagttgttcttcctggcttttgctgaaccagtaaagcaaactcaagattgagcctccatgtaatgaattggggtaaagaaaaaacatgcaggtcaataggttaggttacaaaaggttgttcacacatttatgacagcaggtcctaaactgccaacacctctaaccatctgattaggtttctatgagccaagtcttacatattccattcatcatgaccttttagtcaatgtagcaacagggattccaacattttgctaaggaatggcccgctagggaaacttttaaatgttcatttaacttagttttgtttagctagttaaaacacactagcatttgtctagtttcctcatctggatgaggaaacctgctgtgatggcagtgataaaatttttccttttaggaattttgcaaataaaccactgcaattatagacactttaaaattatccaatttaaattgtcctatctagaattacttatttcacttgaaatgtatggtttcaggaaaattttcaatttaacttgaagggattatctcttattttgcttggaataatggcatctcagaaacatgggtttacctgtgatttttttgtttgggtgaatgcttaaaaacaaaaaaaaatttacatatgcattttatggatacacacacacacacacacacacacacaaaaaacacgtaataaatctagaatggtccttaggcttatgagaacacaagttttgactgagtaatgactatggacatttcccccaacatttagaaaagctgttctttaatgaagaggaaatgatataccatggtatcaaatgttcttttctgataaaggaagcaactacagaaagcttttatttatttgttcaaagtaaccagtgctatggatgcaaaaaacccccaacaactcttccaacgctactttcaaaacaaacatatcaaacttgattttcattaggatgtagttattttgtcacactagtaaatcaaaatctaagacccaatttttatatatatatataaatatatataaaaaaacaatgtgaacaattattgagcttcatcttctggacaagaatgccaagttagtctctcttcataaaaagcaattacaatttgaggacacttcatatttgcctctttcgccagcaccaagtctgcctcatctgaatctttccatttcatgagaaacatcaattctccactgctgtctgtggcaccaattattctttcaggatcaagacctctggcaaatcctcttggtttgtcagcagcatctcttttcttctttgatttgctgtcatcagattcactgtcagataaagattttctttttgtaccatctttttctttgccagctttctgagagttaagaaacgcttcaatcaattctggacaatctaaattttcttcaggttcccaagtattgtcagcatctgtaaatcccttccacttcaggaaatattccactttcccattcactacacgtcgatctagtactttttccacgacaaattcttcaggctctgcctcttcaacttttttactctttccattctgtttttttcccattttttgcaatgtagttttgttggaggccattttttattgcagacttgaagagctattattcaccgcctccgagctgctccgggtcgcgggtctgcagcgtctccggccctccgcgcctacagctcaagccacatccgaagtcaggaaatatttttaaaataaaatggctaacaagaggcagaatgaatcttatgtcaatatgctcccattctcaacaatcaatctatttatgtaagtttttcaaactccagcatcagaaatccacatgtagccctggggccatcacattttcttgcaggatggcataaggtttaacacttttgagttatttgaatatacgggcaaccaacagtaggcaagagggttctacagaatgccaagaaatcaaacacagaatttagatgaactgggcagaggcaggaagtgacaaaaactgttttaagagctgttcgggtagtcacggcggctcatgcctgtaatcccagcactttgggatgccgaggcaggtggatcacctgaggtcaggcattcgagaccagcctagccaacatggtgaaatgaaaccccatctctactaaaaatacaaaaaattagccgggcattgtgccaggcgcctgtaatcccagctactcggtaggctgaggcaggaaaatcgcttgaacctgggaggtggaggttgccatgagctaagatcacgccactgcactccagcctgggcaacaagagtgaaagtctcaaaaaattaaaaataaaaataaaaaaagatctgttcaaggaaaagggggctgcttcccaacagccggcttgaaacatcccttggaattatatctgacagatacgtgtgacaggaataacaacaacacaaaagaataggaaaccaagtttgatgtaacagaacttcaatatgcttccctagagccgtcaaacttacctagagatgctaaatacacttctgaatcctgcaagggagcccaaggctttacagctggctggacagcaaagtcagccacctccctctggccttcaccttcagggcaagaatccacaaaggagtctgagaatgcattgttggcaccatcttcttgttcaggatttggcagacaggaacaaatttcagcccagagatcctggccagatcttgtggctgtagagtcagcgctctcaaacattwtcatttggaatctgagctataaaacagaagctcaagtgagtaagaactggctttaagaatacagcataaggttgagcacagtggctcacgactgtaatcccaacactttgggaagccgaggcagtcagatcatttgaggccagcagttcgagaccagcctgggaaacatggcaaaatcccatctctactaaaaatacaaaaattagacaggtgtggtggcacatgcctgtagtcccagctactccggaggctgaggtaggaggatcaccttagcccaggagatagaggctgcagtgagtggtgatcacgccattgcactccagcctgggtgacattgcgaggccctgtctcacaaataaataaataaaataaaaataaaaatggaattcctacaagccatacacaaaaggcagatactgtgattccacttatataaggtacctgagtagtcaaattcatagatacagaaaataggatggtgggagctgggggctgggaggtagaaagaatggggaattactgtttaatgggtacacagtttcagtttgggaaaatgaaaaagttctggaggtggatggtagttatggttgcacaacaatgtgaacaccactgaatcatacacacaaaaatagttaaaatggtcaattttatgctacatatattttaacacacacacacacacacacacacacacamaaatctgtagggcatttccaggttggacaaccagcctgcacttttctccaaagatctccaaaatgcaacagttctatctccagtcaattaaattctgtttttttttctttctttctttcttttttttttttgagacagagtctcgctctgtcgcccaggctggagtgcagtggcgctaacttggctcactgcaacctccgcctcccgggttcacgccattctcctgcctcagcctcccaaatagctgggactacaggcactcgccaccacgcccggctaattttttgcattttttagtaaagacggggtttcaccgtttagccagggtggtctcgatctcctgatcttgtgatccgcccgcctcggcctcccaaagtgctgggattacaggcgtgagccaccgcgcccggcccctaaattctgttttcaacagaacacagactaaaggtctttccacagttccatatacatgaagatcctgcttggtaaaaagtgtctgtcagagagtactgttacaatgcaagggctgtgtgctcagcgcatgcagttcagccgtatgtctcatgctcttattttaatacaatcactgaaaggtaggtattttcaccattttacagatgaaaaaacaagttcagaagggtaacttgctctagggcacattactgatatgtggggaatccttgacaggaaaaccagatctgtgctgctccagaatccatgtttttatcaaataccatcctgcttgtttggaaaatataacgaaagcagcccaagcacgggcaggtaggaaaagctacgcaaagagcctggaggcttttataactatctaggcatatgagacaggctgacaccttctttcaagaggagacttagaaatcaggaaggctgcctgaggcaaggtctgaataatgccaggagacagagcccagccagcgtaaaggccggaagtaaaagggacagctatgacacggcggtcctgggtgaactgatgtctagcgctacagtgaacccccaacccgaattcgtctaaagccacccaaaaccaaaactttgctcacaccagagccccgcatggccccttaycccagggcagggcgtccagaaccacgcaggaaattccggcgtccagatcccaggcctcagtcgctcaggtctctagggctgtctggacgggatgaatcaggtcccaaggcctctatgtggtattccggggccgggccagagtgggagatccaaaacgctgggcaccccagcccctcctcacttaccgtaacagctgcccagtaaacgcttggctcagctctgtcgcctgtagcccggaggaaatcgggagrggcggagtcccctagtgacggagcmcaggagtcctccaactaccttcccacccgacgatgttctgtgcgtcgattggtcgagaggagctcagcgtggtgaagaagtgaggagcagcaagaggcgagcggtggacggggctctggttgccgggaaacggtggagtcacgtgccctgagcattgcccctcccctcccgagggccaggttgattccttgcagatccagggttccagtccctgcttggatagggaagtcgtttccaagacttttgacttttcctagtcgccggagccagttcacctcctccacaactttctctgtcggtgtttgtcttctaaaaatttcaccccttcgttacccaaattagagcacttccgcggcttctttccttactctcccaggagactcgtgtctcattcatcaaattatgaagctttccttcattcatttagtcaatagataccaagctcctgctgtgttctaagcattgtgttaagcgtgaagttaagacacatatgacttgatataagtcctggagatccttacagcttagtagtgtaggaagggggtccgccatggaggcataaaagtttacaaataacagtaaacagtgatagacagccgggcgcggtgactcacgcctgtaatcccagtactctaggaggccgaggcaggtggatcacctgaggtcaggagttcgagaccagcctgggtgaaacatggtgaaactctgtctctactaaaagtacaaaaattagatgagcgtggtggcacatgcctggaatcctagctattcgggaggctcaggcaggagaatcgcttgaacccggaaggcagaggttgcagtgagccaagatcgcaccactgcattccaacctgggcaacagagcaagactgtctcaaaaaaaaaaaaggaggggggggttgaggattatagagtatatgatggaagtgtggccagagtacataaaggagagagtggtcattagaagtgtgtgtcagaatgctttgttgttgtagttgttaaaggagatgacctttgatatccttcaggggatagataccagcttgttcattgagatcgacccctccccatccccagcttccaggatcaacaccacttactctctcccaagaaacacgtgatgaaagacatcagccaaccatcagtagccaagtaacttggctgaggaaatagttctcactccagcctgggtgacagagcaagactccgtctcaaaaaaaaaaaaaaaagaaagaaaaagaaaacaacaacaacaaaaacaacatagttttaggattacagatgtgagccactgcgcccagctaaaatacaatttaaaattcagttcctggccgggcttggtggctcatgcctgtaatcccagaattttgggaggctgagggggtgtggatcacctgagaccagcagttcgagaccagcctggccaacatggtgaaaccctgtttctactaaaaatacaaaaattaactgggcgtggaggcgcatgcctgtaatcccagctactcaggaggctgaggtaggagaactacttgaacccaggaggcggaggttgcgccaccacatccggcctgtaatcctaacactttgggaggccaaggtggatggattgtttgagcccagtttgagaccaccctaggcaatgtggcaaaacctcgtctctactaaaaatacaaaaaattagccagtcatggtggcacatgtctgtcgtctcagctactagggagcctgaggtgggaggatcacttcagtttgggaagtcaaggctgcagtgagccaaaatcgtgccactgcactccagcctgggtgatgggagtgagatcttgtctcaaaacttgttaaaattttaattaatttaaatttaattagccacatgtggctattgtacagcacatggctaatggtgatcctattgtatagcacaggattggagaatattacatagttcacagaacctcaaggtgagtggagagtcaggctttaggtctatacagccagggacagtatctgaatctcactgagagactgctcagggaacaccccacagccactgaacatctatagctggcattattcgtcgattgggtacttgacacaagaacctccccgactgttggcctcccagattagatgcctccaatgctaccttgttagacacggatttcacactgagcctgcttccgcggctgtgtgcctctgaaccaaagcctctgtctaagagatagagcccaggtcaaatgcctatgtccaagctgcaagagagtgtgggaaggctctggcttctacctcttgggggcagtaatgaaatgtgagaaattccccacccaaaagaagggtgttcggaagatgctggatgtttacagaatatgacaaatgtctactctacatggtctatgccagtgcttctcaagctttaatatgcagaaaaatcacctgaggatcatgttaaagtgcagattctcatttagtaggtcagaaggggaggaggaacaagattctgctatgttttctgtctccacagttttgccaggcactagtccaagtattttacttgaattaactaatttaattctcccaccccaatcctatggagcaaagaggctagctaagaatacatacttttcttttggataaggttctgctttcactgtaaatatcttaatgaaatgatgcacttgagagatgatgtccctcctgtgaagtagtttggttctaacataccccacaatcaatggagaattctacctcttatttctggaggtagtcaggaatcagacttttcagcatatggagttctgcagctgtggatacctcagctgcagtccctcagttagtttggtgagactaatgacttgaagaaggaatttagctaaaaaagatttccctttctcctctccagaatacaaatgcctaggataagaattagactgtctttttttttttttttttggcaaactaacattgaaatgcctccttatttggaagaatcccactctggataccaaagagggttagattcttggccgggcgcggtggcttacgcctgtaatcccagcactcataatataaaaattagccaggcgtggtggtgcgtgcctgtagtcccagccactcaggaggctgaggcagaagaatggcttgaactcaggaggcggaggttgcagtgaggtgaaatcgctccactgcactccagcctgggcgacagagcaagactccgtctcaaaaaaaaaaaaaaaaaaaaaaaaaaagagggttaaattcttccatctccaggcaccctggaagtgagggctcagagcaatgaggtttggctgatggaagtcctcccctgcaggactcttaaccttggaagagggacacagagacacagggagatttaggggtctccaaggggtggcagggctgcaggaaaaagagtcctttggcacaacatagtttcttgtgtctactgcatcccaactgggtttcttccctgacatgtctgaagccaggctctcaaaaggcttggtttcccttgatttggccctttttctgagcctagtctccagttgtcttgtgaattctatgaggcactaatattctttccataattctatctctgatgaaattagccagagttggtttattttgcacttaagaaccctcgccatatatcctctgatctatttgcagttttaatctcaggatggaagcatgtgggaggcgaatggggatcactaatccttctcatgctgttagggggaaacacaggtgtgaacacattgcttctggggtgcttgtgtgtgttttaaatacatatataacaatcttactgagatacgagtcacatactataatattgacccttttaaaatatagaatacagtgggttttagtatattcgcagagtttagcaatctttattctggttgttagtttttgttttgtcttaaataaagctcctttcaagcgtttcttcagacccaagggactactcggaatttacacgacctactcctgtcatggcctttacacggagcaattccaagggtttcctttataaataacgtcgtatctccctaataggaagacgtctgagtaaggtcacttttggtgagacatttacagtctctcatctctaagctcactcaattcacctaatttaattcgagcagctcactcattcgctcacttatcgcagaccccgcctcgggactgggcctccctgattcgctggggccgagtgacgtcctcagatcgcgaccctgggagtggagtgggggcagcgtggttatgtggctggaccgccgcggatggctcagggttcttggacattggcgctacgaccttaggcgccctagctttaccaggacttggagtggcgataagggcccaatggcagaaacagtgtctacccaggttgggacagagggcgggctgagggcttcgcatcagcaaaacggtgacgctggtggcgacgcgaaggttgagctgtcccccgggcccccgaagccggctggccgggaagtggagccggccccagtaggcggggagcatccctcggctgcagccccaggcccgggcaagcataagaagcggcggggcgcaaccagggagcgtgtcgtgccgcccccgaagaagcggcggaccggggtgagcttcggagatgagcactttgcagaaaccagttattacttcgagggcggcctgcgtaaggtgcggccctattactttgacttccggacctactgcaaaggtcgctgggtgggccacagcttgctgcacgtcttcagtaccgagttccgagctcagcccctggcttactatgaggccgcggtccgggcgggccgcctgcaactcaacgagaagccggtgcaggacctcaacatcgtgctcaaggtggagtcctgatggggctggccagaagcgggcgaggaaaaggggccgggttttgttttgttttgttttgttttttagtcttagtaaagcataggtactggattaaaatcatggcaattctaaagcgttctcgctttcatttggaacactattttagcccgtttcccacctccgcaagtggccagggtgtctgtgcttcaggactcagcctgtttatcctcttcctcaaggcagcttccttgtttccaagggacagaagttggaattttcataattcctttaaacaccgtcttgtggcaagggcactgatcactttaccctgcgttgtagatctctgtgcaaatagtaataataggggctatcatttatgtctctttactgtgtgctgggcacaaagttaaacattgtatgtccactaattctaatgacagccttgtgaagtaggtattgccactccattttacctctgaggaaactaaggaaactcacaggggtaaggctatcaacagtgccactaccaaagcctatgttcctataactactacttaaactatttaacatagagttatgagatgtcagggatagagactagaattgtttagcccagtgctttgactcctttaaaattccatcacatctatgaggtaccagacacccctgtcagaagtaacactgtttacctctcagtaacactagtttaccatggttgtgagtggagaaaaggcgattacagcatttggggaatggatggttttggagtaacttgttccattgatcaatcgatttgcgtcaatatatcatacattgacgaattccctctcctatcccaatttctaaagcacagatctggtctaaccctcacattccacaggaagcagagacccagaaaagataaatgacttgcccaagagcatgtagcgagcctgtggcaaatcctggtctagagcccatatccctggacttaagccttagttttgtttgttcaagatcgtaataagtgatgatttatggaggttttttcctccattaaaaaaattttaccttgattatttattttttttttttttgagacagagtcttgctctgttgcccaggctggcgtgtagtggcgcgatctcggctcactgcaac

SEQ ID NO: 97042 - DNA, 197380 bp, Homo sapiens
ctgaggcaggagaattgcttgaatccaggaggcagaggttgcagtgacccaagattgcgccattgcactccagcccgggcgacagtgagactccgtctcaaaaaaaaaaaaaaaaaagttgggtgtgctggcacacgcctatagtctcaactattggtaggctgaggcgggaggatcacttgagcccaagacttggaggctgtagggagctgtgatccagtcagcttttagttttatttatattttatattgcaactataggagtcaaattaagcaagtttgtttcaagattttcaagagaagcctggattttatttgcaaaatattacaggtacagctctttaataaattcatccttattttcaataggttcataaaaatttgggaccagaattgaaaattttttcaaataaaaaatacagagcatgcacttggcactcaatgtttttattgtctttcattatttcctctgaatccaacttatcattttgttttttcttgtatgttattcatgtttggtttattttataaagacagggtcttgctctgtcacctgatatgagagctgacagtgcagtctagaggggaaaggctctagacagaacaagaccccatttttataaaataaacaaacaggccatgctcagtggctcatgcatgtaatcccagcactttgggaggccgggccaggtggatcacctgaggtcaggagttcgagaccagtttggccgccatggtgaaaccctgtctctactgaaaatacaaacattagcctggcgtggctgggcgcggtggctcacgcctgtaatcccagcactttgggaggccaaggtgggcggatcacctgaggtcgggagttttgagaccagcctgaccaacatggagaaagcccgtctctactaaaaatacaaaattggctgggcgtggcggtgaatgcctgtaatcccgctactccagaggctgaggcaggaaaatcgcttgaacctgggaggcagatgttgcagtgagccaagatcgaaccactgcactctagcctgagagacagggtgagactctgcctcaaaaaaaaaaaaaaaaaaaaaaaaaataacaatttaaaaaaacacaaataaagaataaataacatacaataaaaaacaaaatggattcagaggaaataatgaaatacaataaaaacattgagtgccaagtgcatgctctctctctctatatatattttttgagacggagtctccctctgttgccaggctggagtgcagtggcgcgatctcagctcactgtaacctccgcctcctgggttcaagtgattctcctgcctcagcctcccgagtagctgggactacaggcgtggaccaccacagccagctaatttttgtatttgtaggagagacggggtttcaacatgttggccaagatggttttgatctcttgacctcatgatctgcccgcctcggcctcccaaagtgctcggattacaggcatgagccaccatgcccggcctatattttttatttgaaaaaattttcaattctggtcccaaatttttatgaacctattgaaaataagggtaagtttattaaacagctatacctataatgttttgcaaataaaatccaggcttcttttgaagaccttgtaacaaatttgcttataatttgactcctatagttgtaatataaaatacaaatacaactaaaagctggccagccgggtgtggtggctcacacctgtaatcccagcactttgggaggccgaggtgggtggatcacttgtcaggagttcgagactagcctggctatcccagcaaaacctcagctctaccaaaaatacaaaaattagcccaacatgtggtgcacactgtagtcccagctactcgagaggctgaggtaagagaattgcttaaactcaggaggcgtaggttgcagtgaactgagattgcgcccctgcactccagcctgggtgacagagtgagactccatctcaaaaagaaaactaaacaaaaaaccccccaccaaacctagaagctaagaaaaaatggtggcattacttgtaactatttgcaattaatattcttaacagagcataaattttagaagaaaagtgcttgggctccaattcttaataaatatgtaaaatggtttacttttactggtaacaaaggtttttgggggagaagatactaaacaaattaagaaatttataaaaaatggccaggtgtggtggcttacgcctgtaatcccagcactttgggaggctgaggcgggcagatcaaaagttcaggagatcaagaccatcctggctaacacagtgaaaccccgtctctactaaaaactaaaaacaaataaaaaaattagctgggcatggtggcgggcgggcgcctgtagtcccagaaagaagggcgtgaacccaggaggcagaacttacagtgagccgagattgcgccactgcactccagcctaggcgatagagcaagactccgtctcaaaaaaaaaaaaaaaaagaaatttataaaaaatgtcagtcaatgctacagaaagtagtatattaagacagatactctcattagtgccagtaagaatgtaaataggtaggccaggcatggtggctcacacttgtaatcccaagcactttgggaggccaaggcaggtggatcactagaggtcaggagtttgagaccagcctggctaacatggtgaaacctcatctctactaaaaatacaaaaattagccaggtgtggtggcatgcgcttgtaaacccagctacttggcaggctgacgcaggagaatcacttgaacccgggtggtggaggttgcagtgagccgagatcacgccacggcactccagcctgggcaacagagcgagactatctcagaaaaaaaaaaaaaaaaaaagagtaagttggcattttgtttttgggaatgtgttttgcaatgcaaagcctaaaaacagccaattttaaaaattaatactcatgaaataatataaaatacataaagatgttctctgctctttgcaataaactaggaaaaaaccctctgaatgtacaaacaataagggatgattaaggtttatcccgatgaagccatttaacaggctatacatttagatctaattaatataggtagatgtttaaagtttcatgaggacactgctcttatctagctttccacttttgtatccctagggcatagaataaggcctagcacataaatgtttaataagtatttggtaaataaatgaaaaagtaatgtcgagtaaaaacgatataaaattttataaaatgtgatttctgtgaagaagctgtatagaaaaagaattggaaagacacacaaacaaatgggaaaagaggtcatgggcaatttaaaaaaatagctttattgaggtatactttgacatgccataaaattcacccattgtatgtgtacaattcaattacttcatttatacaactgttcaattatcaccatattccagcttaatggtcaatatttgctttgtcatttgatcttttctctatggtaagcaaaaatctattatttgaaaggttccttcactgaaagctgggtggagttgaactctaaaattacctacaaaattactttctatctagtcatctatgtctaattcttcaatttgacacatgcatgttactagcacaagctgcattttaaaggcagcaggaaggtcttttactatcattagaagttaactttaaggattgagcaggcacgatacagcatagattgtttcgtgtgctatatagtaaggtcaatattcttgctccttctacaaataaaaaaaagttccacagaataacaagtacaggtggagttcccaacggaaatgcaggtactgaatacaaccaactgcaactgtttctctgctcctcaatcctgctggcgtagtacgcgagctgccgacgtcccccaacccaccaggtaagccggccgctcctgtccctaggctgtgaggggttcagaggtaagaccttcggtgtattcacttagctccctacggaaaacttcgagaagaaggcgactgagatcggttagcacttaaatccctttcaaagccccggctcccatcgcccctcctatggcctcctacctgcagagaagcaaagcaggtacacccagtgccttaggcgggccaagcctagcactgtgggagcaaaaaacatggcttcatcgtcagggtgcgctatgaccagcagggtccggctttcggctcccagccgtcctccctgctcccgactcttcattcgttctgaggagtcccaaacccagaggaagccccatgccaagaccgccaacgccacacacaggagccacattgcttccatgatgggtaagcagcactgagcctgcgcagtaggaaaggctgcctctgaccctgactccggctggaaaacttcaccggggaatgttgggttccgctgttaagtccctcccgccgacatgctccggaagcttgaggttttaacgttaagggttctcttgtgttttaacacagaagtctccatgccgtccagtttcctaccctagtcctaccacactgtacaatcggtttaaaaggaagcgtcttatatataagctcccacttataggaagagttccttcctcttcattttcgaattcatttcttaaaactcgggcctttctcgtaattatagggttagacagcccgttatccgtatgacagttttccaaaatagccagttacaccaactttgttattccttctcacttttggatggctttctttaccttttttttttttttttgagaggctctgtcgcccaggctggagtgcagtggagcgatctcggctcactgcaacctctgtctcccgggttcaagcgactcttctgcctcagcctcccgagtagctgggactataggcgcgcgccaccacgcccagctaatttttgtatttttagtagagagggggtttcaccatgttaactaggctggtctcgaactcctgacttcgtgatccgctcgcctcggcctcccaaagtgctgggattacaggcctgagccaccgcgcccggccctttcttttttttttttgaaacggtctggctccgtcgcccaggctggagtgcagtggcgcgacctaggttcgctgctacctcagcctcccgcgttcaagcaattctcccacttcggtctccccagtagctgggattactggcgcgcgccaccacgcccgcttaatttttgtatttttagtagtgacggggtttctccatgttcgtcaggctggtctcgaactcctgaccttaagtgatggcccgcctcggcctccctaagtgctgggattacaagcgtgacccactgcgtccggtcgggcctggcttttctaaaggaacgtatgcgtgcggttacgaggaaccgtcgtttccccagcagggtgaggctgagcgtgcacttaacagtcgcgagggccacaggctcctcttgcaagtaacttaaggttaaggagcaacatcgtggacaaatcggcctcgcccagcatttcagtgagggcttggtgcgaattccagccagagccctagaaagtatcttgggcaggtcgaaatgcacccctccagctcccagccacgaggggaccggcttccctgtacgcagctccggccagaggaggccgccgccgccccaccacgccgcggaggggtttgcagggtcccttccacggcctggagtttttccttttcccacgcctgaggaaggcctcgggcgcgcggaacagacgggcaggcggggggcgcacaagcccagggcacgatggcagcagcgctggatccggctgggcgctgctcggccctgtatccgtccgagaggaccgccgctgccaggcctagaggagacatgaagagaccgggcgcagcgcgacccgggaagctccgccgaggtaggagaggcgcccggccagcggagggagttggtctcccaactctccggaaggaggaggagccggcgctggagccgccttagccgcggctccgcgggctggggggagggagaggggttgagtcaagatggcggccaaggtggcgaagcagcagccgcggcggcggcggcggctggagtgagcgtccgactcgccgcgccgaacgaggtcccggtgtagggccgcgcgccgtggccgcgtcccactcctcaggccggggcgcacgtcggctcccacgcttagccagctcccggtgagtaggccctggcgcctgcaaccccggcctccgggctcctgctagtccgggggcttccgagggctcccggggcagcagccgctgggacggtttctccgccgggcggggggtgtcgcaggcctgggcaggtcgggacccgtcctggccgcctggcctcttccactcggcagcccaggagagagccgggcgcggcggggagctcgggctgggctagcggaggcttatggagtttggaggaagaatgggctgtggccgggccggggctggccccgaggtgtcctgtgcggaggggcgtgcggagcctacagggcctgcgagggagagcgggcagccggtgccccgggtggggccggcgcaggtggcgggcctgggctcactgaggcggagttggtggccgacttggaagtgtagaaggggctgcggaggttgacagccatggacaagtgcgtgcagagtaaattagttcacctttctaacagaccgcttcagggtgtaatggcgaaggctgggtactggtggagatggcaaagatccgaacactataccttctgccgtttattgttggtgttttcttaagcgaagtccgtaagtgcacccctttttggggagagaggaatttgagaaactgtagttgtgaaatcagcctttatggagaggagactgaattcttcaaattaactggatcaggaatagtcatgtattaaaggaatggatgggaataagtgatatggacgaaaactatttgctcaggaagtgtcagttttctttatgtgatgttgcatgctgcggtgcctcttccacagagttaaccttggagagtagtagtatasgtaattctaatctttgggattagtatgtaaacctgcatcagatttgcttctctaattatatcctaattatattgaaatttayattccttgtgtgcaccctggtgaggcagtgatggaaggctgaacatggcactgtgcaaggagcaacaggcccgggatttaaaaatgcctacaaagattcattcattcgttcaatatatcttgatcaatagctgctgatgctgggtcacatgtgattgtcctgtggataactgaagagttgatggcatcgtttaatttttaatagctttttaaaatgttttgatgtaccttttcatgaagatatttattggatgaaccaacttgtacttgcccgggctcaggagcagaccaattttagaatgttatttagacaagggtaacaattacagaagaagtaaccgcaagttactggagagagaaatcttgtatctttttttctttttctgttaacatccggtggaaktttatttatttgttttaatatttatagtacccagttgcttggccttgctttaagcacacctgttaatggaaatcaagattaattgtatatatggatatagctatgtataaaatgctcacagtaggaactgattacttacaatactaaaatactctttccttttacaaaaggcttgccatatgttgaactactcccccggagaaaatataatacaaagtatcttgattcttgctctaactatgtgattttggaacttgatcaacctttctgtgcttcagtttcctcatcttgaatattaggtaaacatctactctcctagggttggctgttgtgagcctaaagggagttaatagttataaaattgttttaaacagattgaaggggttatatttctgtgaggtggtaacagctccctctgggctcctgtaatgctttttctgcacatctctcgcggcatttacactttctatcttgtaggtatttatgtacctattttatctcttgagagcaggataggcccttcgctgattttatcttttttttttttttttttttgagacagtcttgctctgtcacccaggctggagtgcagtggcgcaatctcagctcattgcaacctccgcctccgggttcaagcaattcttctgcctcagcctcccgagtagctgggactacaggcgcgtgccaccatgcctggctaatttttttgtactttgagtagagacggggtttcaccgtgttagccaggatggtctcaatctcctgacctcgtgatccgcctgccttggcctcccaaagtgctgggattacaggcgtgagccaccgtgcctggcttatttttaattgaatacttgttggatttaaaaaacagtaaaatttgtgttttgcctatcctcttaatcaaaaaagaatgaaatgatggaaattaacttataggaaagattagattagttaataacttttttaaagctttttttttttttttttggagacagggtctcttttgcccaggctgaaatacagtggctcgctgcagccttgacctctggactcaggtgatccttccacctcagcctcccaagtcgctgggactacaggcacaggccaccacgcctggttaatttttttttttgtttgtagagaaagggtttgaccatgttgtctaggctggtctcgagctcctgggctcaagcgatctgcctgtctcagcctcccaaagtgctaggatgataggggtgagccactgcacccggccttaaaagcattaaaaaaaattgtgttatgaattggtgaaattttcttttcttacctttgttatctgctgtagaaggcaaaggcctttggatagactgggggttgatgtaggtgagtgtcaggctgtttgttttttaaaaaatatgttttggttatttggttttaattgtattctgtgatctatcttagttgtaatttcaaattcttcttgatgcctgggaatgatggaactcttgcatatttagttccatctgttcttttacttaagatactggattttactagactatgatataaaacaactagtaaagattgatcagaatttattgtgtatagtcttatttgtagattagagattcatatatttttgtttactcacttatattcaaccagtatgaggtgctttttatgttctggcacactactaaatactagaaagttataaaatatagtcgagcagatcagttatattcacaaataactcagtctatagattatcttttttttttctttttttttcctttgagacagggtctcgctcttgtcacccaggctggagggcagtggcgtgatctcaggctcactgcaacttcagcttcccaggttcaagtgattctcctgcctcagcctcctgagtagctgggattacaggcatgcgccaccatgcctggctaatttttgtatttttagtagagacgtgttggtcaggctggtcttgaactcctgacctcatgatctacccgccttggcctcccaaagtgctgggattacaggtgtgagccactgtgcccggccctatagattatcttatatttggtccttttcaggtttgaggatgcaaaaaatacatgtatacatgtaaatggttaagaaaacattttgtttctttttctattagcactttttaagagcactggaaaactatgaaaagcttctgtaatgtagtaataaccgtatgtggagcatctgttttttattttggttttcttgtggtggcatttttccttgaacacttatactgttcttctaccatttttttcctaccccagtagcttgtgtggtcaaaatattactagaatagtcttcagatacaacctattttttttttctttgcatttgaaagtctgagactgtatgaaacactgcgaatgttcctatggagttcttcagacagtttgcttcttccgtatgtcctgctgttacttttatttaacagcgatctcaaaaacaacaaaattggttaaaataaaatgttaatggcagggcacagtggctcatgcctataatcctagtactttgggaggctgaggtgataggaccacttgaggccaggagtttgagaccaacctgcacaacagagcgagtcccatctctacaaaaaaattgaaaaattagcagagtgtgcttgtggtcccagctacttgggaagctgagcctgggaggttgaggttgcagtgagccatgatcatgccagtgcactcacttcagactgggtgacagagcaagactgtctctcaaaaaaaaaaataaataaaaataaaataaaaatagctaatttatagaatgtagagtcagattatctagtcttgttttactttcgataacactgaaggtcggagaagtgaagtgatttacctgcctaagttgctaaagttgggcaatagcagaatctaagtcttttsgtatctattatagtgttcactgtgttacactgtatcatccatgggatgaatcgatttgatgattgacacttaaaaatcggccaggcgcggtggctcacacctgtaatctcagcactttgggaggccgaggtgggcggatcatgaggtcaggagatcgagaccatcctggccaacatgatgaaaccctgtctctactaaaaaaatacaaaaaattagccgggcatgatggcacgcaccygtagtgccagctactcgggaggctgaggcaggagaatggcgtgaacccgggaggcggagcttgcagtaagccgagattgcgccactgcactccagcctgggtgactgagtgagactctgcctcaagaaaaaaaaaaaaaaattggagtgaataggaaatgagagattactttggatatttagcttaggtattgaatttaagatacttcttaatattaaattttggcaatgaaaatatagtttgaaaaaattgatactgatctatgtcagtgttacagtgatcaccaggaattatttagtttgcttaatttttaatctgctttgatgaatagcttcttaaacaaaaatgtctttgaggttatctgggtccagtgacacttcatggaatttaagtattaatagtgatggaaattttattatgccagtggtttaaatacccctgaggcccaaataaatagtttaaattattattattactattatttttgaggcagcgtttcactcttgttgcccaggctggagtgcaatggcgctgtctcaggtcaccataacctctgcctcctgggttcaagcaattctcctgcgtcagcctcccaagtagctgggattacaggcatgcaccaccacgccctgctaattttgtattttttagtagagacagggtttctccatattggtcaggctgatctcgaactcctgacctcaggtgatcctcccgcctcagcctcccaaagtgctgggattacaggcgtgagccaccacacctggcctacaaataggttaaattattttataaaattagctgttgcttgttttgcctactctcagacttctggattttttttttaagtatgaaggatttcaattgttatattaatataaaagcttagataaatagcacaaacatgaacatttttttttttgacagagtctcactctattgcccaggctggagtacagtggcacaatctcagctcactgcaacctccacttctcaggttcaagtgattctcgttctcagcctcccaagtagctgggattacaggcatatgccaccatgccccgctaatttttgtgtttttagtagagaaagagtttcgccatgttggccaggctgatcttgaactcctgacctcaagtgatctgcccgccttggcctcccaaagtgttgggattacaggcgtgagccatcgcacttggccgagtgtattctttatggttttttttttttttttacatccaaaagcttatttgtaatattcattttctgtatgtattcatgctataaaatttattttattttaattttttaaaaatagagatggggtctgattgttttgcccagcctggtcttgaattctgggctcaagtaatcctcccaccatggcctcccaaagtgctgggattacaggcatgagctaccatgcctggcctataaaatttattataaaggaaaaggcatattcttattaagctgataatctttacataaatactgaagcatggcatatttctttattctacttgggctattttgtgttgcattaagaagaattttttgtttttttttcttgttactatgcttgtttctggaatactcctttcctcccttactcttccaaactctactacatctaaatttatcctatttttcaagggtttgatcacatattacatcatccaggaagtgtctctcctattccctcttctccaaaatgtatattttttattctgggaactcttgatcctttgcctctagaccgtaagccctttgtaggcatgtctgtatctgagtttttaaaaaattttttcttcttttcccactcccagaataacaccctgtgcctagctcataaaaatgagcttagcagctagagttagtgtggttgctgtagaagatctctgatacacatatggcagtttgatgctgaatagtttttggaaattaaaaaacatgtagaaatttcaccaatgtcagtgactaacatagctgtaattagtaaattatcaaaatatttcttttttttttcttttttacagagggtctgtctctggaggcttcaggctggagtgtagtggtgtgatcatagttcaatgcagcctccgagtcctgggctcacgcggttcttctgagtagctgggactacaggtgtgtgccaccacacctggtcaatttttttattttgtagaaacagggtctcattatgttgctcaggctgacctcaaattgctgggctcaagtgatcctcccaccttggcctcctgaagtgctgggattataggtgcgggccactgagcccagttaaaagcatttctttaaaaaagaaaaaaaaaattctgtttattggaattttggggagaaagagaaagtaaacatgggattggttcatcctagacagcactcatggttctagataatattagaatgcaataatgttttaatttttatatgcagggaattttggagtagtttcaatcctaggaaaaaactgtgagttagaaatacagaacggttggccaggcatggtggctcacgcctgtaatcccagcactttgggaggccaaggcaggtggatcacgaggtcaagagatcgagaccattctggccaacgtggtgaaaccccatctctactaaaaatacaaaaaaaaaaaaaaaaaaaaaaaaaaaatagctgggcatggtggcacgcgcctgtagtcccagctactcaggaggctgaggcaggagaatcgcttgaacctgggaggcagaggttgcagtgaaccgagattgcgccactacattccagcctagcgacagagcgagactccgtctcaaaaaaaaaaaaaaaaaaaaaaaaagaaagaaatatggaacggttggttgataggattataatagaattcaggactccctttgaaagaataatatcgactagttttatataaaaaattaagtagattagtcaggagtaaaggaaaagtcaagaatcctaacttatttggatttctttcccccattacagtgtactcgaggaacaaaatttgggctgtttggctgtttttattctttgttatacacaaataagctgatatcaaaaccaaatatattgaggttacatttttcttttcttttcttttcttttttttttttttttggagatggagtctcgctctcacccaggctggagtgcagtggcgcggtctcggctcattgcaagctccacctcccaggttcacaccattctcctgcctcagcctccagagtagctgggactacaggcgtctgccaccacgcctggctaattttttgtatttttagtagagatggggtttcactgtgttagccaggatggtctcgatctcctgacctcgtgatccgcctgcctcggcctcccaaagtgctgggattacaggcgtgagccactgcgccccgccaagattacatttttctaggaaattttgactcttagatttatgatgagagtcacctttatgcttatagattgcccctttaccccatactttgttgaactgacagacattcttcttgccattatcactgtcatacacagttcacattcagagtaatttgttttaggcaattcatttcccctggcaataacatagagatttatgtaattttgaaaatgtttgttttaagtagtcatcatcatgactttgagtttctgttcaaagatgtttaactttgcgttacttttaagatttttaaattcatttttaattacaataacttttatgtatttggaggtatttggaatgaaatcaaaacttgtgctatctaggagttataacctaaaatatgcagaacgtaaatatacctgatgtaagagtatatacattctgttgggggggaggaagaagttactttatattcacacaaaatcattataatgcatgaaggaggatatgctattttaaaatcttatctttcactaattataagtaatacattattttatatatataccgaaattgaaagaaccacttcttggatgtaatctactgagtttgttgcatattcttccagttttcttttctgtgtttgtctaattttctatattatgggatcataatgtactattcttttatatactactgttccaagtttgtctatttatttcagttacctctatcaatcattaacagcaacttaatatcccatttctagtacatgaagataccataatttgccaggcatggtgactcatgcctgttatcccagtactttgggaggccgaggcaggtagatcaccggaggtcaggacttcaagaccagcctggccaacatggtgaaaccctatctctactaaaaatacaaaaattagccagccatggtggcatgtgcctgtaatcccagctactcgggaggctgaggcaggagaatcacttgaaactgggaggtggaggttgcagtgagctgagatcatgccactggactccagcctgggcgacagagtgagactccgtttcaaaaaagaaaagaaaatactgtaatttgcttaatcaacttacggtcactagattttttttttttttggccagaaaaacaaagctgtaaacaattgtgtgtgtgtgtgtgaatatttatgcacatgtacatatgtatatgcattttgtgtacttgtacaaacagctttgtaggatagattcctagaagtggagttgctgaatcaaaagatgtgaataatgtagatatggatagatatttatacattttccttccaaaagattgttgtaccaatttgtaaagctaccagtagtattcaggtatgccccatactctggccaatactagatattacagtttaaaacattttgacaatttaggaactgaaaaaatgtgattctgattggccttttatccatcaagattgaggctaaacattttttactatggggagagttgtatttctttctttcttttttttttttttttgagacggagtatcgctcttgttgcccaggctagagtgcaatggcttgatctcagctcaccacaacctctgcctcctgggttcaagcgattctcctgcctcagcctccctagtagctgggattacaggcatgcaccaccactcccagctaattttgtatttttagtagagacagggtttctctgtgttggccaggctggtctcgaactctcgacctcaggtgatccacccaccttggcctcccaaagtgctgggattacaggcatgagccactgcgcccaaccttttttttttttcttcttttcttttcttttcttttagacagagyctcgctcttgttgcccaggctggagtgcagtggcacaatctcagctcactgcaacctccgcctcccaggttcaagcgattcccctgcctcagccttccaagtagctgggattacaggcgtctgccaccacgcctggctaatttatatatttagtagagatggggtttcaccatgttagtcaggctggtctcgaactcctgacctcacgtgatccacccacctcggcctcccgaagtgctgggattacaggcatgcatcactgagcccggccatgtgtcttttataaattgcctacttttgttctttggttatttcctgatggggttattgcgttttaacaggttaaaaagttctctacatactcacttttttctttcttttttttttttgtgagacagagttttgctcttgttgcacaggctggattgcaatggcaggatttcagctcacctcaatctctgyctcctgggttcaagtgattctcctgccttagcctcctgagtagctgggattacaggcctgcaccaccatgcctggctaattttgtatttttactacagatggggtttctccttgttggtcaggctggtctgaaactcccgacttcaggtgatccacccgcctgggcctcccaaagcgttgggatcacaggcgtgagccaacgcgcctggcctcactcactttattcatgtgtgtgcacatatccccctagctattcttttgtaatgttatgtagtcagatatatccaaacccagcaccatgctgctgtgggaccttgggcacattatttaatctctgtacaccttaatttccttatttgtaaaatggagataatgtaaatagcattaggcatagtggctggcacaaagtaagtaaataataaatgttagctgtgactcttattagtctatttatgtgacttttgtgttttgtgctctacttaagactttccttactccaaaatgtaaaatattcacctatctactaaactagaaaaacaaagcgaggaacattatatgcctctatgtgtctttgctttaaagatgaaaaacaatgtatacatgtttgcttgtatatcgcaggatatatgatacttggaaacattggttgtcatagtaagaagaatgagtgagaggaagactttttaactgcatgcctttttgtatttttaaaacaaaggagtccccaggttgtaatttaatacttcagtggtttctttttctccttttccttctctttttaaaacttctaattctttgatccatctggaatttatttctggtataagaagtgagacatattttgggggataaaattgtgtgtgaattctaccctaactagctagttgtgtcagcaccatttagtgaataatctgttttttgccccactattagaattgcagcttttgtcatttactaaatgtgtttgggactatttctgattggtcttgttattttattttgatctcttgtgtattattttattttgatctcttattattttattttgatctctttgattaccatatactttaaattactatcattttataattttaatacagatggggttagttacctgttcattactctttttttcagactttgacaattctggtctatgtgttcttctagatgaactttagaatcattctgtgacattcaaaaagaaatcatagagatttttattgaatgctgaatattgattgggaatactgaaattgtaggtgaagtttggggaaattgacatctttatatactttctgtcctgtgttcaaatagatttttatgtccctcaatagattttcacactttgcttcaaataagtcctgtacagataagtctcgtatattcgtatatttcttatttcttttaaaaaawttagacccatgaatgggagtttgtttgtttattttattcaacaaatattgtagagaatcaaacaggtagtttttattctagtgagggaagacagaatatacttaaataaaatgaagtacgtaatccatttcagattatgataaacctataaaggaacaaaaagggtgatgtgattgagagtaacttgtgggagcttaccttatatgtagcgtggttagaaagactcttctgagatgacatttgaactgagaccttaagtttgaggaggagctagccayctgaatgagccaggaacagctttcctggcagagagtaaaggacaaagacccagttaggaaggacctggcagagaagggctcctgaagaaactgaaaggaaactcatgttgctggggcctagtgagcaatctggaaagtaagcaggccaaatcaagtagggccttgggtcatcgtaagtacttgagactttatttgcggtgcgtaggaaatccttggggaatctgaagcaggagagtgacatgttctgatttaaggtttaaaaagaacacttggctttttgagttgagaaagtattgaagtgggaagcccagttaggagtttttttgcagcaagaggtaaggatggtggtagttagatggagaggcctgggaagcttcagagtgtgtgtgtgtgtgtgtgtgtgtgtgtgtgtaaggaacagctaaacaacttgctgttggagtgggtgttactgagagctaagtactgctagctgctgcagaggccatgtagagcagaacagagctgatctttaccttcacaggtgtttgatagttctgtttgtttctaaggtgtgtaccaaaataaagtaggctaagagcatttgactttaagatttatggagctcgggggtgctgagaggggtgcagcaaaaaacagagtctgttcataacccttgattaacctgtagtctctgttagtgggtcaaaggggaggcagcagcagatgatctttaaggtatctgtctctgagttagaaaaacatagcttgaggaagttatgtagctttcctacagccttagagataatagtggaaccagacttttaggtgagctcacgcacacaccaagtcttagtacactggctagtatatatctagagctcagtaaatggtaactcttttagtaatatccacttagacattgttatatctattaattcaggccaaatatctacattaaaattgttcttatctcaatttctttgttcttcttttgtgttaatcaaggagggaattggcatgtagtcatccactttggttgtgaagtatatttgttctttttttttttttttgagatgaagtcttgctctgtcgtccagcctggagtgcaggggtgcgatctcggctcactgcaacctctgcctcccaggttcaagtgattctcgtgtctcagcctcctgagtagctgggattacaggtgcgcaccaccacgcctggctaattttttgtatttttttttttttttttttgagatggagtctcgcccttttgcccaggctggaacgcagtggtgcaatctctgctcactgcagcctctgcctcccgggttcaagcgattctcctgccccagcctcccaagtagctgggattacaggcgtgcgccactacgccccgctaatttttgtatttttggtagagatggggtttcacatgttggtcaggctggtcttgaactcttgacctcatgatcctcctgcctcagcctcccaaagtgctggaatgacaggcgtgagccaccgcgcccagccgtattttttgtatttttagtagagacgaggttttgccaggttggccagactggccttgaactcctgacctcaagtgatccacctgcctctgcctcccaaagtgctgggattacagacgtgagccaccgcgcttggctggctttgaaatatgtttgttcttataagttgagtgagtgagtgagtgttgttcagttcagagaattagttcaatgtagtgtcgacataccacagagttttcagttggatattgttacattgtactgctgtcttgggacagcactttttgtagaggtaaaatagcatcatttttctttcatttaagaattatgtatttattattattttttgagatagagtcttgttctcttgctcaggctggagtgcagtggcatgatcttgtctcactgcaacctctgcctcctgagttcaagtgattctcttgctcagcctcctgagtagctgggattacagacatgtgtcaccatgcccggttagtttttgtatttttagtgtagacggggttttgtttttttggccaggctggtctcaaactcttggcttctagtgatccacttgcctcggcctcccaaagtgctgggattacaggcgtgagccactgtgcctggccagaattacttattgagtatgtgtacccatagatttatcaaataattatatccttattaaaatttttctttcaatatcatactttataagaggtaggataggttaactaaaaagctttttctttagcttctatttgtttctctgtctttaagtaagatgtcatgatgtcaaaagaggctgcaaataaaataccttgttaatggcattctcccagattggatcttaaccaaaaggctgagaagcagtagcttttttttccccccaaagggaagaatgctttagtttattttacaagagaaaatttattacagtatagcaccactctggtcttgtacaaattacagaattcacttagataatttctagtctttcctctcctgcatgctgggctctgtaataagtttaggaggtcggctttctttaaattatccccaggttggaggattttgggtgttgggatgcccagggtggtggtccttcttagctttgtcttgcctaacatacttttagaattggtgtagagctggacagctttgtgggaactggtgtgacctaattttcctcagtttaataactaatattttagcatttgaatgtcataaaggcattgccctaccccatacttttgtatcagtaggttttattattttatcacgtaaaaattacatattttgtgggatcctttttctgctttggtgaaatgtaggcttcacctctattgtgacgcttggtggattcattcttgctcatctgaagtggcatctgcagtcctgccacagtgaagtatatttttagctttttttttttttttttttttttttgagatggagtctcgctctgttgtcaagctggagtgcagtggcacgatgccagctcactacaacctccgcttcccagattcaagcgattcccctgcctcagcctctcgagtagctgggactataggtgtgcaccaccatgtccggctaatttttttttttgtgggtgtgttttagtagagatggagttttaccacgttggccaggatggtcttgatctcctgaccttgtgatccgccggccttggcttcccaaagtgctgggattacaggtgtgagccactgtgcctggccatttttagctttttttccaagatagcttaggccaccttgaacacctttgcataacacattttggttatgcaaaaattgtgggccaaaagccagragttcctgctgagaggaaaaattgcttttttttttggcaggatagtatttgaaattttgttgttgcaagattttcctgttgagtaaatatgtgtgcgtttatttaatatgagaggatttaaaaaggaacttaaatagatcaatttcattttgcaatattgtattacctgtttgcaatatataagaggmtagttctgggtttatctgtataattcagttagaagtgctgttgtcttttatgacagtgacatataattattactatattattcccatcctaaaacattatatgttgatatttaagagatgaggaagttgcttataaaatctcgatcagatttcttaaacaattcgtagaattttttcagttcatgagtcaaccatgtaactaccctgagttaatgagttttggtgctaagaactgaaattataatttgatactgccacttaaggtgctcccttccccttcagtctgaactttaaactagattcttttatttcagtgggtttcaaatgtaaagtattctgccgaggtatcttagtgagccaggactagagtgaagggtggagggaaggatgggaaagggcagggggagactgaaaagatgaatcctaggtctcccattcttactagatcggaatgtttctccattgtatcttttgtacatttagctttcatttaagacttttgaggaaaacattctggttaaaaaacaaaatctgagcactgttgccgtgtatctcatggataagttttgaggaaggaggttgtcgtggtctccaggctgcagttcatgcgaggacaggaagggcttgctttgacctgtaaatttgtatgctagtaggggctaatttcctgattttgctagtgtgtgtgtgtgtgtgtgtgtgtgtgtttttttttttttccttctgtattgggcggatagtacttttaaagaaaactgactttttttttttttgagataataaagttaaacttcactaaagtcataccacaaaacggacaaggaaggattactgagatgagggaaaaaatggacaagtcacttaacttgtgactttgagtgacattgagtgtaattgttgaactcaggactcaccatagctgaaagttaaacaatgtgcattaaaaaattgtacctcatgggtttctaatcatttaggccactgttagaaaaaaattggatgaccctgggttaaaatctttttttttgcctcttcattccatttatagctttatttatttgggatatctgagttgggaggagagtgcagagatagataacttaaagcatgttttaggacagcagatcagaattagttggaaaacttttacaaaatgcatgaatgttcatatagtgaaatactcttttttttttttttttgacagagtttcactcttgttgcccaggctggagtgcaatggcacgatctcggctcaccgcaacctctgcctcttgggttcaagcgattctcctgcctcagcctctcgagtagctgggattacaggcatgtgccaccacgcctggctaatttttatattttcagtagagacggggtttcaccatgttggtcaggctggtctcgaactctcaacctcaggtgatccacccgcctcagcctcccaaagtgctgggattacaggtgtgagccaccgcacccggcccatatagagaaatactgtttagcaatagaaagaaccataaattgatgagaataattgccaagatgttttttttttttttttttttgagacggagtctcactctgttgcccaggctagagggtagtggcgcaatctcggctcactgcaagctctgcctcctgggttcatgccattctcccgcctcagcctcctgagtagctggaactacaggcgcccgccaccatgcttggctaatttttttgtatttttagtagagatggggtttcaccgtgttagccaggatgatctcgatctcctgacctcgtgatccgcccgccttggcctcccacagtgctgggattacaggtgtgagccaccgcgcctggccaaccaagatgtattaagtaataaaagcaagatacagaacagtgtgtttctagtatgccaccatttacataggggaaaaagtgtgagtgtatgtatgtgtaggatatttctaaaggacactctagaaactagtaactttggttgccttctgggagtgtaactgggtagcagctggagaagaagggcgaggagatttttcgctttatattctgcggtactttttcttaagtcctacatataatatttatttccaaaaagatcarccctcctcacgatgccacatgctggcttttccccttccacctggagcagttgcaggtgtatggatgaggagaaagctcctcaggtggttttaatgtgtgctctcactgaacatctcagctcctcctagttcactgcttgctgagaaagctgcaaagcattgcagaaaacattagtttttcccattttgccacaattttgtgatattagaggaattattgactttctctgatcttcagatttctcacctgtcaaatcagtgttagttgggtaatctcaaccttacaatccttaagatttgctgatctccatgcctcaggaagggagcagggaaaaaacaggctgagggtcagctggtcagtcttctgactcttctcctggtcagctttcacaacagcaggaaacatgacatcaggaggaggatggtatatttatttaaaatatttatatattacatggkaccacatagtttttaaagttctttttttttttttggagacggagtctggacccctcacscaggctggagtgcagtggtgccatcttggctcactgcaacctctgcctcycagcttcaagtgattctcctgcctcagcctcccgagcagctgggtttacaggcacgcgccaccatgcgtggctaattttttgtatctttagtagagaccaggtttcaccatgctggccaggctgtccttgaactcctgacctcgtgatctgcctgcgctggcctcctaaagtgcgtgagccaccgcgcccggccttaaagttctttctatacgtttttcttttattttttgagtcagagtttcattgtatcacccaggctggagtgcagtggcacaatcacggctcactgcagtcttgacctcctgggctcaagtgatcctcctgcttcagcctcccaggtagctgggaccatgggtgtgtaccgccatgcctgactaattatttttttcttttttttttcttttcttttttttttttttttgagacagagtcttgctctgttgcccaggctggcatgcagtggcccgatcttggctcacggcaagctccgcctcccgggttcacgccattctcctgcctcagtctccccagtagctgggactacaggcacccgccaccacgccctgctacttttttgtatttttagtagagacagggtttcaccgygttagccaggatggtctcgatctcctgacctcatgatccacccgccttggcctcccaaagtgctgggactacaggcatgagccaccacgcccagccgcctgactaattgttattattattattttaattttcttgtagacataggtctggcttcattgcccagactggtcttgaacgcctkgccttaggagatcctctgatcttgacttcccaaagtgctgggattacaggtgtgagccactgtggccagcctataagttttattttaaagttagattgaatgacaattccctaaaaaattttattttttaaacctaactggataaagaatatattgataaaaactgggaaattgatcaagttgtcacagtgaattatttttcgaatttgccctcttcccaaatcccttgaaatgatggaaacaaaattaaaactttactaataaaatactaaatgtgtggagattttatatatataaaattatatatgttatatttttatatatacaattatataattttcatcatatataaattctattttttaaaaccacccaattaggtaataatagaactcctgtcttaaagtaagagagtatgcacacacatgcacgtgtgtatatgtgtatataaaatttttgtcatgggagttttatatataattaagatagaaattatatattatggcacacatttttatacatatgtaatattctctatcatatgtatgtaaaatacatattaattatgtataacataaacatttgtgctatcctgaaacataaacatagataatcatgttttaggatgggaatactcaggagtataacagtacctgttctcccattagtcagtctgtaaattcagtatttatgtgttctcatccagaattctctgggacctgacaagctgactctgatgcttgtgtgtaagaggaaatgtgctagaatagctgggaaggcggtgaaagtagcagcaacagcaaagcacaatgaggtgaaacttgtcctgctggatatgaaacctcataatactagagtaatttgaaaagtgtggcattggcacaagaaaagacagataaatcaaattagtctagaattgtggataagtaggaatatactttataatgaagatggctttgtttttctttctttctttctttttttttttgagacggagtcttgctctgttgccccggctggcgtgcaatggcgtgatctcggctcactgcaacctccgccttccaggctcaagcgattctcctgcctcagcctcccaagtagctgggattacagacgcatgtcaccgtgcccggctaatttttgtatttttagtagaaaagaagtttcaccatgttggccaggctggtctcgaacttctgacctcaagtgatccacctacctcagcctcccagagtgctgggattacaggagtagccaccgctcctggccttctttttctttatttgctatttcaggtccatagaagcatgcaaagagtaatataacaaatgtccatctacctaccatctgtgattacaaaacttagtattttatcatccttgcttcagaattatttaataaagacaatacttccctctgcacaaatgcttaccttaaaactactcttgaattcttttcgcaattgacttatcaactcccaaatttaaaaccatgtatttttgtctttatatttctcagacatttatagaaagatatttactgagcagttattatgtgccagatcttatgctgtttttatatactgtttttactttatataactaattatattatttgtcacatattaacctattttaagtataaaaagaaatgatgcattaatgttttcaaaccttggtaacttttattaagtaaatacatgagaggaagcttttactggtaattgtggttttatttatgtagctatagttataatttattagaagtacacttggtgttttagttcttactaattctgtttttttctcatcctgtttaggtggtttcctagaaacatgattgtttattggcattgatctcacagtctggtgaggacttctttactgataatgtcaagttcaggttatcctcccaaccaaggagcattcagcacagaacaaagtcgttatcctcctcactctgtccagtatacatttcccaacacccgccaccagcaggtaaggaacagatagtatgcaaattgcacatgttttttgtgtttttctttacttttcctatttaatacacatgtgggacagaaaccaccaaatttatcttttttttttttaagttgcaagagctatttacaaagacaaggaaccaaagattgggaattaattatttctgtcttcttactgtggctttatgctgatttcaggagttgaacttgtctttgcttttcatgataggagttgatgataaatagaaaacttaccaattctctagaatttctggggtaagacctatatttatactcccaagttgtggctgagttttaagctggccagataacttggcatgtcttgrgtgagggccaagataaagacctctctctttttaagaaattgatggtaggaagatttgtatagtaggtaggaaggaagggatggtagttaggaaggaagactttatcataggaagagtttgtaagagattgatttaccttgtgaaaaataaagtatgaggtgaaataatcatatcagagtagaccaaggttatgggtgtaagaggtttaaagaaaaataggaaaggatgggataaaacggtcctctcagagactaagaaagcagatttgtcatcagaatgtactacrgggtcctmctgaggactcctttgaagtgcagtcatgattacagagttagaatggacattcttacgttgttcctrtgtagggaggcatttagtctttcaccattattacatgtaatgttagttgcacgtttttgttgatgccttttttggttgaagaggttgctttctgttcctagtttgagaatttctgtcatgattgggtgttgaattttgcttgtgttgtccccctaccccagtgttattcatccgattaccaattttctggattattgttgctgctggttttttaaaaaaatcaggccgggcgcggtggctcatgcctgtaatcccagcattttgggaggctgaggtgggtggatcacttgaggtcaggagtttgagaccagcctggccaacatggtgaaaccccatctctactaaaaatacgaaaaaagtagccaggcatcgtggcaggcatctgtaatcctagccactcgggaggctgaggctggagaatcgcttgaacctgggaggcagaggttgcagtgagccaaaattgcgccgttgcactccagcctgggcaacaagagtgaaaccccatcttaaaaaaaacaaaattaactttgcagtttagtttatatatatacacatatatctatattagaatgcactcattatatgtgtacattgtaacaaattttgacaaagtcataaactcatacaaccatcatgaaaatgaagatgaacaacatttctaacactctaggacgttctttggcaccccatcctccttggcacccacccgtgtcagtcctcctccccgacttcctactaacctcagctcctaggaaaccactgatctgctttctatcataatacattgtatacgttctgagcttcatgggaactattctgtctatggcctcttttgcttcccataatacttctgtgatctatccatgtctgacatgtcttagttcattcctttttattgttgagtatgggtataccacaatttgtttatccaatcacctattccagtttttgattattataagtaaaattacttagaaaacatatatctatatgtttgttgtatgtaaattattaaaggaagtattgcctcattttcttaacagcatcctttggagagcgtacattttttatttttatcaagtccgatatactttttttttgagatggagttttgctctgtcacccaggctggagtgctatggtgccatctgagctcactgcatcctctgcctcctgggttcaagcaattctcctgtctcagcctcccgagtagctggaattacaggcgtgtgccgccacacccaggtaatttttgtatttttagtagagatggcgtttcaccatgttggacaggctggtcttgaactcctgacctcaggtgatccaccctcctcggccttccaaagcgctgggattacaggcgtgagccactgtgcccggccccagctaattttttgtatttttagtagggacaagttttcgctatgttggccaggctggtctcgaactcctggcctcaagtgatctgcctgcctcggcgtcccaaagtgtggggctttcaggtgtgagccactgtgtctggtctcctctggttactttttaagagttttctctttatcattgattttcagcaatttgggtatgggttttttttttttttttaaacgaagatggtgccttgctatgttgcctaggctggagtgcagtggttttcataggtgcattcccactactggtcagcacaggagttgtgacctgctccattttttttgttttttttttgtaacctgggtgggttcatccctccttaggcaacctggtagtcctcctgcttctgggacgtcatcatataaatgctgaacttagtgtagacatctgattggcatagcccagagctgtagcctagaactattgggctcaagggatcctcttgcctcagcctcccaagtagatgggaatacaggtgtgagtcacgacgcctggctgttgtgctttttgaatgaatacattattgtccctggcattcaccaagcttcctgattctgtggatttacaattttcataaaatttgagcagtttggggccattgtttttttcaaatattttttcctgtctccttttcccctagtttctgtctgggactccaattactcatgttgcatgttattccacagttcactggacctctgttcactttttttccctgtttttattttattttttttttaaatccattagcttcattttgctatggtatcatagtcagtgatcctttcttctgtacttttcaacctgttgttaattttatccagtgacatttttattgcagatggatttcatttttgatgagaatatgaacattgtgagtttcatactttttttactgctggcctttgttatattcctgtaaagagagatgaagtccttctggtaggaaattaagttacttttgaggcttgtttttaaactgttagggcaggtctagagtggtctttattctaatttatcccccacttctaagcttgtctcctagggtttctgttgaatgtcccgtgtattcagtgggatttcctcactcttgctggaagaaatttgaatgagttcttgccctgagtgagctcagggaattgtttgctttatagttgcttctaattgttctatcatcagaaattatttttagcccagcctgtgatatttctccttattcatttacagactagaattcaggcataggcttaagggatcccaaattcagagtttaggaaatctttctctttgaaactaacttctggaagttcagttcctatggcttatccaaaccttgtacggttgcttcttcaacgactgtgattgtgggacatgatttaggttcccttcccatggctgcagtttggaaattgcctttaggcagagggcctagagtatggtaggtagggcttacctcatttgcttcatttctctcagcgatcaagccctstgctgcctattattcagtttctgaaaatagtttctacatttctttgaattttttagctgttgactgtgggaaggtaattctgagcagtgttacctgcttatacctggaagctgcagtacactgttgttacttttatttcactccttactcttaatttttcttgctgggtacgtcctttagaaattctttcagggagtgttggctgggcgtggtagctcatgcctgtaatcccagcactttgggaggctgaggcgggcagatcatgaggtcaggagatcgagatcatcttggctaacacggtgaaactccgtctctactaaaaatacaaaaaaaaaaaaaatagctgggtgtggtgttgggcgcctgtagttccagctgcttgggaggctgaggcaggagaatggcgtgaacccgggaggcggagcttgcagtgagcctagatcgtgccgctgcactccagcctgggcaacagagcgagactcctcaaaaaaaaaaagaaattctttcagagagcgtctgtggttggtatattatttgagttcttaaattctcaaaagttagtagccttaaaacttcagtgatggtttattttttatttcattttatttttagagacaaggtttcactctatcacccaggctgaaatgcagtgacgcagtcatagctcactgtaaccttgagctcctgggctcaagtgatcctctcacctcagcctcatgagtagctgggactataggtttgaaccaccatgcccagctaatttttacattttttatagagatgggctctcactgtgttgcacaggctgatatcaaaaccctggcctcaagctgtcctgccttgccctcctaaagtgctgggattataggcatgaagcagcatgcccagccaaatgatgacttagttattcaatttgtagcttcaacgttattttcctctgaacttgaaatatgctattatttgctgtttgcttctattcagtgttgctaatgagaagcctgcttttattatgatccttctaactttgtaggaaacttttttatttcatcaaacttataataaagtttcactttattcttgtttttttaatattttcatgtgtccagtatggattaatttaaaaaatacatccagttttttccttaagcccttttaaatctgaagactatgttttttctaatttcagagaaatgctgttctattatttttcagaatcctgtctcttrcctgtggatatgggatgttggaacttyttgctgtagctcccatttttaacttttttcctgtggtttctatgtctttgtgctttactgggtactgagagaattcctcagttctctcttagctttcatttacttttcacttctgtgtgttcarctattgtttaccttcagtgattcagtttttagtttctttgattctttaataaattttttttttattttttgagacagagtctcactctgttgcccaggctgaagtacagtggcacaatcttggctcattgcaacctccacctcctgggtgcaagcaattctcatgcctcagcctcctgagtagctgggaccacagacatgtgccaccacgcctggctaatttttgtaattttagtacacacggggtttcgccaagttggccaggtttgtgtgaagctcctggcctcaagcaaccctcccaaccttggcctcccaatgtgctaagattacaggtgtgagctaccatgcccggcctgctatttgattctgttgttatttttttttatttttatttttaacaaacccttgtgatgaggactgactatttttttttgtttttttgagacagagtcttgctctgtcacctaggctggagtgcagtggcttcgtctaggctcactgcaaactccgcctcccaggttcaagcgattctactgcctcagcctctggagtagctgggattacatgtgcctgccaccatgcctggctagtttttgtatttttagtagagatggggtttcaccatgttggccaggctggtctcgaaatcctgacctcaagggatccgcctgccttggcctcccaaagtgctgggattacaagtgtgagccatagcacctggcctatttgattctttttgaggctattattaatattttctaggtcctttttacttttatttactgttttacctatttccttggatgtaaattcctttttgttttggtgcctttgaaaaaaaaattttttttttttgagatggagtcttgcacttttgcttggactagagtgcaatggtacgatctcagctcactgcaccctccccctcctgggttcacgtgattctcctgcctcagcctcctgagtagctgggattacaggagcaygccaccacgcccagctaattttttgtgtttttagtggagatggggtttcactgtgttggccaggctgttctcaaactcctgaccttgtgatctgcccgcyttggcctcccaaagtgctgggattacaggcatgagccactgtgccaggctgaaaaagttttttaaatggtttttttatgttttcaactttatatctgagatttcttcttagactatgagttattttttactcataacttatagagaagggctctcaatggcttatctaccctctgttttatcctggacagcataattttatctgtttatgatttttaaaactttttgttgacacagaattcatataacaaaatttaccattttaaagtatataatatagcagcttttaatatattcattatattgtgcagctatcaccactacctgatttcaggacatctccatcacctgcaacgaaaccccataactaatagcagtttcaattctcctcttctccccatcttttgacaaccaccaattcattttctgtttctatggatttgttgccttttcgtttttctttcttttttttttttttttaaagatggtgtcttgctctgtcacccaggctggagtgcagtggcacaatcagagctcactgcagcctctaactcttgggctcaagcaagcctcccaccttagcctacagagtagccgggacgtgccacaatgcccggctaatttttaaatttattttttgtagagatgaagtctcactatgttgcccagactagtcttgaatctgtggggtcaagcartctgcccaccttggcctccccaaagtgttgggattacagatgtgagccatagcacccagcctggatttgcttattatagacattttatataaatggaatcataatatgtggccttttgtgcctgacctttttttttttttttaaacttagtataatgttttctatgtttgtctgtgttctagcatctctccttttttaaggctgaatgataytcagttgtatggttatactacattttgtttatttgttcattagttgatggacattttggttgtttttattttttggctgttgtgaataatgcacccatgaaaaattgtgtactaggttttgtgtgtggttttatatacttgtaattctttggggtatatacctaggactggagttcctagcttatttagtaattctgtgtttttctgtttatgattgagttagcacaatagatttgtttggaaaagaagtttttgccaaaaaaaaaaaaacaacaaccaacaaaggaaaggtacaaaaacaaacataaaaacactcacctagttttgatgggaaaaactactactcttaactagcaggttgattctctgtacttcagtttcttcattgtaagtgtggatggatttgattagacttccattacccttcttccagcttactcattatgaatttagtattggaatgctttttaggatttcatattgaacacatgagtttgagattttactgatgtgagtaatacagattgggagttattgtaatttgttattagaggaatgagtcaatatagattaaacttgaaatttcattttggatttttttaatgatatatagttaaaatgttgattattttaaggggaagaattagatcaatgaaggattgaaatagtcattgctctttctttccatacttagtggcccataactacctttatacttgctttgatttcatgatgttgttcagtttttggttaataattgatttatgattattttaatactaggagttcgcagtccctgattatcgttcctctcatcttgaagtgagtcaggcatcacagcttttgcagcaacagcagcagcaacagcttcgaaggcgaccttccttgctttcagaatttcacccaggttctgacaggtaatgaggtttcttttatgtttctrtctaggattataattgtgaagtatacaagtttgtcattattttatttttttactttttattaaccaagccatgactggtcatttatagtttgcattttgagttcttttttgttggttggttgcaatagttaacaagctcttaaaacttgtttccatagtttggcattaatattatttagtagaaaggcagtaaaccacctggtcacctgtgtgtccttggttatgttctatagacttgggctgcacattagaaccccttgggatgcccaagcctcatcacaaaacacttaaatcaatctctggagttgggcccaggctttattttatcgccgaagtttttccggtaattctgatttgcagctagggttgccagtcactgatctcaactcttcaagctttagttttccctcctataaaaatggagataatagtggcattgtcctcaactgatagtaaatattctgtcagataatgtaggtcctgtacatgcatggtgggttctctttttcctgagtgtccttaccatctctgctttcttttacttcattctcattctgaaagttttgtttgttttttcttgttttttggagacaggatctttctagctctgttgcccaggctggagtgcagtggcatgatcatggctcattgcagcctcaacctcctgggctcaagtgattctcccaccttagtctcccagtcctggctaattttttgtattttttgtagagataggatttcgccatgttgcccaggctagtcttgaactcctgagctcaagtgatccacccacccctacctcccaaaatagttaattctttttttttttttttttttttttttttgagaaagagtctcactcttgtcacccaggctggagtgcagtggcatgatctcagctcactgcaacctccgtctccagggttcaagtgattctcatgcctcagcctcctaaatagctgggattacaggcatacacaccacacccagctaacttttgtgtttttagtagagatggggttttgccgtgttgaccaggctggtcttgaattctgggcctcaagtgatctgcccgctttggcctctcaaagtgttgggatcataggcatgagccactgcacctcgccagaatttttttttttaaattgtgtgtatttaaggcatacaacatgatgttatgggatacgtatagataataaaaaggtcactatggtgaagcaaattagcatatccatcatctcacaaagttatttatttttgcttttgtttttatttttgcttttgtggctggaccgactaaaatctactcatttatcatgaatcccagatacagcactatattattatctgtagtcctcatgttgtacataagaaatctagactttttcattctatgtgtctgctactttacatcctctgactttcgtctccccattttctttccaccccctgcccctggtaaccactgttagcactgttttgttctctttgtatagttcctttttttttttttttttttttgtttaagattccacatataagcgaaatcatgcaatattttactttctgtgtcaggtttatttcacatagcataatgtccttcaggcttatccatgttgtggatggcaagatctcatttttttttagggttgaataatattccatagtgtatatataccacagtttctttatgattcattcattgacaracacttagattgtttttatatcttggctattgtgaataattagctgcaataacatgggagtgcatttacctttacaagatggtgatttcatttcccttgggtatatatccagaagaaggattgtggrgtcatgtggtagttctatttttaattgctttaggaactttcatactgttttccataatggttgtactaatttacgttaccaccagcagtgtacaagagttctcttttcttcatgccctcattaatatttgttatcttttgactttttttggtaataggcatcctaatgggtgtgagaatatctcatagtgcttttaatatacagttccctgatgactaatgatactgaacatcttttcatatacctgttggtgatttttacgttttcttttgagaaatgtctattcagatcttctgcccattttaaaatcaggttatttgtttttctgctattgagttttatgagttctttataaattctggatattaattccttagcagatgcatagtttacaaatatgttttctgtgtctacaggctgctgactcattttgttgttttcagaagctttttagtttgatgtagtcccatttatatatttgtgcttttgtggcctgacctcttgatatgcaaaaaatcattgccaaggtcggtgtcccrgagcttttctccctacgttctcttgcaggacttttatagtttctgatcttatatttaagtattttatccattttgagttgatttttgtatatgctgtaaaacaagggtctaatttcattcctttgcatctggatatctagttttcccagcattattgaagagactaccctttccccactgtgttgctgtggttcccttgtcaaaagttaggcggccatatgtttagatttatttctgggctttctattcttttctactgatcagtgtgtctatttttatgccaataccatattgttttgattactgtaacttggtagtacaattttaaatcaggaagtgtgatgtctctttgtttttctttttcagaattgattttgctattgggggtcttttatacttccatgtgaattttagggttgttttttctatttctgtgaaaaaccccattgggattttaataagaattgtgttgaatctgtactgtatatttctttgggttgtgtggacatttttgcaacattcttttgatccatgagcacaggatatctcttcatttatttgtgtcttcagttttttaatcagtgttttatagttttcaatatacagatctttcacctccttggttaaatttatttaaccaagtaaatttatttaaatgtcttttagaactctgtcataaattgtttccttgatttctttttcagttaggttgttacttgtatataaaactgctgttgattttgtatcctgcaactttactggattcatttattctaacagtttttttttttaatgtgtagaatcttggggaacttttatacataggattgtgtcatctgcaaataaagatatttttactttttcctttctgactggatgccttttatttcttttcttttttttcttttctttttttttttttttgtttgattgctcttgctagtacttctagtactatgttgattagaagygtttgccactgcttctaatcaacatagtactagatgggaaaaggatccgatccttacctttcatggtatcttagtggaaaatctttcagtwtttccctattgattatgatgttagttgtggaattttcacaaatggcctttattatgttaaggaactttccttcttttcctaaactgttgagttttttaagtcaagaaaagattttggactttttgaatgctttttctgcatcagttaagatgacgtgttttgtttttgtttttacttctcttctttttaccagtaggaaactttatattgtcctttttttctccttgaatttttatttcttttcttctccagtaaaaattttttgctaatatgtttattcttaatagcattttactgatcactttcatatatttctactacaaatacatatagaaattttgggccgggcactgtggctcacacctgtaatcccagcactttgggaggccaaggtggacggatcacgaggtcaggagattgagaccatcctggctaacacggtgaaacctcatctactaaaaatacaaaacattagccgggcgtggtggtgggcacctatagtcccagctactctggaggctgaggcaggagaatggcatgaacccgggaggcggagcttgcagtgagccaagattgygccactggactccatcctgggtgacagagcgagactccgtctcaaacaaaaaaaataaataagtaaaataaaataaatttatttaagttttctgtgattttaggccctgagtgtttaaaagttttactctggattaagttatgacaattagtagtagtagatcattgaacaaaaaagcataaatatatgtatacattttattacattattcttaaaagcaaaaagtaaaatcttactgaaaacataccttttaataagaaaggactggtttcccttcccccaattattgtaatttttgagtactaattactggaaacaggcaggcttctatgtgaatactattccaatttttattttttatagactatgaatattgttcatctaagcaggtagaaatggaataaattttgtagctgcaattttgcttaattctctgagtgccttccaatttctagaccaacaatcacagtgatctgatatctaaaattattttttttgatctttcagctaaaaaatagtttctcctttgatacaaaagtaaagaattagaaaccacttggtttggaaaaaaaaaagtttgttacccatacttttgccattctcttttttcagtattgacatgatcatttcaaattgttcttttgtagcactagaggtttagttttatttgtttgctgtttttcactttttttattatctaggacagaggttgccaaactaaggctrgttggtactgaccatatcctgtctgtcctgtttttgtagagccctcaagttaagaatgatttttacatttacatattaaaataaattttattatgtatatttgaggtttacatggtgtgtgttatgggatacacatagtttagccagtgaacatatctgtcatctcacatactttgttttggtgacgaatagctaaaatctacccatttagcaaaaatccctaatataatacaattgtattaactttagtcctcatgttatacattagatctctagacttgttcatcccacacatctgctattttgtatcctttgacctccatctccttatttctctatccccaaccagtgaaccactgtttcattctctatccctgtgtatttgagtgcttttttttttttaatattccatatataggggagatcatgcaatatttttatttttgtgcctggcttatttcagcgtggtttcagcatggtccatccatgttatggtatgaaaggatttttttcttttttaaagttgaataatatttatacacacacacacacacacacacacacacacacacayacayacayacatacatatatatgtatacacacacacatcacattttctttctttcttttttttttagacagagtctcactctgtcacccaagctggagtgcaatggcacaaccttggttcactgcaacctccacctcctgggttcaagcagttctcctgcctcagcctctggagtagctgggactacaggcgtgtgccaccatgcccagctactttttgtatttttagtagagacagggtttcgccatgttggccaggctggtcttgaactccagacctcaagtaatccgcccacctcagcctcccaaagtgctgggattacaggagtgagccactgtgcctggcctgcacattttcttaatccattcatctgtcagtgggcatctaggttgtttctatatatgaactattgtgaatgatgctgccatgaatatgggagtgtaggtatctggttgttgttttattctttttttttgagatagggtcttgctctgccactcaggctggagtacagtggcatgatcatggctcactgcagcctggacctcccaggctcaaatgatcctcccactgcagcctcccgggtagctggcaccacaggtgcatgccactgtgcctggctgatttttgtattttttgtagagatagggtctcactatatccaggctggtctccaactcctggcctcaagcgatccttctgcctcagcctcccaaagtgctaggattataagcatgaaccactgagcccaccccagatatctttatgaggtggtgatttcattccttttgagtatacaaccagaagagggattgctgggtctatagtagttgtatttttaatttctttgggrccttccatactgttttcyataatggctataacaatctacattcccaccaacaaaatactagggttcccttttctccataccctcgccaacatttgttrtcttttggagaatagccatccttacaggtgtgaggtgagatctcattgtagttttaatttgcatttccattgtgattagtgatattgagcaccatttcatatatctcttggccatttttatgttttctttggagaaatgtccgttcacttctcttaatatgatatatcccattgattgatttgtgtatgttaaaccagccttgcatgccagggatatgtcccacttgctagtggtttgtaatcttcgtgatgtgttgttgaattcagtttgttaatattttawtgaggtttgttttttttttttttttttttttgagacagagtctcgctctgttgcccaggctggagtgcagtggcacgatcttggctcactgcaagctctgcctcccggcttcaygcccggctaatttttgtacttttagtagagacacggtttcactgtgttagccaggatggtctcgatctcctgacctcgtgatccgcccgcctgggcctcccaaagtgctgggattacaggcgtgagccaccacgcccggcctttattgaggatttttgcatcagtgttcattagagagattggcctctagttttgttttcttgtgatgtccttgacttagatatcaacttaaatgcctttgagttaagtttctctcatataatgtgttgggaaatagtccctctagctctattttttggaagagtttaggaggagttggtatatatttttctttgactattcagtagaattctgccatgaagccttcagatactggagttttctttgttgagaagtttttgattacttcttcagcctcttcatttgttgttcgtttgttcaggctttctacttctgcttaactcaatcttggtaggttgtgtttttctaggaatttatccatttcctctaggttatccaatttattgacatataatggttcatatagttccttatgatcctttttatttctgaggcatctgttgtaatttcttcgttttcatttttattttatttatatgaattctaagttattttgaaatataattacctttataaatttcctttctgatttcagcaattttataaggtacctgatttcccatttcaaaaatgtgctcactgtttaggttttaagttgatcaaagatttgaaatataatattattttgtttgaggtggagtctcactctgatgcacaggctggggtgcagtgacatgatcttgactcactgcaacctctgcctctcatgttcaaacgattcttctgcctcagcctccgattagctggaactgcaggcactacaaaaaaaaaataactttttttgtagttttagtagaagcagggtctcaccgtgttggccaacctggtctcaaactcctgacctcaggtgatccacctgcatcggcctcccaaagtgctaggattataggcgtgagccaccactcccagcctaaaattattatataatacatttcttggttaagtttggagagagaattcagcttacttgtcccctaatatctaaaaaatgaacaaaaacatatttttcaaacaggctaaaaatttacccttttataaataagaaaagacatacagctattgtcaaaaacttagaaaagtgggattcacrgaaagaattacaagtatcttgaatgacttggcctcctattttctattgttaaagtagcattattgttttatgagtcaaggaacatgagtttttattttatttcattttattttattctattcttttttttttttttttttttttgagacggagtcttgctctgttgcccaggctggagtgcagtggcgtgatctcggctcactgcaacctctgcctcctgggttcaagcaattctcctgccttagcctcccgagtagctgggactacaggctcatgccaccatgcccggctgattctttgtatttttagcagaaatggggtttcactgtgttagtcaggatggtctcaatctcctgaccttgggatttgcctgcctcagcctcccaaagtgctgggattacaggcatgagccaccacaactggcctattttatttttttgagacagagttttgctctttttgcccaaactggagtgcagtggcgcaatcttggctcacctctgcctcccgggttgaagggattctcatgcctcagcctctagagtagctgggattacagatgcctgcctccatgactggctaattttatatttttggtagaggtggggtttcaccatgttggccaggctagtctcgaactcctgacctcaggtgatccgcccgcctcagcctcccaaaatgctgggattacaggcgtgagccactgtgcctggcggaacatgagttttttaaaaagaaaattaaaaaaaagcagtatcgaagaaagtaagttagtgaaatcctaggatttctcatgaatattctttgattggagaaaatttcaattggtggtggtgaatggtttgcttgagaattcccattatgccatcctggtttctcaacagctgcagaaaggacagttgggatgtgccattctgtaaagtgatgagccagaaccctctggagtggtctacatgtctggctggtagagggggccagagtccttagcagaggcagttacagccctaaccaagatttttcttcctttgccccacttacatgttccctcgggccatagaacagtatttagaaagccatacctattcttccatttgcagagaagatgacyacatgccagaaaaagtgggaacaatcaaggagaacccacccagactatcccacgccaaagagaaaggctgccacaatgtacctgagcaggagggtggggaatggcacaaatgaggcgaatatattcctggaaaagaaaattaaagcaacatagtatgccaaaaataaaatcgccacgtgtaagaaacataaagagcatgcctcgtaagtgctatgcactataaaagaacttaataatataaataagttctatatttctatatttcttctataaaagaacttaaataatgaagtattcaaaaacaaaatgataagacagccagatgggctaaatgtagttcagacatttgagtgccctgaagatataaaattagaaagaaaaggaataaagtagatgtggcttaaggtaaaccttgtcttagaacaaagtcttgatataattagagtgagtgcagaagaaaaggacaaagattaagacaattagaaagaacttgtagggaggacaaataaagatcatccagtatactataagaacatgtttttgaggtggaaaacctggtaaaggaacagtaataatattcataatacagaaattccccataaagttaaggaagaattgatagattctacagattgataaaacatatcttgttccaggaaaatttatacagaaagaatgatccataccaagacagatcatggttgaggaattaaatttcaaggataagtaaaagaactaggaattcaggaaacaaaataaatgctccacaaggtggaagagtcaggctacaaacttctacatagcagaattgagtgacagaaaatagtgaagcagtagctacaaagttctgagtaaaagaaattgatattcaagaatattataccagacagtttaacaataaaaacaacaggcagattttcttagacatgaaagcactgagcaattatagcatctaaaactgaaagaggccgggcgtggtggctcacacctgcagtcccagcactttgggaggctgaggcatgcatatcacctgaggtcaggagttcgagaccagcctggccaacatggcgaaaccctgtctctactaaaaatataaaaattaactgggagtggtggcgcacgtctataatcccagctactctggagtctgaggcaggaggctctcttgaacccaggaggtggaggtggcagtgaggcgagatcgcaccactgtactctagcctgggagacagagtgacactctgtttcaaacaaaacaaagcaaaacaaaacaaaaaacctgaaagaatttcttttttttcttttttctttttttgagatggagttttgctcttgttgttcaggctggagtgcaatgatgygatctcggctcactgcaacctccgcttcctgggttcaagtgattctcctacctcagcctcccaagtagctgggattacgggcatgtgcccccatacctggctaatttttttgtatttttagtagagatggggtttctccatgttggccaggctggtctcgaactcctgacctcaggtgatccacccaccttgacctcccaaagtgctgggattacaggtgtgaaccaccgcacctggcctaagaatttcttgatgaccgaatccagccaaacaaagaatggatgccatggtaagaggattggtagttagccataaacccatctttttttttttttttttaaaagagacaaagtctctaaactcctgggttcaagtgatcctcctgcctcagtcttctgagtagctcagattacaggcgcatggcattgtgcctgacaaattttttatttttgtagagacagagttgctatattkcctggactggtctcaaactcccagcatcaagcgatcctcctgccttggccccctaaagtgatgggaaacgtgtgagccactacatccggcaaccagggcacaggaaaattaagaaaaacattgagtatggaatattctcttttagcaagaaatcagactgctttaaaattctttaaarttcgaatgataaagtatagttatttaaatgtgttttgtaattttaatttgttttaaagatgtttaaagatggtgttacgagatgacaaaagtcagtaaaatggggaactttacaaagtctgcaagcctacagagtttttttttttttaaaagacaaatgagtctggctctgtcacccagactgttgtgttgtgcagtggcgtgatcttgactcactgcaacctctgcctgggttcaagcgattctcctgcctcagtttcccgagtagctgggactacatgcgcgcaccaccacgcccgcctaacatttgtatttttttgtagagacgggctttcaccttgttggtcaggctggtctcgaactcctgacctcaagtgatgcacttactcggcctcccaaagtcttgggattacaggcgtgagccacggcatcttgccctacaaagatttctttatgtgaaaatttgctgttaggtttttttttttttataccacagtttatttatctatttttatcagctgatgggtgtttggatcatttttactttttgacaattatgaataattctgctgtgaatattcgtgtacaagtttttgtttgtacgtatattttcctttctgttagttagatacctaggagtggaattgctgggtcatgtggtaactctattttatttaactatttgagaaactaccagatcgttttcaaagtataccattctactggtgttaattttaaaaggcaaatacattaatttaaattggagatttcatgcttagttctaccagaactcctaatattaaattgtacttagcaaagattttcgtagtttatttaaatttctgagattttatacattaaattatatatttatttatggctgagtagatttgttcttctaaaaaggattggcaggctgaaatgggaagtagtctgatttctagatagaaaaagagcattccatactcattgttttctgagttgtcctgttccttggtaccttagtttcttctccagtactgggtatggtatgcctcaccttctggctttgataaatctcagaggcagagttgctggaaatgaaatgtaatacttgaaaattatgcttttgtaggttatgttctagctgagggggcaactgagggcagaagtccagctaaggcattacttgggtagattacctctggccttagtggaggatgaatcttttgattataatagctttgtagtaagctttaaaaggtgaagtgtgagttttccaactttgttcttttccaagattgtttggctgtttgtaatcctttgagattccatatgaattttctgatgagtttttctatttctgcaaaaaagccaatggcatttgatagagattacattgaatccacaggttgctttgtgtagtattgtcatttaatgacattatcttccaacatatgaatttgagatttcttactatgtattaagtcttttatttcttcgagcaatgttttgtggttttcagtgtttaaagtcataagcctccttggtcatatttattcctagctatgttcttttgggtgctcttataaatgtattgctttttttttttgagatggagtttcgctcttgttgcccctgcaggagtataatggcatgatctcgggtcacctcaacgtctgcctcctgggttcaagcgattcttccgcctcagcctcccgagtagctgggatwgcaggcgwgcaccaccatgtctgactaattttgtattttttagtagagatgggtttttctccatgttggtcaggctggtctcgaactcctgacctcagatgatccacacgccccggcctcccaaastgctgggatgacaggtgtgagccaccgcacccagcataaatgtattgttttttaagtttcatgtttggattgtttaatgctagtgtatagaatacaactkagttttgtgtgttgattttgtatcctccaacttcgatgtatttatttgttagctctaatagttttttttttgccaattctttagggtgccacatatggaatcatgttgtcttgaataaaaatgcttatttctttttaaatttggataccttttatttctttttctttcctagtgctctgaaagtaatttccaataccatattgaatataaatggtgaatgcagtcatctttgtcttgttcctgaagtttcccattcctgaagttttttgtgatgtcactctgaattttaagataatggaattctatgtgttgaatgagatttaaaattttgaagtataataattttacagaatttagcattcaggccaggtgcggtggctcacacctgtaatctcagcactttgggaggctgaggcaggtggattgcttagctcaggagttcgagaccagcctaggcaatatagcaagacctcatctctacaaaaattagcctggcatggtggctcgcgcctgtaatcccagctaccggggaggctgaggcaggagaatcacttgaatccgggaggtggaggttgcagtgagccgagatggggcactccagtctgggcctcaaaaaagaaataaacaaacaaaaaaagaatttagcattcatttcattgtctgtcctcaatatgaaacccagcaattctgttttcaatgaaatattgctttgcaaagcattagtttacaggttggccatgagatacaatatcacctctgtaaacacctggtagaaaatgaaaagtcaacttaatgagcactcacgagcaggactcaacaatacatcctgtaaagaaatgaaagattctgatcttcaagtcatgtatttagggaagctagacagaatacatgtttttggggccaggatgatgttttagaagcaatgttggatttctcctcaagagacttgtctttaagactgaatggtacctcataagtgaagtcatttctctttctwtgtagcaatagctgggagatttttatttcttgcttgtttttattattggttgaaaaatggtggctcttctggtttatattatcccaaatttaattattatggcattttaacatttaaaaatattagtttatagatattcttcagcaactaaactttctgcaaatgttctgttttgtctttcacttctagattagtttttaatcctccccccaaaccttttttttttgttttaagacggagtctcacattgttgcccaggctggagtgcagtggcatgatctcagctcactgcaacctccacctcccaggttcaagcaattctcctgcctcagcctcccgagtagctgggattacaggcgcccactgccacgcccagctaattcaaaccttttttaaaaattagactagaagtttaatggtactatagtgaggtatatattctttgggggtgggaacagaaggggtacggattcactttgaatgtaagcatgactttttcatttgttatttcaaagtctaaccagggatgttaccagggagttgtacatcacttacaaattttcaagtgtttattttctttgtatgtattaggcctcaagaaaggagaactagttatgaaccgtttcatccaggcccatccccagtggatcatgattcactggaatcgaagcgaccacgtctggaacaggtttctgattctcattttcagcgtgtcagtgctgcggttttgcctttagtgcacccgctgccagaagggctgagggcttctgcagatgctaagaaggtaaatatttgttctcttaccctgtagagttgtaggtttgtaatgtttatttagttatactcatgcatagcacctcaaagaaagtccagttacaccagtctctaaaggttagtggtatgggaaagtaaaaattttgttaaacaaaactagaaaccacagatgagtgctccagactgctaaagtgagcacttttgccttttcggtaagtgaaaacagtccaagaagactgctcccataaagaagaatttctattaaataatgctcaagcatttttttactggcttgctggctataaaatgtggtcagaggtactcaagactactagttttgttaaatcttaattaaattttaaacaagtcccttaaatttagtagcagtttattaactgctatatgggagaaaacacatccaggtaaggttgaattgtgcatataagttctatacaaaagaaaattgttcytaatttatgtaagtaatacatacttatagaaaactgggaaaataaagaggaaaaaagttacctgtaatcctgtaacttggagataacgaccctcccccagttttattgtggaataaaaattgtgtatatttatggtgatatttatatttatgatgatatttatacagtgtgatattttgatgtatgtatacattgggaaacacatcaagctaattaacatattcatcacctcacatagtttttttttggtggtaagaacatttaaaatccactcgtagcaatttttaaatatataatacatattattagctatagttgccatgctgtacaaagataagttttaatatttagctatattttgtgacatttcaaacaatgcgagttctattaagaactttccccatgcacttatttttatttacccatcttttgtgaaatgtttgctcatgtagtatgtccttgttttattgctatgtttacctttttctttttttttttttttgagatggagtctcgctctgtaccccaggctggagtgcagtggcgcgatcttggctcactgcaatctccgcctcccgggtcctggttcaagcaattttcctgcttcagcctcccgagtagctgggattacagggacgcaccaccatgcccagctaatttttgtatttttagtagagacagggtttcaccgtgttggccaggctggtctcttgaactcctgacctcgtgatctgcccacctcggcctcccaaagtgctgggattacaggcatgagccactgtgccsggcctatgtttacctttttcaactctgctttgcttattattaattctgcagattaggaagtgcctgacacttagtagatacagaataaatatttgtcatagaaagaataaattaattttaaaaactcttaacagtaaagtgttaacctttttaccaacatacgctaatatttttcccagtgtctttttgtttcagtttttctttttttaaagcatactgaagtttaaaatgtttttactgccatcaaatcttttttctgtgtttattaacctttatgcctaattgccctttcttccctgataccagataaataagtacccacacattttctttgagttttatgcaatgaagagtaatttaaaagatagtaaatgtatctacaatttattttcaaatagttcagccaaaatgaagttatacacacacacacacacacacacacacacacmcacacagaaagcaaatatgttaaaatgttaactactggtgaatctagatgaaggataaatgagtgtccattatattgttccttcaacttttaagtaaatttgaaatttttcaaaatagtaagttggatggggaaaaattctttgccgtaagctagaaattagctaagcttctaggtgttttgtgacccaccttatcatgtgaatcatctttatcatacagtagtctgtggggtttataagaaatgttctgctgcattaaaaaaaagaaatttaaaaatatagtgaataaaggtcatcttccatggctgaatacattaccacaaatgtaatttgtaactatagaattttgttttttagcagaaaagtgtcttaaaaactcattcattaaaatgggacgtgttgtgttgtagtgtgacccatttccatgttatagttgagaaactgggtgttcagaaaaattaagtgacctaggtagtaactcctgagttgaaattaacccaggaccccgactctagtcctgctttttttcccctaaagtgtaaaccatgactacttctactaactaatacttctccttccatctccctctccccattctctcccaactgcccacctccagaagtaaggatttaaaaagaactaacatttgttagattttttgttaaatgttaagcctaggtatatcatttatagaagagttaaataagcttgaaagaaaaaattacctacagtttaccatttaaaagttattaacattttcatgttgattcttccctatttgtatgtgtattattttaattttaattttatttaattttatgggttttttgttgttgttgttgtttttttgctgctccttgtggaacagggctaacccataaggcagtgtgtccagagtcagcccgtatgaatattttaatgtgccccctttgtacattctgtttaacttacttttgcttaaatacgtgcttagcttctttttgtgccaataggtttacaactgtattgttagtggctacttagtattccacatatgcataaataaagttcattgattaaataaaattatttaatcaattgtcatacatttaggttacctgtttgttcagaagtacggtgttgtgacatgcattgtttttttttttttttgagacggagtctcactttgttgcccaggctggagtgcagtggtgtgatcttggctcactgcaacctatacctcccagcaattctcctgcctcagcctcccgagtagctgggactacaggcgcacgccaccaagttcagctaatttttgtatttttagtggagacgaggtttcaccatgttggccaggctggtctcgaactcctgacctcaggtgatctgcccgctttggcctcccaatatgctgggattataggcgtgagccactgcagctggcccrtacattatttaggttgatttttttgtatacattcttacttatttccttaaggtagatttcttttagtataattaattgtagaccaggttgatttttaaggtacggtgggtatttccagattgtcytgcaaaagagtagggccagttcttaactcctgacagcagtgtataaaggtacccacttcttggctgggcgcggtggctcacgcctgtaatcccagcactttgggaggccgaggcgggcggatcaccagaggtcaggagttcgagaccaacctgcccagcatggtgaaaccccatctctactaaaaatacaaaaattatctggacgtggtggcaggcgcctgtaatcccagctactcgggaggctgaggcaagagaatcgcttgaacctgggaggcggtggttgcagtgagctgagattgtgccattgcactccagcctgggggacaagagtgagacttcatctcaaaaaataaaaataaataaaggtatccacttcttttttatccttgctgacaccacatgtctattgtttaacaaaaagattgttaatttgatgaatgattgtttttaacttacacttattatttgttagtaaaacttaactttttttatttgtttattggttatttttcctgttttgtaaattgttttttcgtatatgttgtccatttttctgttggtttattttacattgagttgttagagtgcatgttttgcaaatggttttcctatttaatcgtttgcctttttaatttgttattactgttttgataagcagaagattgtgtttttgtgtgtgtggttttttttttttttttttttgagatggagtcttcttctatcacccaggttggagtgcagtggtgccatctatgctcactgcaacctccgcctcccgggttcaagccattctcctgcctcagcctcccaagtagctgggattacaggctcgcaccaccacacctggctgatttttgtagttttagtagagatggggttttaccatgttggccaggctggtctcgaactcctgacctctagtgatctgcccgcctcggcctcccaaagtgctgggattacaggtgtgagccatcgtgcccagtggaagatagttttttattttatccatcaatctttcttttttaaaaactaatgtcttttatatcttttgcttttggccttcctgaacccaagataatgtgaatcctttattattatttttttttaacttgaggctttttgtgatttgctaataagcctcttataaatgtttgctattacttggcttttttttttgatgtaagatatgaggtaagaatctaattctttttcttcaggattggtatctggctgtttcaagccaagattgtaaggttcatgaaggcagatatcttgtctgttttgatcttattcctgttatgtaagtaggcacttgaggatgtggtttcttgttaaatatttaatatttagaaaggaagtcagtggaaaatattcatttgtaatattaattctttgggcatgcatcagaatcacctgaggagcacttttgaagtctgctgaatcaaaatataatctcttttgctattatatatgtttctgtaacacaaatttgctcatatgcatatagtgggagaatgatattaatgtatcatgaaagtcctggtggttcaccaaagatctttctttatgcgttaacatttctaagttctcaggagtacgctgtctcataatgaaagagaaaggcttcacaacacatgaagacttaaaaatatgtaaacattctgcatttagttttcatttagtgcgagtagtagctggtttagtgaatttaagaactgttgtgcttttcacagtgttagtgaagattcgagcattgaaaagacaatgtgaagacaaattttcttgtatttttttttttaatgttgataaaggagggagggggagaaaaaaaggttgataaagatggttatacaccaaatctgatttttttttctttttttttgagatggagtctygctctgtcacccatgctggaatgcagtagtgcaatctcagctcactgcaacctctgcctcctgggttcaagccattttcctgcctcagcctcccgagtaactgggactacaggtgcccgccaccacgcccagctaatttttgtattttttagtagagacrgggtttcaccatgttggttaggctggtctggaactcctgaccttgtgatctgcctgygtcagcatcccaaagtactgggattacaggcatgagccactgtgcctggccactgatattttatttagatgaaacatactggtttattttggaagccaatgacctcaaggatttayatcttaagagaggaatcataaactctagggcttaaagctgccaaagattgactgtatgccagatgcaaaggatactggagctttaattctattaagtctattagagttgttattgcttttattggtgttttccttacagaattgtacaggttttagggtatagccataatcttattttcccagaaggcctcttagattcagcgcatactattagagaatatgaggcttttcatcagtgtatattagctgaaatatctgtactaaggtgttttgaagcaactgtccagttatctcttgtatgcattcttgactcagaactattgacttttcacagttccttaatcattatttaatacattttagggttctgtaatcctgtgaactaccctcattgtaggtttctcatagtctaagtaaaattagtactctaaaatttatctgttttataatattgcttatgtctttacagcagactggaaattaatagggtgtgtgtggatgtgtgttggagggtagtggattttgggtgaagcggctttcattctgctacagctctgctgatttggaggcacaatgggatgtttttggctaaggaaatgttatgtatgctgtagtgtgggctttatgaaagtaggcctagagatagtagcaactgaagttcctaggtcacttctctgacttgtgtacctcagttttggtttggaaagcctaaaaacttttgataggaacacttggccatgttatagttgttaagttgggtggacacacaggttttacctggaataatactatttcccagccagttgttcagaccatttgaagagccgttgcaaggaaatggctgagaagttggtatcttcctttgtcatgattgcattatttacctataaattctctataatttcagtattgttatactagaggctgatcaacactaactcacctcactttgtatagcttttagggtcttcaaaatagtacatggtatatctaaactataaaagtgaggtgagaatttgcatgtatgtgaatatgaaagttactactaaaagtttcattagacaaatagtacacatggctctgctgtggtttaaaactgactttttcatttaaggcaatctggactctattagtgagaaataaattgtttttcttggttttattctctaaaggatccagcattcggaggcaaacatgaagctccatcctctccaatttcggggcaaccatgtggagatgatcaaaatgcttcaccttcaaaactctcaaasgaagagttaatacaragtatggatcgtgtagatcgagaaattgcaaaagtagaacagcagatccttaaactgaaaaagaaacaagtaaatgtctttgcttaatatattctaagaatgtatgtttgtctccctacagtagatatttttgagttttccatattttgaaactttacataaaaggaatcatgccttatatattcggacttgctgtttttttgctactgttgtggttttcttacattcattcattttccttgctgcactgtctgattatatgattgtagagagtgaaatttgtttgtccattctatttttgatttttttttttctattccatacaatggtgctggtttttggttcacatgtagagattttctagggcatgtgcccaggaatggcagtgcttggcccaagattatgtacagtgaactatttaatagatgatactaaatttgctaagaagtaacaccattttacattcctactggcagcttatgtgagtaccggtttgtgcacatttttgcctttgcttsatatcgttttttcagttggatatgaaatagtcttctctgtggtttggaaggaggctgagcttattttcatttgtttatgggttatttgggttccttatgtgcattgttcaagcgttttgtctatagtctcctattttgtcattgaaatttttaggatttcctgaagtcccttgtcagatatgtgtatagaagatttgcctagtttttggcctgtcacttcacttttagcccagtattcactctaagtgtagactaagtgcattttagtgcattttttttttttttttccagatttggagtctcactctgtcaccgaggctggagtgcagtggtgcgatcttggctcactgmaacctctgtctcccaggttcaagtgattctcctgcaacagcctcccragtagctgggactataggcactttaagtgcttttaatgtattcataaagttgtacagctatcaccactctctaattctagaacatttttatcatttcaaaaagaaaytccatacctactagcagttactccccatttccccttttccccaacccctggcagccactagtctattctctgtctctatggactagcatrtgccaaatatcagaaaaaacagaatcatatgtgaccttttgtgtttggcttcatttatttagcatgttgtcctgattcatccatgtcgtatcttgtgtcagcacttcattactttatatgcctgaatcccattgtgtgagtttactatgttttgtttatccattcattagttgatggatatttgagttgtgttcattttttgactatgattagtgatgtattgtgatgagattcatgtactcgtttttgtgtggtcgtatttttacaattttctttatatatctaggagtgggcatatggtaaatctatgtttaaatttttgaaaaacttcaaaactgttttccaaagtctctgtaccattttatattcttaccagcagtatatggaggttccattttttcctacctccttgccaacatctgttattttccttttttawaaaaatatagccatccttggagatgtgaagtggtatctagttgtagttttcatttgcatatccttaatgactaatgatgttgagcatcttttcatgtgctgattggccatttgtatatctttttagataaatgttcatttagattgtttgctcattatttaattcggttgtctttttgttattctaagaattctttatatattctggacattagttcctcatcagatgtatgacttaatagatattttctctcattctgtgggttcttttcactttcctggtagtatcctttgatgtataaaagttttgaattttgttgaagtccagtttgttttttccttttgtcactcttacatttggtgttttatctaagacccattgcctaattcgcggtcacagatttatacctgtgttttcttctacacattttatagttttacctcttatatttgagtctttgatcctgatagtattttttttggtgaacagaatttgtttaggttttatatgaaaaccccctggggttattaaggtagttttactatattattttttagaagttttatagttttgcttctcatcttattcttaatccactggaaactacatgttgtatagtcagtgttcatttatgtttacccacatatttgtcttcttatgtgctcaccatttcttctcgcaactcaagtcttccatcgaagggaacacccttctactgaagaacatctcttagaatttcctttagtgaaggtctcttagttrgcaaattcagtatttgtttggtttttatgacttaaatattgtcttatatttggcctgtttattaaaagatatatttattaatttggtatgtgattattttttcttagtacattgtcttcttgcttccatttttaagacattagctcttggtctaaatccgtattctttcatggatagtgtgaattttctctcaggttgttttcagtatattcttttcttcggggttctgttatttttatgatgatacatttaggtgttttttttttttccttttaaatctgtccaacctgatattcctgaatatgaagggtggagtttttcatcactttgggaaaattccaagccattatcttttttagaaaacctttctaacagtttcttgttctacttatgaaattcctgttagttgtaacatcttatcactcttgtcttccgygtctcttgtttctctttcttatttttaacttctttgggcttcattctgagcaatttcttcagcctgtcttccagtttacattttccttttcaattatatgtaatctgctgtcaaatctgtcttcaatttcaacaaytatgtttttattgctggaatttctgtttggctccttctcaaatctgcctggtcattaaaaaaaattttttttttgctttcattgagttgtattaaatttttattatatgcccaacaattctaattaagtctttactggtttgatttcgctgagtctcttttcttttctttcttttgtcttttattttctttacttgtacaatggtaataatctagtaataacaccaactaaatcacatgattgttttatgaattgagataatgaatatattgcataatatctggtacatagtaaatgtacatgcaatccactataataattagaaataatgaaatataatgtatgattattatgaaatgtaccagagccacacattttattgagagatataaaagacaactagagaaaacaaagaaatatgccatagctggatggaaacagtgataataatgttctgtgttcatcttggactaaatcatgtctcacacaatttcaataaaatttcaattaaatttatttttaaaacatggcaaatacattgtaaagttaatgtaaaagaacaaacagggccaggctcggtggctcaacctgtaatcccagcactttgggaggccgaggcaggccagatcacctgaggtcaggagttccagaccagcctggccaacatggcaaaaccccacctctactaaaaatacaaaaaattagctgagtgtggtggcgggtgcctgtaatcccagctactctacttgggagactgaggyaggagaatcacctgaacccgggaggcagaggttgcagtgagctgagattgtgccactgcactccagcctgggcaaaaagagtgagactccatctcaaaaacaaaaacaaaaacaaaaacaggtgagggagtgtgtgtgtgtgtgtgtgtgtgtgtgtgtgtctgtgtgtgtktgcttttagcctttgaattataatggttttgtcccagggctatttgggtactaagaacaaagtgtgatttgtttattccttaacaaggattctaaaagaaggccctctaagcaggaaagaaagggaatcattgaagaaccctttaccataaaaatgatctcagaatttcaaatatctttcttttgcttgtacagataacagactgcaagagtacttataattccaaagtggaagtgttccttacagtttagactctcctggtggctatttattattatttttttaaatttttttcgaattgggcagcctcctgagccagaataggttcagaaactccctcttggtagatttttatgctttcatttgggcatggtctgatttacagtactgggagctttgactgtcactcttatttatttagtttttttgagatggagtctccccctgtcgcccaggctggagtgcaatggtgcgatcttggctcactgcaacctccacctcctgggttcaagcgattcttctgcctcggcctcctgagtagctggggttacaggcttgcgccactacaccgagctaattttttgtatctttaataaagcaggaatttcaccatgttggctaggctggtcttgaactcctgggctcaagtgatctaccgtcttggcctcccaaagtgctgggattacaggtgtgagccattgcacccggcctatcagtcttatttagtagtatagataatttttgcctatagactatactagacttaaccttaatttgtctttacctaatttttcttttatcatcttaggtagtggacttatgctaaatttattcgtgtggatatttttaaagcattaactaggtgtcaggcactggtttaggtgttgaaaaaaagcagcggacaaagcagacaagtccctgcttgcttcactagtaatactcggtaatatttacaatttataattgtaatatgctttatatatacgttaagtcatttagtcctttcaaaaagctgtatgataggtagtattattatccctaccttatttatgagtagtttaggtgtttgcttaatattgagttaagggagccaggcgtggtggctcacagcggtaatcccggcactttgagaggccaaggcaggtggatcacctgaggtcaggagttcgagaccagcctgaccaacatggtgaatccctgtctctactaaaaaaatacagaaattagccgggcatggtggtggccgcctgtaatcccagctactcaggaggctgaggcaggagaatcgcttgaaccctggaagcggaggttgcagtgagcgccattgcactccagccttggtgacagagcaagactccatctcaaaaaaaaaaaaaaagattgacctaaggacccagaaaggttcctaggatcacaccacctgtaaagggtgaccctgaggctcaaacccaggcacggtaatacagttagctttttctttatacttgcacacaccaatagtctatatttttgtaattttgttgattgccctttgaccggagcactgtaacacatgaagattgggtgttgagggtggcatggtgccatgctgagttaagggttaacccttgatctcctttctaccatattctgcccagcaaatattaatgtatactgtgtatctataacatataagagtgttttttcagtgctgtcaaaggtcattgtgatagaggtatgtagagtaccttcattaaatttaacttctcttattattttgctttaagtttgtcagaattaaaatcttttttttttttttttttttttgagatagagttttgctcttgttgcccaggctggagtgcagtggcgttatctcgactcactgcaacctccacctcccgggttcaagtgattctcctgcctcagccttcttagtagctgggattacaggcatgcgccaccatgcccagctaattttgtatttttagtagagatggggtttctccatgttagtcaggctggtctcgaactcccgacctcaggtgatccacctgcctaggcctcccaaagtgctgggattacaggcatgagccactgcacccggcccagaattaaaatcttaaaggatgcttcctcttagtttttttttttaaactctatctaatgaaaatttgtgttgtttggttatgaaataaatctgattaattctctttgagctcttggtccatgagaccttcatggattaattggttaccctacagaatctgcaagcaaagcttagtagcctgtgttatctccagtggttaatcactgctgggtgtggtgtgcagcacatgcttgactctttctttctggatctcttagcaacagcttgaagaagaggcagctaaacctcctgagcctgagaagcccgtgtcccctcctcctgtggagcagaaacaccgcagtattgtccaaattatttatgatgagaatcgggtaagctcataccatctctggcagcacaggcctttaaccccacttgacgatgcccttttcagttttgaatgtatcctggtataattttaactttattaaaacctgatttctcttacaattttgaatgttcataaactttggctgactgaagcttggtgtttttttccttatcaattgaaagaaagtttacagttgtgccttaaattatgtaatatttcattttacattatgtattttataaatatttaatcagtgaaattttgtcagctgagtctcctattatatgaattctggcaaggaagcttggtagcatataatacaaaacaaccatcctgcagtttttcacttaataaatgatgtttaatgctgactactgataacatttcagtaaagataggtcattgcatgtggaaatgaactttcttatcagcattagttcacagtcgatagttgggctatggtttgaacttcagttaaaaagttcaaggcggggcatggtggctcatgcccataatcccagtactttgggaggccgaggcgggtagatcacttgaggtcaggagttcgagaccagcctggccaacatggagaaaccctgtctctactaaaaatgcaaaaattagccaggcgtggtggcgmatgcctgtagtcccagctactcgagaggctgaggcaggagaatcggttgaacctgggaggtagaggttgtagtgagccgagattgagccacttcagtccagtctagacaacagaccaaaactcaagtctcaaaaaaaaaaaaaatcaaagttcaaggtagattttgacctttaggtagactttgcttttttaggtttactctcatactcttaattaaaaatattcatggattcagaaacaccaggcatgaattctatgaatcatttttgtagtatcaaagttagttttggccagaatatggcccaggaactagcagttagagggaaactgattttacctcaacatgaagaaagtgtctgtttaacagtgggcttccagaagtccacagtgcaaaaaatgataatatgctttatactgtgggatagaatagggtttttagctaaaggcatgatcatcaggtaaaatttgggattgttgttttgattgatttgatttgtagtgagtggattcatctgtcagtctatcttacacatacagtctgtaactttatagtagtccacagccgaaaggaaattgaccttaaataaagcaattgtgaattaataaatatttatgcacatgtactcctgaatttaaaagttgaataaataaataaataaatacacatttataggaatgatcttggatttagatatacatgtatcaagtagataactgagagtcatcagaaatatacttacggtaatggtaagtgttatgggcaggtaaaaatatgggcaattaatattattttcttggctgggttcaatattagtccaatttattgtatggccacagcagtctacatgaagataaatccagtaaaggaagggaaggaggtgaccatgcctaagatgggggctgtgttccaggatatacagttgctcccttgtttaagaaaagcccaaaataatggggttttatgtgaaatctctgatttgtttttttaaaaaaaaaaagtcctctgcatagctgcaaaacacttttgtgggctcatgggctccatggccagtttgtgactgtgacctcagggataaaataaataggaattagtggtgatacaaatggagatttgatagtttttttttttaagttttataaaatgtttcttttttagtatgaattatttttcaaataaattggatttggtaataattattaatggatttattaatgagccttgtcttacaatattagtgaattctgtggttgcctcactgggatttgaggactgaatactattgaacaagatctgatctaatagagaatttaattggtgtttaatttttatatatagatgtttttattaattagtatagtgtttcttggtgcacattagcaaaacttgaaaactccttttgcacctcttctttctgtttgaacatttccatatttggtttgttgtttattttatgaagaaaaccaaatctgaaacctgtttcagtgttaaacttgccttcctacactgaagattgtttctaacccacaacaactatagaagtcatctttcttttccttttttcttttttctttcatttttcttctccaccctctcctttcttttctccccctcctcctccctctcctttccttcttttcttttcttttttttttcgctttccttcttttcttttcttttttttttcgagacagagttttgcttcgtccccgaggttggagtgctgtggcgcaatctcagctcactgcaacctccacctcccaggttcaagcaattctcctgcctcagcctcccaagtaactgggattacaggtgtgagccaccacagtcagctaatttttgtatttttagtagagatggggttttaccgtgttggccaggctggtcttgaactcctgggctcaagtcatctacccatcttggcctcccaaagtgttgggattacaggcgtcagccactgcaccaggcctcttttcttttattccttcttttctttctaacagacagtgtctcattatgttgcccaggtcttgaactgctggcttcaggcgatcctcctgcctcagtctcccaaagtattgagattacacgtgtgagcccccatgcctggcctcatcttttctttcttatgtatgttttatacatgtacctgtgcagtttcagaattgtaacagggagctcccggaggggaggaggagagcacaatgggcctagaacccaggctttctgatatgtactccccaaggctttttctgccccagtatgctgccttttgaaaggccctccctgcctcttttaacattttttaatgaatgagcttatctgtttcagcaccataggcaaggaggaatggggtaattacagaagtacacctccctcttatttcttgggtggcagcagttacactagttggaattaagccaagtgtggcttaagagatcgagggaccatttcttttatttagaaaggtagtgggaggaaaaaaactgccccaacgtgttaattttaaagttgacttcctgagaaaagttgacttgcatcatagttaaatttcagtctaagtttgtttagtctctaaacagactatttttaacagttcaatttgattttaccctatcagttgtaagttccaaaaatatttgtaaatattctaatttcagaagaataatacgtatagaaaagtgattattgttgggctctactagagaaatttgcagaatatctttgtgggtgtgtgtgtgtgtgtgtgtgtattttttttttttttttttgagacacagtcttgttctgttgcccaggctggagtgcagtggcacgatcttggctcactgcaacctccacctcccgggttcaagtgattctcccgcctcagcctcccaagtagctgggattataggcacatgccaccatgcctggctaatttttgcatttttagtagagatggggtttcaccatgttagcaggctggtcttgaactcctggactcaagtgatccacctacctaggcctcccaaagtgttgatattacaggcgtgagccaccatgacctgccttgtttatattttgacgggttgatttgcaagagaatgtgacttcagaagaaagaaaagggtgatggtaggaagtatattctgtgccagcacctctggtcatctaggccagcatcctaggaattatccagttctctctctttgccacttcatgtatgttgaggtaatcagtgaagagcgttagtcccacctcctaaatattggtctggtcttacgcttctttcctctacctttatcattagcttaatttgagccttcatctcccacatagttattgagtctcacgcttcagtcctttctttctaacccatctttcatattttcgtcccatttaatgattctccaaatagaacctttttatgatttcccactttatacagaatagccgaagcctttattgatgtttacatgcttacccgcctggcccttgccccatactcttttcttagtaayatcccaccagaagaggttttggatgttcccttgttagcaatatctttaccccgctatgttgcccctgctgtcaggtggccccgtgttttgtcttttctgccaagcacactgttacctcaagccccagttcaagtatcattttctctaggaagactttcaagacccctcatcttcctgtggtgggaaggcttatcttattcattattttcttagtgtctagtgagtgcttggcacatagaacataccgaacatatgttgaagaattatttacttctatctgtagacttagaatacaaattgtattacgaacatatgagggtcttaagttaaaatttttgttgccaaaatattgatagattaatcttagcaagggaagatttttgctaggtaacactttggtctggattattttacttttgaaaatagcaactgggtgctgtggstcacacctgtaatcccagagctttgggagactgagatgggggcattatttgagtccaggaagttgaggctgcagtgagctatgatcgtgccattgtgtcccagcctgggcgacagagtgagaccctgtctcaaataaaaaaaaaaaaaaaaaaaaaaaaaggaaatagcatattacaaatacatataattcagcattttttaactactgagcactttgaataattcaaattagcggttttctttgttgttcagctattactaaggattccttgtaactagaaaattagctcattaacagcttttcttcaaagagatcaatgttgctcaccatagtaaagagtggccattttatggtattttattgctttaagtttctattaaagatgatatgagttaaagtatgtagaatgtttgggggatttatttctaatagtgaattttcattccctctctccagttttttaatataattgtttgcttttttaaaacttacctattattcaggcattgctttcaatacaaatgttaagttttgactgaatttggtgaggaaagctatgacaatacaatttcagagttttctatcattgtaactacaaattaagaaaaaataaaaaataactggagcatatttcagcctgtcatatagaagaaggatatttggaaataaggataagttcatctatagattagtcttagataaatatttctaaataattattttgcacttagataatgtaatttttaattatatgatacaacaatgtctttatctctagaaaaaagcagaagaagctcataaaatttttgaaggtcttggcccaaaagttgaactggtaagtaaattttttcatttccagtgatttttttttttaatttttggtggtagtttttcttgggataagatggaatatgatccatttattttgggataagagagatgtagctgagcagagatgtagcttgagatgaagtttaaagtaatgatgagtgaacttggttacctttgcagacctttgcagaaacatcaccctgagcttgtttttrcttgagcagctatttaatccttccaggcagaatgagaattaagaacagaattagaaagctctttgaatgttactgttaaaatagtgacaatggttaatactccctagtattagggagtattaatactttgaaattaaaaatctgtgcataaatatacttatgggaaacaatggatttataaactgtattatgggagtgacaggagatgggattaacagttactcagggaatctaaaagttaggaggttttgccacaatgagataccatctcataccagttagaatggcaatcattaaaaagtcaggaaacaacaggtgctggagaggatgtggagaaataggaatgcttttacactgttggtgggagtgtaaactagttcaaccattgtggaagacagtgtggcaattcctcaaggatctagaactagaaataccatttgacccagcgatcccattactggatatatacccaaatgattataaatcatgctactgtaaagacacatgcacacgtatgtttgttgcggcactattcacaatagcaaagactgggaaccaacccaaatgtccatcaatgatagactggattaagaaaatgtggcacatatacaccatggaatactatgcagccataaaaaaggatgagttcatgtyctttgtagggacatggatgaagctggaaaccatcattctgagcaaactgtcgcaaggacagaaaaccaaacactgcatgttcccactcatagatgggaattgaacaatgagaacacttgkacacagggyggggaacatcacacaccggggcctgtcagggggtggggcatgggggagggatagcattaggagaaatacgtaatgtaagtgatgagttaattggtgcagcaaaccaacacagcacatgtatacatatgtaacaaacctgcacgttgtgcacgtgtaccctagaacttaaagtataatttaaaaaaataagtaaataaaaaaataaaagtttggaggttttggtagggcatgttattgtgtagatccattagtactttacctgtgcttacattaaaattatgtttctttgtctcttcatagacatatgtacaacattttatacataaatatttgatttcttttatagccactgtataaccagccatcagataccaaggtgtaccatgagaacatcaagacgtaagtattgatcatctttggasttcttcaattaaagaccgtatattctataaagagatcatttttgttatctgctgacattattataatatattgtaggtatgttttagatttgtgtaatttgctgtcgttttattatatgttatcttcctctggcttcttgggggttggggtaacagctttgagtttccgaggccaaaaaatgaaataaattattgcataaaactagctggttttataatctgctagtaaaaaaggtggatacttaacattgaaatggcttaccttgaggcttgaattttttgcctcctgttttgtctttttttcagtggagtacctgcaaggcgcatgatgaagtaagataatgaagctttttcatttaagactagtgatgacaccgtcccccaccaagccacatctgccattgcaaagtagaagtgccacggatcattttatcattattcaaaatcctattctagggaaatcccttccatgactcttgctaatgacggtatttgtagacccttctgccatttaatgtcctggtgccttggaagcgctcagtcaccttgtgggtgacgaggctgctccagaatgtagtttgcttagccttgctcatcctagtaccaggcctttatggatgcagattttggaataagaaaataagtgaaaagaaaatctaatttcttgatctgattgaagtaagagaggaagctagatagatatcttttttttwwaaaaaaaaattatactttaagagaattttaggtgcattattcttagtttgtgacaaaaatgtgatatttctactttatatgttttattaagtataagcagaacataattatttactagtatggttactaatgagcacattgctatttattttatatatatatatttatttttttctttttaaaaatttcttaactgagagtatgtgcaattattgactactttgcagaactggtggcaaatataatttgcatggtagtatgcatgaaaacaattgaatttgaataattttaacttttgttaagtaagtggttcataataaaagttatgtatttgtcaatttttctgtgagatgctactatgatcttgagaacccttagaagtaagttagtcaaaactcacatataatataccttgctttggaactgcttagctgttttaacatttttaaagagtagaagagcagataagatctagttggctacttaatgacttttttttttttttcccacaaagcctcagtgttatgtttgtgttgtgtcctgtttctcctgatacagtctggagagcagctctgtccgatttatttcatgtcatctacattgcctatttagtgctcagcacactatcctagatggactactgactggctgacttcatttaaattcctaggaaacatttaagattgtatttgttgattgtcatttgcttttgagtaacgtatacttaaaattatagcaaactgagtatatggtaatgcttccctgtacgacaccttttggaatatttcctcagctgcatgcatctgtatgagtcattcagtagctattctttcatcaccgtcatttgctttgtatgaaatagcaaatgtacattttaataattcttttcatctcttggctactttttcatatagccagctcctgcttgtccatacttatttgagtggagccagtgtcactgttagtcctgagtggcagataatccaaaaaattacttctacttgccttggctttgtatttatatttgaataatcagcttgaaatcctttctggaagtaggtggggtataaatatttatacttgaacctgcatgtcattgtttttgaaggtcacaatgcttccaatttaaaaagcgattaagatatattagaaatcttcctgttttgacacattgccctccattacttcttagagtggattgtgtcattctgtgactgaagaaaatcttctgtttaaagcagaagtcacctatctctacatatgttggtatacattttcctcgtagaagggaggttagcacctgatgtagggaggtaactgtaaaaatgtttccttctcttctacctcccttctccaaagagtaagatgtttatgtcaccagagttgttaagaaggataagtaactgtaattttaatttgaaaatatttgccttataattggatgtgctaattgaaagttaactattttgtattaagtcttactgtagaatgggaggaactttagtcagttctaatttttgcaaaagttataaaatcttattttgcagggtaaaaaaattaggattaactttgtttacatcataaattcttaagtgatctttgcctattttccagtgtctctggaaaaaaagtgaatgcattattaaattgtgctttttcttaatgtcatgcaaccatatttttctcttctagaaaccaggtgatgaggaaaaaactcattttattttttaaaagaagaaatcatgcaagaaaacaaagggtgaggtcctatccttgttaactgaaatttatacagctttcccattcatgctcatttaggcattcactttcctactgttaatgagagtggtccttgactccatttgaggataagtgctgatttagaaagtaaccatatatatatatatatatatatatatatatgacttaaatctaattctagtaacattttgataccataccttacatttaatattatcaaattaatttcattggtcatctttctagaacattttcatttagtcaaaataaaacggtgagtagtttaaaagaatatgaaagataatttagtttcttaagcctcaaacagttgtaggtaagttgcagtcatgctgatgagacattactattctttcttttattagaaacagggtcagctagggttcagctttttcaaattcaaatggttttccatatttttttatgacttgcagtccaaaagttttgtggttatataattttcatgggaattaaattatagaaaatataatgccagtgattttattttcataatatgtttatactaattttacagatacactgttaatacatttaaactgaagtgtctgctaaataaatgctactctttaaatcgacatcaaaaatgaactttgtgcctaaagttaatgacctgacagtttgagttgtaaagctcaagagtcagcagctttatttggtggaaaacgtctaatgttctaatttgccagtctgatcagatactgtcttaaattactggtcttgagttgtttttttttttttttttttttttttttgccaagaacatataaatatcaagtaagaaattagctcatgtatttttttttcctttccaagtaattttgttgtaattctggtactcactaaataagttcactggtgatgcaaacactgtaaggtttgtattttcaccgatttgcttaaatatcacttggctgtgtactctgtcccatatattattctgcaaaggtgagcaagatagccatatggttttagtaattagggggagcctaaggtgatggaagtcagacaggtcagtcctagtattggatcacaccgtggtcatggactacggatgactgaggaggacacctaaggcagataggaattatgaggggacatttcaggggaaaaccaattctctgcaaacttgtatacgcagagggagtggcttaagtgaaggtctgggagccagagggagtgtagactgagctggcagtgtggtgagaaatgaggctgctgagggaagccagagccaggttgtatactgtcctggaggttgcataatgtttgggtttgcattttaagartttgcatttagcggggcaggtgcaatggctcacgcctgtaatcccagcactttggaaggccaaggagggcagatcacttgaggtcgggagtttgagacccgcctgaccaacatggagaaactccgtctctgctaaaaatacaaaattagccaggcgtggtggcgcatgcttgtaaactcagctactcaggaggctgaggcaggagaataacttgaacccgggaggcggaggttgcagtgagcgagatcgcgccactgcactccagcctgggcaacaagagtgaaacttggttccaaaaaaaaaagaatttgcatttagctacaacattaagaatgcatgggagctattgttttgatctaggtgagggatggtgttggcctggattataagggtagcagtagaaaggagaaaagatgaaggacacagaagacatataggagtaattgagaagtgggagtggggtgtggtgtggaatgtgagaaagataatattctgttctccaatgccactttcttaagatgaccatgttagcagtttttcatgaacccttcctcactttcctctgtccatgtgtcatcagatatgttgacagttctttgtccataatggagggttcgtctgtcttttcttctctatttagaaaatggtatcataattcacttacttctctaaaagcattaattctcaatttcacgtagttcactggatttctgtttttttgttttgttttgtttttgtctgttgcccaggttggagtgcagtggtgcgatctcggctcactgcaacctccacctcctgggttcaagcgattctcccgcctcagcctcccaagtagctgggactacaggtgcccaccaccacgcctggctaatttttgtatttttaatagagacggggtttcaccatattggccaggctggtctcaaactcctgaccttgtgatccacctgccttggcctcccaaagtgctgggattacaagtgtgagtcactgcgcccagcctggatttctttttatgataaagcacaaccaaccattttctgcctttttcatactgtcaaaatgtttgttatatagcattatttattatagcaaaaaatggcaatcaaccagaacctccaataatagatcggttaaagcgtgtgtgttttgtttcgcagattggaaggataacaacaaaatgttcatatggttgcctttgggtaattggtcagattatgaactatttacatgtttgtatttttaattttccatttttttgggacaacaatgacataatgttttaagcaaaataaaagtaactggtcagctactactagtagtaggtgtcaagtagtttataaatatgcatagtcttaatgttaactaaaaaatccagccaacctgtgctctatgtgttgatcttagtaggaaacagagctacctttcctctctcctctttgtgcttttcgttcacagttgagtcataagccaaatgtacttctgacttaaccttaagaagtagcatttattttaaagtattaggtttgtcagaatcagagtttagtttaattattattaatttgctacggatatttaataggaacaaaaaatctgccagcgttatgatcagctcatggaggcatgggagaaaaaagtggacagaatagaaaataatcctcggaggaaagctaaagaaagcaaaacaagggaatactatgaaaagcagtttccagaaattcgaaaacaaagagaacagcaagaaagatttcagcggtgagtagtttgatgtttaatgactgtgatatttttcttcaaatatttattgtttctttttttwaaaaatttttttagtatgtattgatcattcttgggtgtttctcggagagggggatttggcagggtcataggacaatagtggagggaaggtcagcagataaacatgtgaacaaaggtctctggttttcctaggcagaggaccctgcggccttctgcagtgtttgtgtccctgggtacttgagattagggagtggtgatgactcttaacgagcatgctgccttcaagcatctgtttaagaaagcacatcttgcactgcccttaatccatttaacccttaatggacccagcacatgtttcagagagcacggggttgggggtaaggttatagattaacagcatcccaaggcagaagaatttttcttagtacagaacaaaatggagtctcccatgtccacctccctccacacggacacagtaacaatctgatctccctctactctcgccacatttccccccctctctagtcgacaaaaccgccatcgtcatcctggccggctctcaatgagctgttgggcacacctcccagacggggcagcggccaggtggaggcgccccaccccccggatggggcggctgactgggcaggggctgccccccacctcccggactgggcggctggctgggcgggggctgccccccacctcccggaaggggcggagacgctcctcacttcccagacggggcggctgccgggcagaggggctcctcacgtctcagactgggcagccgggcagagacgctcatcacctcccagacagggtggcggcggggcagagacgctcctcagttcccagacggggtcgtggccgggcagaggcgctcctcacatcccagacggggcggtggggccgaggcactccccacatcccagacgatgggcggccgggcagagacgctcctcacttcccagactgggcggccaggcagaggcactccccacatcccagacgatgggcgtccaggcagagacgctcctcacttcccagatggggtggtggccgggcagaggctgcaatctcggcactttgggaggccaaggcaggcggctgggaggtggaggttgtagcaagcctagatcacgccactgcactgcagcctgggcaacattgagcactgagtgagcgagactccgtctgcaatcctggcactttgggaggccaaggtgggcagatcactcgcggtcaggagctggagaccagcccgtccaacacggcgaaaccccgtctccaccaaaaaatacaaaaaccagtcaggcgtggtggcgtgcacctgcaatcccaggcacgaggcaggagaatcaggcagggaggttgcagcaagcggagatcatggcagtacagtccagcttccgcaacagagggagacggtggaaagcgggagaaggagagagggagagggagaggggagaccgtggaaagcgggagaaggggagagggaggagatcatggtggtacagtccagcttcggcaacagagggagaccgtggaaagcgggagaaggagagaggtagaggggagaccgtggaaagcgggaggagagggagagggagatcgtggaaagcgggagaagcggagagggagaggagagagagggagagggagagctattgtttcttgaaactgatcatgaagaaagtttataaagaatttttatgttgtggacacatagggggaacaacacatactggggcctattagaaggtggagggtggaggatggaaggagggagagggttcaggaaaaatagctagtgggtactaggtttaatagcagagtgatgaaataatctgtacgacaaatccccatgacacaggtttacctatataacaaacttgcacatgtacccactaacttaaaagttaaaagaacttttatgttgaaaagaaaactttattatcaaccagtaaacattatgtcttagtaaatttaatttttatattatcctgttgaatctaaatgtaagtgattattttgaaattaattctgaagttcctaaaagtattacatcctttggacatgacagtgagtaagaacagacctaaatatcctttagtccttcgttaccaacatattcaaactatattcagctgatggccaattaagaaattctttgatagattctgatttgttttacttttagcaaacagatattttacaaagattttaaaagctttaattttcttttttattgtctcatgtaagagtcatgtaagccccttaactcacaattaaatttttgtaagggatgttggttgagttttttctctccttttaaaaatgtttcatgtatttttctaagtctactacagggcatacaaagaatgccatttgaaatggaattggcatcaataattatgactttctagaagttttccctaactagttccaccatttgaacatgaacatgtaaccttcaaatctcaatcgtaacatttaaattgttattaataggtgacacagcatattacttaaaagtatatactcaatagtattttatgtttcttctcttaacttggttaaaaagttccattcagaaaagtaatctatagttaatttaattgatatgtctttatataaggtctttaaatatatttttaatttctccctcatgtttagagttgggcagaggggagctggtctttcagccaccattgctaggagtgagcatgagatttctgaaattattgatgggctctctgagcaggaggtaagaaaataaatttaattcaagttaattcgttaattattaaagcattttaactctgtaggagctaagggtttwtttgtrtgtaaatgtgggaacttaattgagtgctagagtttagactgtcaaagatttgagtgtctgttaaagggtttttaaacgaggcagtcacacgatcatactggaattttacaaagatggctttggcagcaaggagacctggagagaggtgaggaggctgttaggataaaaataaggttctgaatcagggcaacagtggtagggatgtataggcgagtgtaatagaaaggtagaatggacaggccaagatggatgggatgtgggagatgagaaagaggaagaatagaatgtgactcccttgtttctaggttagaggagtaagctggtggtgccgtttcctaaagtagcaaaggagcatgtattttacaaatggcagtatgttcttcaaagggtgttgtctagcaagtgaacctgggagagagttgaactggggatggttagatatcagagtcatctgtctgcaggtgatatagtcccaggtaagtatggtaacatgaagtgaaaggggcaggtgaatgagaatatagagattaagtttatatatggaggagattcatctatgaacaagaacgccatttcactaatttttaaggtgaagatactgtgttgtagcaagtggcattactttgtttttcaggcatttcctgcctgtataaagagcagaattaataaaattatgaaacaggtagtagagaccaaggtatatgtttgacaaatatatcttcagacccaaaagcagtatttcctcccttgtgaagcttcctcactcactttcccaaaacagaactcaatgtctagtctcagtttacatttatttctattgtgcttctctttctgtttaataaatatttatgatcagctaaagtgtcatcttcatgagtgcggttattttaaacctttgggtcaggctatctttgagttcctgttgcctagtgtttaattggatattaataaataaatgcagaataagaataaatttccatttctaacattgaatctttttagccctgttcaaactctcaagattgttccaaaagccatctagtattgactgagttttgctagttttgattttattatatgccttttcttaaacctcatctcaaaattctgagagtcttgtttatttgaaatagtggccttaagtaatgatcaaagatattttttaccatgctgtatacttcaaaataaatgttaagtagacttaaatatacagttaatactcgatttgcaaaattaggtgaagtggatttaatctaaaatgttcaatgatttagaaataatttagataagtaaaattcctgttttcatactacttagcacatttagaagtaaaaagcagtgttatgacttcctctgctctaccctttactactagttaacctagccagtactttttctcctttttctatgggtattgttggtttaggttatggtggactaactacatctttggtttttgaggagggggagtttgaggggtagttactacttaaaattgccaattgtgataagcacctcatatgtattatttaaactgtgaaaattctgtgaaatggaggctataattaatggctgttttgcaagttaagaaactaaagcccagctgcaggttaaataattcacccaaggttacaaattaataaatagtggagccagatactcaacccaggcagtctgactctggaactgtgtgttcttttccatatctatattcaatcaagtctattctttcaacaaatatttatagcctattatgtgccaaactttcctttaagcattgggaatacaatggtaaattaaaccatcaagttgcttgatctcatgaaaaattacttgtgagacagttgcagtaagtttttctccaggatgaaaaaatagcctctttgtacagagtttgtctttgtgttgatatatgttgtaggattctatcagtatttaattatgataccctgttttgcattcataactaaataaaagtatatagtatgctcttataaaagtatatagtatgctcttataagttactgtgtttcagaattctagttaaactagccctggaggaggtatagaactatataaactatatctcagagttccttaaaccattttacttctcagattgttcttatactgatcaaaatagacttctacaggtggtttttctttcctttcttatttctgatattctcctttcccaaagagaggattccaaggtgatttttggtgcattgaaatacataactctttagggacaattacaatatttagtcagaggtatatcccacactcaagcttttcagtgcattgttatatgatttcaggatcttagccatttctagagacacctttgagttatcagtgttccagagcataccagcttcactgtgcccagattcccggagatgtacttcttttggaatacatttatgatgttatcattgctaaattttatctcaagccctaaatacatattgcacatactattgcataatatcaggacaagtgaattttccttttttttttttttgagataggagatagggtcttactctgtcacccaggctggagtgcaatggtgtgaccttggcttgctgcatccttcacctcccgggctcaagtgatcctcccacctcagtctcctgaatagctgggactactggtacaccactacgcccggctaactttttgtttgtttgtttgtttgtttgtttgagatggcgtctcgctctgtcagccagactggaatgcagtggcacgatcttggctcactgcaacctccgcgtcccaggttcaagcgattctactccctcagcctcccgagtagcagggactacaggcacatgccagcacacccagctaatttttgtatatttagtagaaacagggttttgccatgttggccaagctggtctcaaactcctgacctcaggtgatccacctgccttggcctcccaaagtgctgggattacaggtgtgagccaccccacccagcctctcacttagctaatttaaaaaaattattttgtagagatggggtctcactatactgcccagattagacttggactcctgggctcaagcagtccttctgccttggcctccaaaagtgctgggattacaagcgtgagccactgtgcccagcaatttttcatttcttttgtagcagtataatcaagagctttaaaacrtaaccacttactctatattgcttttaaaattacctctaaagtacatgattgaaatgacattcagcccttggaatatgtagccattatttctacaatgacgagtaaatctctgttaaatttatttgctctttgactgattccatgaggaaacatctgtaagtacatgattgaaatgacattcagcccttggaatatgtagccattatttctacaatgatgagtaaatctctgttaaatttctttatttgctctttgactgattccatgaggaaacatttgtaagcatctaaaattagtttatgtattgaggtaatttcaatctaatgtgtaatttcagtctaaacactatagtgttcaaactgattgagagtgtcccaggaaattagagactttgtaaggacttgactattaggcagtatccacttttatgaggaaaatttttagggaaataccttttcttatatttgggtaaatacttgtaatttgggtaaaagcttttaaatagaagtttgtacttaaaaatttcctcagttaaactttgggaaaaataagttctgcacgtgtaacaaagttttagttgaaacaagcttcatttctaagaataacaaccttaaattttcaatggaaagatgatgtaaaattagcaagaagcgtttaatagtaaagtgagtttaatttaaaatcgctgacttaaattttgatgcctgtttgcttatttttctatttattgttctgtaatatgacggtaaaagttgttctataaaatgatgttgagactttaaaaaatgagactaatatgataattaaatgctccataaggtcaccacttcagtgaacttgacattactttttatcttccaggtctaaaattttattatgttaagtatcagcttagtttaagaaaagaattcttctcaaaggagtagattatttaaaaaacgatatggatattctctgcctctgtaattcatacagtgaatatttattagatatatgagtaattattgtatgttagatgctgtggtatacactgctattgttattaaactgcatacatggttttttagtgcacattaagagcattggtccatggccctccttaaatttctagtttatgttttattctaagtaaattgtattttttttccagaataatgagaaacaaatgcggcagctctctgtgattccacctatgatgtttgatgcagaacaaagacgagtcaagttcattaacatgaatgggcttatggaggaccctatgaaagtgtataaagataggcagtttatgaatgtttggactgaccatgaaaaggagatctttaaggacaagtaatttatattttaaattattctctaatagacatctacataagttagtaaaaagtatttggcatttacttgtaaattgaactgttttcacaaaaacttggtcccattttggtgtttgaatcaatactgtgaaaagtagagaatattgatcttcctgtaagtttataggtgggaaaagaggtaacagataagaactggggttatggagtcatgttaagagtggttcccaaacttgggtgctggctgaacttttggggagcttttataaagtacagatttctatgtattaccgtagactaatcatttcctggtgtatggtgcccagaaatctgtgccctttaaaagtctccagtgattctacaattgttcctcagattggcagttagaaagccctatacatagtatttctcttctgttttttttgagacggagtctcgctctgtcgcttaagctggagtccagtgttgtgatctcggctcactgcaacctctgcctcctgggttcaagcgattctcctgcctcagcttccygagtaggtgggactrcaggcatgtgccaccatccccagctaatttttgtatttttagtagagatggggttctgccatattggtcaggctggtcttgaactcctgacctcaagtgatccaccttcttyggcctcccaaagtgctgggattacaggcrtgagccaccacgcccagcctatacatagtctttcttttcccaagtttttttttttttagttgttgaaatatttgtacgcaagtgtgtttttgttttcgttttcactcaggtttatccagcatccaaaaaactttggactaattgcatcatacttggagaggaaggtaagacatggtttgcattgggagtgtttgtaggtttgtgatggttgttactttgaaattcttgtgctctgacacatataagtagttaactagaaccgattttaaaaagactgcgaagagtctcatgtgattaatgtaatgataattacaattattagagaaatcktaacacagaacacagaactaaatggttaatgaaagatgacctgatgtttatttccctaaaacacatagattacaatgcttttggagcctcattaaatttctaattaaaatatcagtctcgtgctcgcttcagcagcacataatactaaaattggaacgatgcagagattagcatggcctctgcgcaaggatgacaagcaaatttgtgaatcattccatatttaatataaagttgattttaatgtttttgaacaaaatatttaaagacattttaaaaatttgcatgtatgtaatcagaaagggaatttacttgttaataagaaaatatttgaatgtttctgatagttcctggcatctttcacataatttggattaacaactgtaactgtctattaaaatagtacctataatgtaaataattttagagcctagatatgccttaaaatgctagcaatgtatgttgttctttttctttaattttactttcagaataccagagattttccttggaagtaatatttaattaaaaaatttctttatttcattggatyctcaaaaataattgttttatttcttacagagtgttcctgattgtgttttgtattactatttaaccaagaaaaatgagaattataaagccctcgtcagaaggaattatgggaaacgcagaggcagaaaccaggtgtgttttcttacttgtatggaagatatttcaggattgggggaaataggcaagsaaaaagtgttaaaacagaagtcctgcccttagtgtgtagtttaaacattgatgtttctgttaaattagtgaggatgttataattattttgaagttatatttatatatttaatgtattaaatcttgtatttcaaatatattttaagtttctactatgataaaattaattagaaaagttttataccattctgtcatctgagtcatgcatttcagtgtcagcaataatcatgtaattaaatatgaagccattaatacttttaatacactatctttagccagtctgtttatctgaggaggggtcaggtagagtaagggagagaaatacaacatggtaccttgattagagattctttacaaaaacctggaacctgattttgtttcatattaacttcatttgtggagttcagatagtttaatttctttctttcttttttytttttttttttttttgaaacagagtctcgctctgtcgcccaggctggagtgcagtggtgctatcttggctcactgcaacctccgcctcctgggttcaatcgattctcctgcctcagcctcctgagtagctgggactacaggcgcctgccaccacgcccggctaagtttttgtatttttagtagagatggggtttcaccatgttggccaggatggtctcaatctyctgacttccatgatccacctgccttggcctcccaaggtgctgggattacaggcatgagccaccgcgcccagcctagataatttaatttctaaaaagcactttttctgtctgggtgtagtggctcacacctgtaatccccgtactttgggaggctggggccagagcatcgcctgagcccaggagttcaagaccagcctaggcaacatagcgagacccatcctgtctttacaaaataatagaaaaaattagccgggcatgatggtgcatgcctgtagtcctagatacatgggaggctgaggtgggaggatggcttgagcctggaaagtcgaggctgcagtgagccatgattgtgccattgcactccagcctgagtgacagagcaagacctctgtctccaaaaaataaaaaaggcacttttactaaaggtagttttccagaagtataaaactgaaaaaggttagttttcacagttgcaattcagtaatttcaaaatgattttccccaaataactgatcagcagctgccatagctcacaggtgcttaccagagagactgctgcgctactgccaccaccacagttaatatggaggcttttgctgtctacacccggatagatattacaataaggacttgcatgcatgagctccgacactgcaacgattcattagcattattaaatctcttctggttttcccactcagccacccttttgttggggtggggtcttactccctttcttcgtttgatagcccctggttaccagatataggttattgacccagttctctcagtattcacagctataacctttttatgttttctgggtcattatttcccacagaacaccaccaccccacatgatgtgattacatgctctttggaaacagtatttcttgtttaaaaaagtatagcgagtgtttcatgagtcaactgtgtaaaatgctgttagaggttgagtaagccaaggtgccttagacgtggattttcagtgaattagtgagggggcagaaacacggttacacagagttgaagaagatacagaaggtgaggaagtggcattagtacaagtgcaaccttgtttttaaaatttttttataaagtggaatagtgaaatgggtcggtagggctaatgaggatcagagaagggaggataaagggcatacttgtacactgatgggtgcagtaccgtaagacaaaggatgggtgcttgccaagcttcataaagatgtactgacagaaaaggaataaattgagtgttgacagtgaaataggaagcactattccaccagagagaagaatattgccagggcttttcttcctgcttcccctaaagaatgtggaatcaaggtcctgtaatacccttttagctagagatcatagggaccatctatgttttaaacaagtttcagctacagttttttttttttttttttttttttgagatggagtctcgctctgtcgcccaggctggagtgcagtggtgcgatcttggctcactgcaagctccacctcccgggttcatgccattctgctgccccagcctcctgagtagctgggactaccggcacccgccaccacatctggttcattttttgtatatttagtagagacggggtttcaccgtgttagtcaggatggtctcgatctcctgacctcgtgatctgcccgcctcggcctcccaaagtgctgggattacaggcatgagccacggcgcccggcctcagctgcaaatttctaacagttttgttcctaattgccaaatagtatttataactttatctttagaaattatatatgttactgtttaaaatgttcagtcctacattaacgtaagagataaggtgatacttatacagtgtaccttaacctttgccagattagcagccagttgcccatgatgatagaggagagagctctagcaggaagttctatggggcacggatgtttgttattctgaaacagtcgtttctttcctaaagttgtctgggacacagtttcactcctctctgtggcacaccgatccttgttaagatccagccatgttggtgttctcttctgtacattcttgttgcatgtttcaaagtacctgtctcagaatgtatttgcagatgtgagaattgccatgtataccctcaccttgacctgagccttaggttgcttacccccaggtaggctcagttttgggttggtcagcacttctggtaggctagctctgccctcattagcttttaagttattgctttgaagatttttcctccaattttacatttctctggttgtttcackgggaatttgggagaggtgtgagttaaatgaatttagaccatcatctcatgccaccagatttaccattgtttcttaattgtttgtatacttattccatttatttgtgtcaaaatagaggggcagcttttcagaaattaggtggtgttagtttaagggctctctgtgtaaaactgaaggccttttgagctgataccaggtgagagaagaagccactggggttttgagcaaaagagggctgccagatttcagttgtgacatgattactctggttgctctgttgagaatagtttgtaaggagacaagagaagaagcagagaaaccagttaggaggttgttttaataatcccattgacttggactaggctacagtgaggaggcggggagaacggattagtttctggatgtacttttgaaggtaaaaccacgagattttgctgatggattgattgtggggatgaggaaaggacaataatcaaggaaaacaagttttgacctgtggagttgccatttgctgtgacaggcatgactgaaggaggagcaggttttgaggggaaaatcaggacatggctgaatatgaaatacctattaggtgtctaagcagagatccaaatgaggtccaagtaaagtggatagttagacatataagtctggagtgtaggaaaaagatctgggttaaagatatagaatttgctatatagaaaaaaggttagaatacttctttttaaaaacagaattgaattgcaaggttaagattttcaaaatctrtgtatcaactcccttgattttaccctggtggatacagagatccaactaatttgaaaatcactttacttctctgctatgtaaccaagctctagtcaggagggtttagctcaggtgatctcacagccattatggcatgtttacttaaagattctttaaagttctgctgaagtttatgcttgatcctgtcaatatgagtttgattactctccctatcctctactcccagcctcctttttgtaggaagtaatttttattcagcagataaatgtatagtgtgtggctgggtgcgatggctcacgcttgtgatctcaacactttgggagtccagggcgggtggatcacttgaggtcaggaattcgagaccagcctgggcaacatgctgaaaccctgtctctattgaaaatgcaaaaattagcctggagtggtggtgcacacctataatctcagctattctggaggctgaggtagaaaaatcgcttgaacctgggaagcagaggttgcagcgagcctagatcatgccactgcactcccacctgggtgacagagcaagaccccgtctggaaaaaaaagaaagaagagagaaagagaaaaggaaggaagggagggagggaaaaaagaagaagaagaaggaagggagggagggaaggaaggagggaaaggaaggaaggaaagcaagaaaagccagactggacgtggtggctcatgcctagaatcccagagcaagactccatctcaggaaaaaaaaaaaaaaaaaaagtgtagtttgctattgatagattctaagtttgcaaagtttgattttttaaaacctgttgctatagggaagcttagtagtgtttactctgaaaatgagttttaatcttagactcataggaaaatgagacagatgtttatatttttgttaaaattgtgttcagaggttattcttggcaggaattttaactcttctctccaaattctgatagagactaccccaacccatttttatagttcagcttgttaccattccatggagagtgagtgtggttctctatatgtttttgttgaagtaatgaatacatattggagattggaagccaaaaaccactgttgaatgttattatttaggatctaggattatgccctacgtaatagtttgattctatgtacattgttcttgctagcagtaagagtttcttcccctagtaaatgctgcatttttccaacataaactgccatctggtaagtctgtcactgtgcaggtagaattactgtggtacttgctagttacctgcagtaaagcaagtcatgttagaaaccatattcttcatttccaaatgcttgattactttccacaggaattcatgcccttcttttatgctaacaccattttcccctttatgccagtgtgtttttattccctaaaggtattcagaagcatatacttaggtaaatatagcaattttgaaattggaggaattttctgactaaactgttagctagtcactagatagaaagattattttagacaagttaagaagtttattatatcagcaagaactctagccccagagtgctctgcccaattgtacctatgtgactctaggtgggtcctttcacttggtgagccttggtttccacattcatgagagtggggwcagtgatacttaggttgcatggttaataagaactgggtatgtgtgtaaagtccctggagtgcagagtcaggcacagagagtgcccaataaatggtagccactgttatctttattgccattgccacagtgtgttttttggtgattgacagctttcactcttcaggaagttagtctgaaattcagttggcttaggagcactaattgttaataaattttgataagataggcttaagatattgtctgtttatttcccgaagtatatttttaaagaaaatattgtccagtagtgaaacggtatttcattttcttcctcgtgtaaatttttatttacaattgctgcttgttattaaatttagtaatttcgttttttggcaacttattttctgttgagtgggaacttgtctgtttctcttttctaaaaaaggtgaacatttaaaacaaatataattagmacatatatatagttagatattcatttatatatagtagtaatgaatcttagcataaactattatttgatcttgccaaaggggacccatatgaaactgaatcctgttcttaaattatgttgaaatacacttaccaggtcaagcattgtggcttacactagtaatcccagcactttgggaggctgagggaggaggattgcttgagcctgggaggtttgagaccagcctggacaaaaactttaaaaatttatacaaaaagttaaaaaactgaaaaatttgattttctacaaaaaaattaaaaaattagcctggcacagtggcgtgcactgtagtgtaatcccagctattcaggaggctgaggtgggagcatcgcttgagcctgggagttgaggctgtagtgatccgtgatcacgccactgcactccagcctgggcgacagaaggagatccagtcttaaaaaaaaaaaaaaaaaattccaggtgcggtggcttatgcctaaagtcccagcactttgggaggctgaggtgggcaaatcacttgagcctaggaatttgagaccagcctgggcaacatggtgaaacctcatctctacaaaaaatacaaaaaaaaaattagccaggtgtggtgatgtgtgctggtagtccaagctactcaggaggctgaggtgggaggatcgcttgagcctgggaggcataggttgcagtgagccaagattgcgccgctgtactccagcctgggtgacatagtaagaccctgtctcacaatgaaaataaaaataaaaataaaaagaaatacacttaacttttacttttttctttgaattttcattttgttttatatgtgttctagaatattcattcatagtgaatagcttgttatttgacagaaatgtttcatgttatattaactccctgacagaattaaacttgttttattggctctcaagtattgagtttaaagaaggggagaaaaggaaaaacctggacaacgagccattgcgaatatttgtgtctgtgtagggaacttttagaagggtttcttttgaaggggtggacctcttttgctccagccaccctgtggagttgagggatgtaacttgtaaccttcatcctagaccatgtggattgactggcacttctctttacagatttgcctgaaacaaaagtagttccaagcatctcttgtttaaattagaggtaattccttactctcttgaatgtcagtggcagttgttatgataggtctttatgcatattgcacaaaggtgaggtcctccagttgctgctgactgcacttcctctccgctcaccactgcctggtcagtatacagagkggtgagaggttctgctggacaggtaccaaacacttctctagactctaatgcagcaactctgtccatttctttggatcatttccacactatgcagagccaggagctgtttccttctttacactgattggtttaagcaggtgctgcagttgtttcttattccctagcaccagggaaaggggagtgaagttatctgttggttggattttagacagcagggaatgcgtgggattactttgaagctctgattggcattagaagcagaaaagtattggggaaataagattagcatgtgttacccaactctaaggggwtactgaatttctttccttacgttctgctgagttgacatgtccccgtcgtatctttaggccataaaccgttttctgggttacacagctcacttgctaggcaaagggcatgatttgtccttactatgccatcttactggttcagagtgacacatggatgctacattggttacagggttaggttattagcatttaaacaggtcttgtgaccactgtagtgtcccagggagtcagagctgagtaaaacttgcccaattataaagcagacctactcatggtttgaaagtttaaattttaaaatctccctagtttatcagttttctctagcaataaatatccagaagaaagaggaactggcagttagccagggtgagaagttaggaaggtcagataaagcaagtgaaggaatcatggtattgaaatgctttagcaagtagaatagtaggtacagttctcactggactgtgaaaatttgatagaataagggttcaaaggtcacaatgaggacaaagcaggatcagacacaatgaaggtgtgcgatgggtggttgtagttggagagaagactttctgattttaggatctaggaggcaaagcagtgcccactgctaatgaggaggcaattgtgattttgcatgtggggagtttaatggccatgacctaaaagtattttaactgtgagatgttatgttgattgagtggcgagtgttagaaaagccattgacatgcattttgaaatctgaaaaataatgtcaaggcataatgagccatgtgatgcaatcacttatatgttctagggaatatttaagaagtcattccataacaccaaaagagaatgttgatctagggagattttatgaaacgtgaaaaaggaattatttttaaaatatcacagttcagcaatgttctggaagtggaccaagaaggattcattttcttctttccttgccccttggattagaaggaggcataatgtggatgggacttcttttggggaggtgaataaggccttcattatcttaaggaaaaagctaagtgttggttttgatgaataggtaaaagactttggagcgctattaagaagggaaatttttcttaaaattaattagttacttccatattgtctggtraaaacaagtaagaggacaggtagagttgctatgaggcaagattgacattagcctggatcagaatgaacagtcgagattggagggtaaaaacttttcagataactggaataaaggaatttgatttttgttttatccaacatatgcatacacctatcatcatggtccagacactctcctgggagctggggatgcttagagaagtaagattggattcttgttcttgatgagatgataacacagagagccagatggatgctgataagcaggcactaagccacctagtgacagtgctacaagcaggtgtggtctgtggtggagagggaaggacatggccccagagttcctctgtggaaatcaagagaggcttcacaggagatgtagcattttgacctgaattgtagagactatgtgggactttatcaggaaagggaagggtagaaagctatgcaagtgctgggcatgtttaggtgagtccagaacagcgaagatgatgtggcaggatggtgattggagggaggtgtgcaagggccagcctgctgtgctggaaagatgtgttggagttctgttttaatttggttatacagttttgatttctgaattaaataaaaatgcaggccagtcacaatggctcgtgcatgtaatcccagcattcgggagactgaggtgggagaatcacttgaggtcaggagtttgagacctgtagccccagctacctgagagactgaggtgggaggattgcatgagcctgggagtttgaggctgcagtaagctatgatcatgccactgtactgtagcctgggtgacagagtgagatgttgtctcttaaaagcaaaataaagcagttcccccttattcacaggggatatgttccaacactcccagtggatgcttgaaaccacagatagtaccgaaccctaatatactatgagagatatatatatatatctccacacatatatacacatatatgtrtatayacacacacatatatacatatatgtatatatacacatacacatatatacatatatgtatatatacacatacacatatatacatatatgtatatatacacatacacatatgtatgtatacatacatatatrcacatatgtatatatacatacatatatacacatrtgtatatatacatgcagatatatacacgtgtgtatatacacatatgtatatacatgcacatatacacacgtgtatatatacacatacaygtatatatacatatacacatatatacatacacatatacacawgtatatatacatacacatatacacatgtatatatacatacayatatacatayatgtatatatacatacatatatacatacatgtatatatacatacatatatacatacatgtatatatacatacatacatatatacacgtatatatacatacatatatacacacacatatatacatacatatatgcatacatgtatatatacatacagatatatrcatacatgtatatatacatacagatatatrcatacatgtatatatacatacagatatatacatacatgtatatatacatacagatatatacatatwcacacacacacctatgataaactttgatttgtatattaggcacagtaaggaattaacagtaacaaataataaaatagagttatagcaatatactgtaatagaagttacatgagtgtggtcttttytcaaatatcatactgtacgctactacacttacccattttcatactgcagttgactccaggtaactgaaaccacagaaagagaaactcctgatatggtgggggctactgtagtagcattcattgcacacttagtttcacttttttcttttagagtcacaggttttgcaaatgagacatcagagataaaaggattcctagtgtgactgcttagcttagaaatatttaagcattttacttcttttcaccttattatagctttagtatttttccaaattacttcagtcttagtaacgaccatagctgtttacatattccattaagtagactttcgctcaaaagtataaatgcatgaagatgtttcttatagcattatagatagtgatgaaaaaattggaaacatattaagtatctaaaacatgataaattatgtatgggttatcaaattttaaggtagaattggaatgcttgagtgacagattaaatgtggaggttgccaaaaaagggaaccaaccccagatttccgagtagaatcttaacattttcactttctcgtgggtccaaatgctatgagcatttgtgtctgcgtgtaggacccttcaagcagtacatatagaatacattaaaaacctctagactggtttttaacacacgatcaccagttacattgtaaatgactaacaatcatttaaaatttttttagatagacataatttatcacactataaggagctatttctgtttgcctttgaattttacaaatgatggttcattctagcagcaaattgctcgaccctcgcaagaagaaaaagtagaagaaaaagaagaggataaagcagaaaaaacagaaaaaaaagaagaagaaaagaaagatgaagaggaaaaagatgaaaaagaagactccaagtgagttaaataattagttatataataagttaaatgtttatttttattttatttttatttttgtagatatagggagtacagttgtcacatggatatattgcatagtagtgaagtctgtgcttttagtgtaccatcgcccaaatagtgtacattatacccattatacctcacccacccyctcgcaccctctcacctgtttgaatctctagtgtctcttattccactctctatatccatgtgtccacattatttagctcccacttataagtgagaacatgtgatagttgaccttctgtttctgagttatttcacttaagatgatagccgttagtttgatccatgttgctgcaaaagtatagtttttttttttttttttttttgtgatggcgtctcgctctgttgcccaggctggagtgcagtggcatgatctcggctcactgcaagctccacttcccaggttcacgccattctcctgcctcagcctcccgagtagctgggcctacaggcatctgccaccatgcccagctaattttttgtatttttagtagagatggggtttcactgttagccaggatggtctccatctcctgacctcgtgatccatctgccttggcctcccaaagtgctgggattatagacgtgagccactgcgcccagcctagtaatttttaaataatgaaatttaatctgctgaaattttattttatttatttattttcgagacagagcctcagtctgttgcccaggctggagtgcagtggcgcaatcttggctcactgcaacctctgcctcccaagttcaagtgattcttgtgcctcggcctcccaagtaggtaggattacaggcacgcgtcaccacgcccggctaattttgtgtttttagtagagatggggtttcaccatgttgcccaggctgatcttgaactcctgacctcaggtggtccagctgcctcagcctcccaaagtgttgggattacaggcgtgagccaccacgcctggccgaaattttagaaacatctaatagttacatgattaagttgatgtgattaaggaatagaatattacagtaaatgtaatttttgacttaatgaacttatttgcaagtcatgagttattattacttttcagaagggatgggttatagtaatatatactttcctccaggatatattgaatgtaatttaatttttgatttggaagattcctcaggttctgtttttgagcctcaggtagtatatattagtataaaaatgctaagacaggaagagttcatttttatattttagattccagctttattgacttcgtcatataaaatggagttttgggtttgtttgttgttactgctgttttcttagttataaaattatattatagaaaaacaggaaaagaaaaatatagtgaaaattaacctatgattctgccactcagggagttattgttgatgcttttgtggacatacaggggtgtggtaggagtgggggcatgacagttggtttggttgtttttttccccaagaactagctttgtaaattacatggaacaaaattcaccagtttgaaatgtgtacattgatgtgttttgacaagcatatgcacttgtgtaactattatcacaattgtgatgtagaatgtttccatcaccccaaacggttcccatatgctcctttgcagtcagtttctctttcctcatttccagcctctggccgtcatgtatcttttttgctttctctagaattacataaaaattgaaatcatacagtatgtatggcttcttttacttagcatgaatgcctttgagattcacttaggttgttgaatgtatcagtagtttgttcctttttaatatttattatgttatatctatagtccttgtggaactgtttaagatttacctagttttgtggaagctaaagtagctagtcacttgccatgttttaaaagagacagatattcttctcattgtaattttatacctgaggaagatacctctaagggaatatatttttttcttttagtttgggttaaacatttttygggccatgtagccagtggttcttctcacatggaactctgtcataacttgattttatttttttgttaaaatttctaaactatttaacaagcttttatttattatctatgtgagctaggtcttagggagaatgtgaaaatacgtaagatgtatactattcccaggtagttcatgatttagtaggggaaaagtaggtaaagtacaagtattactttaagaaataaaagcctggcagtaagaagtcaacagacgaccagttaagtgctttggcagattaagaagaggtcgaggctacttctctgtggataatttggaggacattagcagatgctagtggttaatgtgggtagggtagagggaatcacatgaatagctagtggaagataatgatttcattagacttaacatagtgtgcatcaagaagagaagtggaaggtggattggaattaaattatgtagagctttaatgaaagccaaaaatggtagacttcattcaggaggctgtgctgtgtgtctgtctgggaatagttagaaagggattagaatggatggagtggtttattgccaaagctatcctgctagaatgttgattcattggcaagataaaatgaatagactagagatatgaatcagggaggccagtatgaaaggccaggattggggtactaaggtgttgagtaagtgtagtggtagtagaaatagagatggtaaaattagtgagagaggcatttctgagatgaaataaccaaaacttggcattagatcacatgtaggaagtatgggaagagggagacagcaaaggatgatatcaaatctgtaaacctgaatgatgatgaacatggtaggaatgttaacaacaaatgattagagagtgacgtggagcaaggagcagaggtgaggatgaatatgattttggatatgttcagtttctattgatggaaaatccaggtggccgttccagcaggtagttgggaagataagcctgagtctttggagttggggtgtgagtccaaagatagagattggagtcctcccggtagaacttatgagaatgggtaaccttacatagctctaaggctctaggggagagccttgggaaatccccgtatgaaagggatgagaggaacccagcacagtggctcattcctgtaatcccagccaaggtgggagaattgctttagcacaggaattcatgactaccctgggcaacatggtgacaccctgtctctgcaaaaaatacaaaaattaaccaggtatgctggcacgtgtctgtagtcccagctactcgagaagcygaggtgggaggctcacttgagcccaagagattgaggctgcagtgagctgtgttcgcgccactgctcttcagcctgggtgacggagtgagacactttctcaaagacaaaaaacagaaacccaaaagaaaggatgagaggagaaaggtctgtcccttgaaggaaagccagagtagcagcagggatatttcaaaagctgagtttcaagtgatataaaaagaagaattaactgcagcgtcagttgtaacagaaagacttgcggggaaaattgagaagaggtcatttgattttgcagtttgcaagtcattggtgacttttgagaaaacatcttttaacaggaggcttcagaatagaagccagctttataagggaataagtaagtaaagggaaaggactatgtygtacttcaatttaggactgaaggggagagaattatttttgaaaaaaatcagcatcttccattaagcaagaataattgagtctttgagtattgccatctatccattcatttgcaaaaatgtacattgagtacgtttccttaaatataacaaccatgggaggtaagtagtacagaaaatggtcttccagtattacatgtagtactgttgctattaataggaaccaccatgtttctacatgcctgagacgatggtaagcactttatatcctgagggagttttagcttgaataatagcaaactgttacttgatgctgactgtgttccaggcactgttctgggtactttatttaactccttcagtcctggcaacagtcccatgaaataaactttttctcattgtacagatgaggaaactgaggcccatgggggtgaggcagcttgtccagggtcatcacatggctagtaaatcacaactgtggtacaaacccaggcagcctggctccagaggccgtttcctaagtattaaccattactgcccaatttgtacataattagtatcagacatgatttagagtattgagtctgattttataaaacaatattgtagattattactgtaaaacaatattgtggattattactatagaaaaggcatctatcatgaagatcatctattttagcttcttcatttcatacatgaggcaacctagactaaaggcaaataaaaccccagaattcctgccttttggtgtaggctgttgtctctggattgcaggtctagggcttttctgctgtcatttgttactttctcatggagtagttctggtttctaaatcagttggtttgaaatgtgtttaaattttaagtccattagtatgtaaaataggtcttataaaatatcttaattttagctggtcaaaacttttaaaaactatggtatggcagaattgttgataattttttttttttgagtgagagattaggtagttttattcaatttctatttagataatattcaaaactaaaaccttcttcgatgtatgtatactttggaatcacacaagttttcatttgcttttgtgtccagagaaaataccaaggaaaaggacaagatagatggtacagcagaagaaactgaggaaagagagcaagccacaccccgggggcgaaagactgccaacagtcagggccgccgtaagggccggatcaccaggtccatgacaaacgaagctgcagctgccagtgctgcagccgcagcggctactgaagagcccccaccacctctgccaccgccaccagaacccagtgagtggaaacaattggcataaacaggccataattttgttcgggattctgtttcactgctaggatagggtagaaaggacttttaatattgacaacctagaaataatcctgaagtgtggtctttaaattttttaaactttaatgtcaaagttttttgaaaaagaacatcacccagtcttgccaccccaatatagctgttttttatttagttgttatgctagtgtgccataaatattttctaatttctaataattaccatttttattttttartggctgtgtaatattgaggcatgacttctttaaccattctcttattgctgaatgattaggttgtctgccctcttccctgcttttaaaccaatgtatatagcactgtaataaaaaaatctttattcacatagtattttatgttaaattatttgtcatggaataaattcttaggcaagggaatactggatctaatagtcaaagcatctttctctctctcattaagtattgtctcattagtttataaaaaggctagattaatgatagagtaccactgttaatgattcagaggtatcattgttactgaagtatgaaagaaaatgcagtttagggaatggcaagaatgagataggggcactaactagataggaggaggaaagataggttggggcaggtcatgatgggccttgtttgaaatgtattttgctttgattatgaagtggggaacttgcagaggtttttaaatagaggaatgctgtgattagatttgtgtctttggaagttaactgrtagcaattgtggaggtcagtttagacagaataaaggctggaggcagagggcccagcatgtatgcagtggcccaagcaaggaggggatggattcagagttgatgcatgtcattggatgtgagtggtaaatgggaggcaagattcaaaaattagtctatcagtctaaggagcctattggtaacttgagtgactgggtgaatgctggtactataaattgagaaagggaatatggcaggagctcatatcaggcctgatgttctcaggttttgttttgttttgttttgtttttttcctgaagcaaaagagaacatattcagttcatgatccatctttacccactggatgtcagacactcggggatgaactaaaggggctccaggagttttaggacaagatggaggctcagaggagaggagagggaattgtgcttggacaggaaggaggagggttgcttcttcctttgacactgcaggagaggagaggtggagatcactaagtgggaagctactgggtgaggtaggacttctccagaaaaaaacaaaatgtttaaaaatgtagacatraagagaacttttaacaacactgaaaaagatcataatattgaagtgttgacttgtttcttctagtttggtggaggagaggttactatcctatttctgcagtttctttcaccaaatgcttttacatagtcttttatgtcagatraagagatataattatatgattggtttgaataaaggatttaactttgtttttctctgcctgattgggttctctctttattttagtttctacagagcctgtggagacctctcgatggacagaagaagaaatggaagttgctaaaaaaggtaaattgtagtagttctggtttctcaggtttttgttttgttttttagggttattagtaatgagtgagatggaactaattgttttaattggaaaaaaaattctttcaaaaaggcaaagaggactcagaagtgactttaagagttcttttctggtartatggtacccaataaagtacccccagtgtgccttgtttaagatgcccagttttaagggatttaagattctctctgcagttttattttgaatgtcatttaattaaagaacaagtaggtcgttttcacttttttagaataattatgactctatgctattgaaattgttctggaatgaatgttgatataaagtctatatttctattacctaaaagttgtatttaataggataggatggtaaatacttttgtcagtttgcatttggtaagtcatgtaattataaaccactagcagattgctctgtgattcagaggaaagagcatgaagtttgtaaccaggccagcgaaggtttgagtcctgtctctgccactttcatagctttgtggccttcctcttactctggcactttatggactttgtgcttttctgtcgttgcttgttaatgtactataatttgaaattgaactaaaatttctaataggataaataattggtaatattgagaaagattagctaatttttggtggttaaatatttaccttgcagttgtaaagataaattattgtaaatagcttgacatttgagtgacacatttcatatttttttgtatcaccccttatatatgtatacaaatgcatagatacatattctttgcacgtatgtgtgtgtttatgtgtgtgcatatatatattgattagagaagtgttaaattgcataggtttctgtaatgcattgtattaccataggatttttttaaattggctagtatttttctgatggcattgcttgattgtgaattgactgaggacaaatatggattataagtggagtcatatatatgtctttaaattgtgtttatcatttatatatgattatcttattggcttgatatattgtgtccagagatctagatgtacctaatcatttagtttgcaagtatttgagctattactaatgtgtctaatgttgtccyagccctgtgagagatacataggaaggacaaggtttagcccttctgttaatgagcatgttttaaatttgagggggaaaaatatagaactgtaaatgagttttgtttcaataagtatttttataagtatcaaagtatatatgataagtaattgaaagcacacttctagtgtcaatggttgtgaatacagtgattaagttaatttattatttctcttgtttgcttgatcaggtgactgttcaattaacatttggtctgtttttaaaatgcaggtctagtagaacatggtcgtaactgggcagcaattgctaaaatggtgggaacgaaaagtgaagctcaatgtaaaaacttctattttaactataaaaggcgacacaatcttgacaacctcttacagcagcataaacagaaagtgagtatattggggtggtgactctttacttactgttttttacttagagtgttgttgttgttgtttgagatggagtctcactctatcacccaggctagagtgcagcagtgcaatcttggctcactgcaaactcttcctcccggattcaagcaatttcctgcctcagcctcccgagtagctgggactacaggcgcccgccaccatgcctggctaatttttgtagttttagtagagacagtgtttcaccatgttggccaggctggtctcgaactccagacctcaggtgatccacctgtctcagcctcccaaagtgctgggattacaggtgtgagccactgcatctagccttgatgttttttttttttttttttttctgagctccagagattggttttaagagaaacctttttgtatcttatatttttatttattgcacttatatgtaaaaggtatgctaaatttttagtataggctagctgtttctctatttattgctcaaggagtaaagtttctatttgtattcctaacagtccaaacaaggcccatcatgacctgccccagcttatctttcctcctccgaagtttctatttgtagtaaagggaattaaatactcttgaattactgtaggctggatttgaaaaatacaaactttttggagattgaattgaaaactttagttggaggtctgttgataatatcgagtgaattgatttggtatattagacattttttcagagagaagattccatggtataaatattaaaaaccagagagtataacattattggaaattccttaataagtaagttccagtgtagtggttgtcaaagaccatagagctttttgatgattccatgaggtcaagactgttttcataaaaatatcaatcaaatgttatttactttttttcagtatatgacatttgcatttatggtgtcaaagctgtggtagataaaattgctgatgcctaagcataaatcttggcagggaaccaaacggtgctagtactcaatgtatttttcatcgctgagcatttgcagttttttcttaaaatgtcacttaagaatgtccttgatgacgcagtaaaagttaattttattaaatctcacccattgagtatgtctttttatacttcgtgtcatgtaatgggaagtaaacataaagttcygctcyataccaaaatatgatggttctctcagggaaaagcactttggcaattgttygagttctaagttgcaccagcctcccctttttcatggaatgtcattttagattgaaagaatgacagacaaactatgttttcagactgggattttgggagacattttcttgaaaattagtgaatgaggctgtctttgaaataaaataactgatagtgtttgttgccactttaaaattttgagttttcaagcaaaaaatgagaattttggaaaatatgtttctctaaccatgagcttcacaccttctcattacagattttctgatgagatcagtggtaataatagcaaatgcgatagttgttactgtgtgatgaaatgtatccaaatttgaaaaacttgctttaactctactttccaaatggccatttcatgatgttataatgtgatatggtttggctttgttgccacccaagtctcatctttaattgtaactcctacaattaccatgtgtcatgggagggactcagtgggagataattgaatcatggggcaggcctttttctcatgctattctcgtgatagtgaataagtctcacaagatctgatggttttataaagaggaatttccccgcacaagctctctttttttgcctgccccatccatgcaagatgttacttgctcctccttgctttctgccatgattgtgaggcctccccagtcatgtggaactgtaagccctttaagcctctttttcttcccagtcttgggtatgtctttataagcagcgtgaaaacggactaatacaataaattggtactggtagagtagggtgttggtgaaaagatacctgaaaatatggaggcgactttggaactgggtaacaggcagaggttgcaacagtttggagggctcagaagaagacaggaaaatgtggaaatgtttggagcttcctagagacttgttgaatggctttgacaaaactgctgatagtgatatgaacaataaggtccaggctgaggtgatctcagatggaaatgaggaacttgttgggaattggagcaaaggtgagtcttcttatgttttagcaaagagamtggcagcattttgcccctgccctagagatttgcagaactttgaacttgagagagataatttaggttatctggcggaagacatttctaagcagcaaagcattctagaggtgacttgggtgctgttaaaggcattcagttttatgagggaagcagagcataaaagtttggaaaatttgcagcctaacaacgtgatagaaaagaaaatcccattttctgaagaggaattcaagcctgctgcaggaatttgcataagtaatgaggagctgaatattaagttccaagacaatggggaaaatttcttcacagcatgtcagaggtctttatggcagccctttccatcataggcctggaggctgaggaggaaaaaatgatttcatgccctggacccaggacccccttgctgtttgcagcccagggacttggtgctctgcaccccagcagctctggccatggctgaaaggggccaaggtacagcttgggccgtggcttcagagggtgcaagccccaagcctttgcagcttccatatggtgttgagcctgtgggtacatagaagtcaagaattgaggtttgggaacctctgcctagatttcagaggatgtatggaaacgcctggatgttcaagcagaagtttgctacaggggtggggctctcatggaggacctctgctagggcagtgcagaagggaaatggggggtcagactccctactagtgcactgcctaatggagctgtaagaagagggccaccatcctccagaatggtagatccacctacagtttgcactgtgtgcctggaaaagccgcagacactcaacgctaccctgtgaaaacagccaggaaggaggctgttccctgcaaagccacaggattggagctgcccaagaccgtgggaacccacctcttgcatcagcacgacctggacgtgagacatggagtcaaaggagatcattttggagctttaaggtttgactgccctgctggattttggacttggatagaccctatagcccctttcgtttggccagtttctcccacttggaacagctgtatttacccaatacctgtgcccccattgtatctaggaagtaactaacttgcttctgctttcacaggctcataggggaagggacttgccttgtctcagatgagactttgggctatggacttttgggttaatgctgaaattagtgaagactttggaggactgttgggaaggcatgattggttttgaaatgtgaagacatgagatgtgggaggggccagcggcagaatgatatggtatggctgtgtccccacccaaatctcatcttgaattgtaggtcccacagttcccatgtgttgtgggagggacccagtgggagataattgaatcatggggcaggtctttctcatgctatttttgtgatagtgaataagtcttaggagatctactggttttagaaagaggagttcccctgcacaagttttttttttttttttttttttttttttgcctgccgccatcatgtaagacgttacttgctcctccttcccttttgccatgattgtgaagcctccccagccatgtggaactgtaagtccattaaacctcttttacttcccagtctcaagtatgtctttatcagcagcgtgaaaatgaactaatacataatggatcatgcattgataaaagattgataatgtttttttaatataccaaacgtaagataggttacagatttttttcttttttctttttttttgagatggagtctcaccctgttgcccaggctggagtgcagtggcatgatcttggcttactgcaacctccgcctcccaggttcaagcaattctcctgcctcagcctccttagcagctgggattacaggcgcacgccactatgcccagctaatttttgtatttttagtagagatggggtttcaccatgttggtcaggctggtcttcagctcctggcctcaagtgatctgcctgcctcagccttccaaagtactgggattacaggcgtgagccaccgcgcctggccagattatagattttaacagagtatgaagggttccttgatatggtataagatttcatattgtaactaacaaataagaagtgacacttggtgagttttggtacagtatcaaaaaatagtatgcataagtatctgaaaaatctgttaaaatattcttcccttttccaacgacatatctgtgtgaggctacattgttttcttatacttcaaccaaaacattagattacttaatgtaatccacagattagatcatatgtggaagcaccttgagaattgtgctgtctctgttagatcagacatggaagagatttccaaaaggggaaggttgtgccactgttttagtaagtcatttttttttttttggaaaatggttacttttcattaaaaaaataaattcttggccaggcgcggtggcttatgcctgtaatcccagcactttgggaggctgaggagggcagaacacaaggtcaggagatcgagaccatcctggctaacatggtgaaaccccgtctctactaaaaatacagaaaaaaatgttagccggccatggtggtgggtgcctgtagtcccagccattggggaggctgaggcaggagaatggtgtgaacccaggaggcagagcttgcagtgagccgagatcgcaccactgcactccagcctaggcgacagagcgagattccatctcaaaataaataaataaataataatttatgagtttatattgtttttaataatttaaaattttgaagttttcttagttttagtttctgatatagtaagtgtctatctggctgtctatatttctcccataaagaaaagctctttggccaggtgcagtggctcacgcctttaatcccagcacgttgggaggccgaggcgggcagatcaygagttcaagagatcaagaccatcctggccaacgtggtgaaaccctgtctctactaaaaatacaaaaattagctgggtgtgatggtgtgcacctttaatcccagctactcgggaggccagtagaatcacttgaacctgggaggcggaggttgcagtgagctgagatcgcgccactgtactccagccgggcgacagagtgagactccgtctcaaaagaaaaaaaagaaaagttctctgcggcctttaatactttttaagagtgttgcatccttagaccaaaaaatttgagaattattaaagtgtgatagtaaagctaataagatttgaatttattaagagtatacaaagtataacattgactgatttaaaagtgtgtatacaaagcggcctttaggttaataataagaatgtgagagttaaaaatatgctgtagcaaccaaaacatgaaaaagtctactgayaagataaagacttgacttcaggaggtaacatccaaaatgttttgagaaaaagtgaagtaaaaaatgagtcagatatgtatttaaaatataaatgttggctgggtgtggggactcacgcctgtaatctcagcactttgggacgtcaaggtgggtggatcattaggtcaggagattgagaccatcctggctaacatggtgaaaccccttctctactaaaagtacaaaaaattagccgggcatggtggcgggcacctgtagtcccagctactcgggaggctgaggcaggagaatggcctgaacccgggagccggagcttgcagtgagccgagatggcgccactgcactccagcctgggtgacagtgcaagactccgtctgaaaaataaaaataaaaataaataaataaatgtatgttatattagtcatggtcctcctcagaaacacagttaacaggatgtgtgtatgcatatatatagaaagaaagattgagatttaaggaactggctcctgtgattgtggagggttggtgagtccagtgtctaatggagtaggctggttgattggagattctgggaagagttgcagttggaccccaaaggcagttttcctggcagaatgtcttctttttttttttaattttaatttttatttaattttattttttgagatggagtttcgctctgtcaccaaggctggagtgcagtggcttgatcttggctcactgcaacctctgcctcctgggctcaagcgatactcctgcctcagtgtcccaagtagctgggattacaggcacacaccaccatgcctgactaatgtttgtatttttagtagagacggggtttcaccatgttggccaggctggtcttgaactcctggcctcaagttatctgcccgccttggcctcccagtgtgctgggattacaggtctgagccactgggtctggccatgagccactgcgcctggcctgtgtttctatatatttgactttacattaagaattagtgaatactatcatatattgaagaaaatgcttggcaacgtagtgaattattgcatgtgaacagagggatgttgtagtagggtaaaaagttgtctcttccctagttactagtgaaaggaccaaacagaatgggttgatagtggtgagagagggacatacactgggctctggaaaaatccatataataatttatctgctgggcatggtaggtcacacctggattgcttgaggccagatgttccagaccagtctgggcaacacagcaacacctcatattcaaaaacaaacaaataaattaaaagtagttattatccttgaaaatttacagaatcttctgaaagctttttagaaagtgtagccagtgtgtctctgggattctcttgcattcctgctatgaacttagaaatattagccttgagaattgcaactaattctgtgactctgatattagaaaatgattgtttctcttgagttaattaatattttagttggatcctaaatatcatccgcatgagaatgttgagtagatgtacgggtaatttttaacagggcagtagtatattttcctcttctgaggagtctcactgggagaggctgacagctcatatgaggtgaaacgtaggctctgtaaggggcacaagacagaggaccatcagggctgggacttccagaaccctgggtctgcaaacacagaagatattaagccttctatttagtaacatgaagttataaatataatgtaaatagctaacgtcttatagttaaatgtgtacacatgtactcttacgtatatgcgaccccagtagaagaatgagcaattttgcataaacatactttgcagaagggagcatacaattttttttaaaaaggaattaaaaaaaatttttgtttttttgttttttgttttttttttgaacgagtctcactgtcacccagcctggagtgcagtggcatgatcacagctcactgcagattcagccttttgggctcaagcgatctccctggctcagtctactgtgtaactgggactacaggagagcaccagcacacagagctaatttttttattttttgtagggacaggtgtccaactttgttgcgcaggctaatctcaaactcctgagttcaagtgatcctcccacctcagtctcccaaagtgctgggattatagacatgagctcctatgcttagctgaatttgtgcttttttatagtaaaagaaattgagtggtattggctgggtgcggtggctcacgcctgtaatcccagcactttgggaggccaaagcgggtggatcacgaggtcaggagttcaagaccagcctggccaagatggtgaaaccccgtctctactaaaaacatgaaaattagctgggcctggtggcgggtgcttgtaattccaactattcgggaggctgaggcagagaattgcttgaacccaggaggtggaggttccagtgagctgagatcctgccactgcactccagcctgggtgacagagcaagattctgtctcaaaaagaaaaaaagaaaaataaattgagtggtaaaaagaaattcagtagtaatatcaatgatgagttgttgcttataaaattgcgtgattcttaatgctagtgaaggaagtttcttgcagcattatttataccaaaaattgaaaattaccaaaatgccttaaaataggagaattttaattatatgtcaacataatatatgtcagtattatgtcaacataatgttttcatgggatcattaataacaataattaggaagaatttgtaacagtgatatgttctgctcatggctacattatgttaaaaaagtgaatatgtaattacatagggctttcctggttgtgtttacatgtatacataaatatttatattcatgtatatgcctctgaaagattgaaaggaaatgtaccggtatatttaggatctcttactgttggaataatgagcagtgatttttgtagtgttatgtcttccacatttcaaggtatatattatctttagaaaaaatatatatatattgtttttattagataacattatctggagtgagtaaaaagcatggaggtatgtgatttttggctwtttatacatgtatagtggtgagtaattccaaaagtggatcagatgtaacttttgcttagtttgataaaggcgagccatctacacaaaatttggccagttagtgattatggagaggtatttatctgcactttaaccagaactattgtcaaacatgtgacctccttgtctggtgtgtgtgtgtgcttatcaatgttctacattatttcagaaatgaatttttttttctttttagttatttaaatcaaataatactctttcctcctttagacttcacgaaaacctcgtgaagagcgagatgtgtctcaatgtgaaagtgtcgcttccactgtttctgctcaggaggatgaagatattgaagcctccaatgaagaagaaaatccagaagacagcgaaggtatctcaaaattttaaatttagttgtgacatctgctatccagaataaataatttttagtcatttgactgtgtaggagttgcttcattgaggaaacagtgtgccagtgttttcatggtgtggagacttcaaacttgaacataatgtttttattcatttaatcaacaaatatttatgtagcacctaggatggtccagaagatcttggaaatggcagtcctgcttcagacatcaagtgccaacatcaataaaatacctgtgtgtctgtgtcattgccacatttatttgttcagttagtatagttggttacatttctctttattttattggcttaagtttgatttattttcatatttttacagagatttatatgtactgtagtaatgtttttacgtaaaaagaattagtgaccttagaagcaccgatagaaaaaaaaaacacgaaacttaaggaaatttaagaaataatgtatctttgtcatttaaactaatgacaagttcatggaaaggtaaatgttttcttgatttttttggtaagaaaaaagatacctaatttatttcagtttacactctgattaaagtttctgtggattttttttttttttttttggaaattgcttctgatgtggggatttttataatgcttttagtagctcttcatatattataaattaaacatgttcatgttttgtatatgcagataattttttccatcattttctttttgttttccttttcaattacttttgtttaaagtttgtgtaattagagttgtatctcttttctgtgtagggtctttattttgtataagctttaaaagttgtacatcctccaggtttagtaatattagattccatgttttttttttcctatagattattcttgttgtcttttaaacttaaacttgtattgaaatgggttttggctttgaacaacccctaaccttaaacttgtttttgggagggtttgtgaaaaatgaggtcatctttacaagagtagagasagtattagagaagtcccacccgagggtagggtaagagtgctgcaaacagggaaggtagtttggtgtgttaatggcacttctagagaggttgtcagagtctcttggttttaatgggtttgtttctggtggctagtattccctggggttataaatgttaatgaaggctggaggttaataaayctccttgggctgccataacaaaataccacagattgggtggctgcagcaactgaaattaattttctcacggttctggargctgtacgtgcaargtcaargtgctggcacagttgctttctgatgagggctgtctttgtggcttgcagatggctaaccgcctygttactttgtccttacatggcctttcctttgggtgtgcgcactcctggtgtctcttcctcatatgaagacaactcctactggattagagcccactgttataatctcatttaaccttagtcatctccttaaaggcctcgtcttcaaatacagttacattggggggtagggctccaacagaagaattttggtggggaggggcacaatgcagtccataacaaagcccaagtctggtattaatatgtctatctgggccgggcgcagtggctcatgcctgtaaccccaacacttggggaggcccaggagggcggaacacgatgtcaggagattgagaccatcctggctaacacggtgaaaccccgtctctactaaaaatacaaaaaaaagttagccgggcatggtggcgggcgcctgtagtcccagctactcgggaggctgaggcaggagaatggtgtgaacctgggaggcggagcttgcagtgagctgagatcacgccactgcactccagcctgggcgacagagcgagactgtctcaaaaaaaaaaaaaaaaaaaaaaaaaaaatatatatatatatatatatatatatatatgtctgatcaagtgtagggtggcaccatcacatctgctcaatcatctagaagagtttcctattaagaggaaatgattttcccagtagaattgtaggctctctcttcctgttgacttagcttcatttggaaagtgtcaagaagagaacataaatgcagctcatgtgacctgtgatctcatacttattcctaatctcaatgagacagcacagatgcactgtttattgtgtggcaagtctcttgccaattgaagaacgaaggcagctgctgaagggagggttcctctatctgttttcctaaaacacatctgagtgtttgagtatctttcatgattagaagaattaaatcagaccaaacttcaccaaaatttggatttgctcttgttctctttttctacatcattctttaaggtttttttttgtatttttaggaaaaaaaaagatactcatgtttggctactgcttggtgaaacattatgccttggaaaccttcctactcttttgtggcttggaagaagaaaattggaaaagtgcttatgtcaaatgatatcatctgctgtataaccactaacatgtcttctaatattttgaagataaatgccttgttagtttgcccttggatttggggctttctaccactatataaacagaaatgaaggttaagttgggctttttgttagcttttcaatgctttggtaggatctttcagtaatgataatggctgccgtttttgtttgttggtttgtttgtttgttttagagatggagtctcgcgcttgttgcccaggctggagtgcagtgttgcaatctcagctcactgtaacctctgcttcccgggttcaagcaattcccctgcctcagcctcccgagtagctgggattataggcacttgccaccacgcccagctaatttttgtacttttagtagagatggggtttcgctacgttggtcaggcttgtctcgaactcctgacctcaggtgttccgcctgccttggccttccaaagtgctgggattacaggcatgagccaccgcgcctggccatggctgccatatattaaaaccttactacatgtgaggtactcttctgaattatttgcttgtctgtctttgtttgtttgtttgtttgtttgtttgttttttggagacttgaactctcatgtgaactccaggctcatatatttgatcacctacagtatttccatttggatgcctaagagccatcttgttgttaacagccaaagcaaactcatgtgtctctaccaccacaagctgcttttccctctggtctttcactatatcrataaattaggttttctttagtctctttagaattggatccttgtctccattgctcctaccctgcttctgaggagccctcattgcagtagttttttgattagtctcttgcttctttttgttccattctttttatttatttttagagatgaggtctcgctgtgtcayctaggctggagtgcagtggctcgatcgtggctcactgcagcctcaaactcccaggctcaagcgattttcccacctcatccccccaagtatctgggaccataggcgtgtaccaccacacctgactaatgtacttttttattttgtgtagagacaaggtccattctgttttttcttccacagcagcccaagtaattcttccaaaatgtgaatcaaatcatgtttcttctctagtccaaattctgtaatactttcccatctcagtaaaaataaagacccaaggccttactgcaatttatgaggctctgcatgaactgacctttgtacctctgtgaactttctgccagctgcttttttgttggccccctctgctccaaccacactgtcctctttgctgttcctgggcaaaccaaccccgacttcaggagcctttgtgctttctaatccctctacctgggatgctcttccccaccatgtgcctagggctcattctctcatttccttgagtcctctgttcagatatcacttttttctataatacctcctcacccacttctttctcagttttgtcgtttagtcactgcactgatcaccacctgatatatcacttcttttgtttttttgagacagggtctcactctgttaacccagcgctgaagtgtaccagcgtgaacacagctcactgcaagccttgacctcttgggctcaagtgattctcttgcctcagcctcccaatagctgggattactggtgtacgccaccatgactagctaattttttaatttttttgtagagatgaggtcttactatgtggcccaagctggtcttgaactcctggcctcaggcattcttcctgccttaacttcccaaagtgctgggattataggcgtgagccaccactctcagcctatatcacatatttactgttgtctatttcacgctagaatatgggctccatgagagcatctgcttaggttttcttaaattgctgtgtccgtggtacctcagacagctccctgcacatacatagttgacacttcatcatatttgaaaggatgaatttgtagaagttttttttatattgctgtctattatatacaattaaaaaatatttttttttcccagacggttacttaggttttcacaaccattcatgtactttataatccagccagtatttgagtctactgtgtaccaggctagtacttaagtgataatcaaaataaatgatctctgtcttcatggagtttatagcctagtggaagaaatagccagaaatcattctagtaaataaatgtaagattgtaactgtaactagtacatgtggtatcagaactatattagcaaaatataactttgttaaggaaaccatggaaggcttttttgggggggtgggggtacagagtttcactcttgttgcccaggctggcatgatctcggctcaccacaacctccacttcccggattcaagcgattctcctacttcagcctcccaagtagctgggagcacaggcatgccacatgtggctaattttgtatttttagtagagacggggtttcactatgtcggtcaggatggtctcaaactcctcacctcaggtgatccatccacctcggcctcccaaagtgctgggattacaggcgtgagccagtgcgcccagcccatagaaggctttttaagcatgtgatgtttgagttgatcaccaaaggaaaagtaggtgaaagagcctttcagtaaaggtgaatggcatgtacaaagtctctgtggtagaagatgcatgaggcattgaacaaactaaataaaggccagtgtgacttgaattcagagagctgtgtgcaagctggagaggctggagggggcccactgggcaaggccttgcagaycataccagcaattttgggactttatcctaatagtaatgggggtccactgaaaagttatgagagtgagagagtgagttattgtggtaaaatctggcttttaaaaagacaactctatctttgttgtaaagaatggtctgaagtggagtgaagagagttggttttggactagagtgctagctgtgaagttgaacaggattggatagattcaagagaaatttttagagagaaaatcagtgagccttgtcaaggctggatatggggtaaatgagaagagggtttaaaagatgacttcttggtctctgttttgtttaattggatagtaaaccctagaaaagaatctgatttgcgagtggttattacaactctagtacaggacatactgaatttgtgctgcctttgatatatctaggtaaagatgtcaaaaagcactgaaagtctatttatagaacaatataaacgattatagaacaatataaacgatatggggaaagatctgttacaacattaaattaaaaatctgtgaaatagtattctacagccttctgtccagtgtggtagccgctagacacttgtggctattgagcacttgaaatttggctagtttaaatttagatatgcaggctgggtgcggtggcctatgtctgtaatcccagcactttgggaggccaaggcaggcggatcacctgacgtcaggagttcaagaccagcctgggcaacatggtgaaaccccatctctactaaaaatacaaaaattagccgggcatggtgccaggcacctataatcccagctactcaggaggctgaggcacaagaatcgctggaacctgggaggcggaggctgcagtgagccaagaaagcaccactgcagtccagcctgggtgacagagcgagactctgcctccaaaaaaaaaaaattagatatgcagaaaatgtaaaatgcacaccagattttgaagatttagtacccaaaaaaaggaaaaataatcttatgattttttgctattgatcacatgttaaaatgatatttcacatatactgggttaattaaataaattctacaaaattagctaggcatggtggcacacacctgtaaatccagctacttgggaggctgaggcaggagaatcgcttgaacccaggaggcggaggttgcagtgagccgagatcgcaccattgcactccagcctgggtaacaagagcaaaaccccatctccaaaaaattaaaaattaaaaaaaaagtttaaattatttgaccaatttcttcttacttttttaatgtgaccatcagaaaaattaaaattacagatgtgattacattatatgtctattggatggagccgttctagagtgtcagttcagctgggtaaaaggaaattcacaggaagaggcttctagaaatacaccagaatgtcatcatttataggaatgttttttgtttagttttattgttcgttctttttcaatttcatataaattattttcagacattaaaatcctttatgcttttagtttcagaaggtcaagataatttgatctttcacttttatactctgtaggaaactttagccttctcaatggctgtaaatacttcaatgaggtcatcaaaggagtagaattcatcctaaacaactactttcaarcatggtttctatcaccacctgaaacatgttcattatcagatttttatgctgtatcattatctttaaggtgcagaaaatagttctgatacagaaagtgctccttctccttcaccagttgaagctgtcaagcccagcgaggacagtcctgaaaatgctacttctcgaggaaacacagaacctgcggttgagcttgagcccaccacggaaactgcacccagtacatctccctccttagcagttccaagtacaaaaccagctgaagatgaaagtgtggagacccaggtgaatgacagcatcagtgctgagacagcagagcagatggatgtagatcagcaggagcacagtgctgaagagggttctgtttgtgatcccccaccygctaccaaagctgactctgtggacgttgaagtgagggtgccagaaaaccatgcatctaaagttgaaggtgataataccaaagaaagagacttggatagagccagtgagaaggtggaaccwagagatgaagatttggtggtagctcagcaaataaatgcccaaaggcccgagccccagtcagacaatgattcyagtgccacgtgcagcgctgatgaggatgtggatggagagccagagaggcagaggtgaggctcgttccataagtcctcccygtgcttactctgctggttggtgactgaatcacagggtggtgctggctgcagacatgtctcctatgtaaatattggcacgttataggtagtctgtacaattttaatattgggctgatactgttctgtttaaataaccacaaactattgtatgatcattttaatgaaacarattatacatttctcctatatctgtcttgttacgtgtattctgtatgatagcataacagggaatttcaactaataaagttgtgaataaaccacagataactgttgtgccygaggagggcagcagtgggatgtggtagaagaaggtggaggctagaggcattgaggcactcccgcttctctaaggcagtgcaacctcaaaacaaggcctaccagcccctacttattaggtagaagaaaatgctgaaaagagagacatgttcagtgttctgaaaatttttagaaagcataatttaaatgcaaagtaatgataattatgaccacttttttgtatcagttaacattttagattgttcatatttgtaatttaaaatatcaggtataatgcagattaatttacaagttttttttctttttttgagacggagtctcgttcttccccaggctggagtgcaatgacacgatctcgggtcactgcatcctccacctcttgagttcacgtgattctcctgcctcagccttctgagtagctgggactacaggcacacgccaccatgcttggctaatttttgtatttttagtagagatggggttttgccgtgttggccaggctggtctcaaactcctgacctcaggtgatccacccatctcagcctcccaaagtgctggaattacaggcatgagccaccgctccctgcagtttacaggtagctttagtcattaaaggttaattaattatacaaaaaatgtatcatatctttatggtttttgtaaaaattacagtaaaagatatatattttacaggtacagttattactttatttaatatattttatttcctggtgtttccttttccttaaaagacattgaatcacttataattttagtagaatgataaattggtgcaaattctagaagtgaattagactgaaacatcacttaatccgaacccaattaaaccccactccttttttttctttttaataagaataaagagacaagctactcaacagatagctaaattctcttcaaagtttatctttcagagtgtgtcttggtgtcactgtattttcagttcatatccaatatattttatatcttatgtactccataatgagatttgatactagaataataatatggagcattatagtgctgattcctcagagtgttttatatagtagatgctagaattttcatcagcatgaattgaaataaaataggtgttctgcttaagtgttggtttaccagaaaatttgactatcactctttttctttcacctcagagtaatctagattttattttaatggtgtcagtctttaactgcagtaaacataaatggattcaagctgtgtagtccctttttaagcattccttattgaaacatctcatctaaataaggattatctgtgttttgcactgttggttttggtaactatacgtgaaggaaaaattaggtaggatggcagtaattttaaatggtaaacatcctaagagatgaacatgatagtagttttgaaattcagaaattccttggaaaaatatgatggtttcttaatgacacactaaagtctacactgctcccaaatgaccgaaataacactttcaatttcctatagctttaatataatctttctttatatagtatgtgaattgtttttttaaatacattctgattttcttaccaatttctacatttttaaatgttcaccttcccccagtgaccatgacaacactgggaaatatgaccaggcccataaagcatgacactagtacaaaatttcctcaagtttatatattgggcatcctaaacttgagtgtaggtatgggcaacatcagccggtggagtgtgagatggcagggactatggtgagcagaggagtgtgtgctcatgtgagcggggtggcggctgctggatgcatggcaggtcgctgctgttggggagtgctgatttcatgttgttggttctttccatttttcatgagaagccagaggtctggaattttggatgaaattttcagtttaaaaatcacagcagcttattcaaatatttaaaaaaatactctgtgatcccaataaaacatcctctaacaggtaactagtttttaacccatgttaggatatttgtggtaaattaggactgaacagttttaaatggacttcgtttagattgttttgttggttagatatagacaatacagataaatttcaacctgtaagtcagtattaggtttcttttttcttttctttctaatataaaatgctttgcaaatttgcatgtttttcttgcacaggggccatggtaatctttgtatcatttcaattttagtatgtgcgctgctgaagtgagtacgatattcagtttctttatctggaaaatcagctttgtaggttcctttttccttaactgtccaaatattttatatgggttaatatatgtgtgtccatgtgtccatgtgtgcatgtgtatgtacatactaacttagaagaacttatagtgattatatgtttgagtcttaaaaatgtattcatttatcttttttttaaattgcaattgcagaatgtttcctatggactcaaagccttcactgttaaaccccactggatctatactcgtctcatctccgttaaaaccaaatccactggatctgccacagcttcagcatcgagctgctgttatcccaccaatggtaagtttttattgtgaggaagaaaactaaatatgaaaaactgagacctttatagacatatttcttctgttctttaattggttcttgattaaaaaaatagtggtacaaaacataacatgaaattaataatcgtaaccaattctaagtatacagttcactcgtgttaagtgtgttaagtatattgacattgtttagaaaatgatccccaggaccttttcatctttcgaatgcgaaattaattaaacaactcctctcttcctcctgccgcttgccactggtaaccactgttctgctttctggttctatgaatttaacacacagtttagataccaatgaactgttctttcccacaatacttactataccaaatgtatgggctttttcctcacaccaacgaattctccacctctttggtcaccaactaggttcctacagttcagttcaattcggacaccaactacctggcgtaatcatctaataccacaagtgtaagggctcagtaccacaaggctacccccatttctgatgccagttctataggtattgggtccccaggttactcacgcttctgactaggctgcagactggggattcctccgactctcctcgtcaggttccataatttgctaaaatgcctcagagaacttaggaaaatgctttacttataattactagttcattataagggatataactcagaaacagccaaatggaagagatggatcgggcaaggtgtgcagaaggggtgtggagcttctgtctcctrtctaggtctgcctccctcccagcaactccacgtgttcaccagcctggaaactcttaaaaccccatcatttggggtttttatgaaggcctcatcacataggtatgaatgattaaatcattggccattggtgatgggtgcatgaacctttagcccctctcctctccctggagggttgggggtggggtgagctggatggagctgaaagttccagcccttgctgggcatggtggtgcccaacagtactcccagccctgtattcccagctatttgggaggctgaggcaagaggattgcaagttcaaacccagtctgggcaaaatattaagagacatcctaccccaatccccaaagaagttctagcctcctgccttgtggttttttgggctgtcagcccttatcctgaggcaatctagaggccccagccaggagtcatcttgttagcatacaaaagacactcttactgctctggaaattctaaggatttggaacaaaaaaagtctttgggagaaggaccaaatatttaatttttattgtgccacattatgtcatataaatgaaatcatacagtatttgtcattttgtgataggcttatttcactcagcataatgtcctccaggtatacttagcaggtgccagaatttctttatttttaaaggctgaataatactccattgtatctgtatatcacattttattcattcatccattcatagacatttggattgcttccacctctggactattgtgactagtacctgtatggtcagcccttgattttagcaccttggtttttcttacatcctcttgtgctgggcttgggttagggagtgctaagacatatgggagagaagggtaggaagatgctgagtctaactttgagtaaactctttgagataaccaaaggttatatccttagtacattgctttttcaaatgacttgtgatgattgattgaaacggtcatttccagttaagaaaaaaaaagaaatataatgctctagccataaatattagtaagtcctgtttttgtttgtaaccacagcactaaggagccataaaacagtagtagcattaagcatgtaattaggttttgaatagttagaataaattgtagagattatggctaactccagtatacaatttcaagtctagtttatttttatattttaccttaataatctacagatttcaagtatattttatttatattttaccttaataatctgtaaaatttgactcatttttgatactgaattccaatcttgggtattgttcttttctttattttattttttttttattgatcattcttgggtgtttctcgcagagggggatttggcagggtcataggacaacagcggagggaaggtcagcagacaaacaagtgaacaaaggtctctggttttcctaggcagagtgtttgtgtccctggtacttgagattggggagtggtgatgactctcaacgagtatgctgccttcaagcatctgtttaacaaagcacatcttgcaccacccttaatccatttaaccctgagtggacacagcacatgtttcagagagcacagggttgggggtaaggtcatagatcaacaggatcccaaggcagaagaatttttcttagtacagaacaaaatgaaaagtctcccatgtctactactttctacacagacacagcaaccatccgatttctcaatcttttccccaccttgcccccttttctattccacaaaaccgccatcgtcatcatggcccgttctcaatgagctgttgggtacctcctcccagacggggtggtggccgggcagaggggctcctcacttcccagtaggggcagccgggcagaggcgcccctcacctcccagacggggcggctggccgggcggggggctgactcccccacctccctcccggacggggcggctgacccccccccccacctccctcccggacggggcggctggccaggcagggggctgaccccccccccacctccctcccggatggggcggctggccgggcggggggctgaccccccacctccctcccggatggggcggctggcctggcgggggctgaccccccacctccctcccgggcggggtggctgccgggcggagacgctcctcacttcccagacggggtggcagccgggcggagggtctcctcacttctcagacggggcggccgggcagagacgctcctcacctcccagacggggtcgcggccgggccgaggtgctcctcacatcccagacggggcggcggggtagaggcgctccccacatctcagacgatgggcggccgggcagagacgttcctcacttcctagatgggatggcggccgggaagaggcgctgytcacttcccaggtgggatggcggccgggcagagacgctcctcactttccagactgggcagccaggcagaggggctcctcacatcycagacggtgggcggccaggcagagacgctcctcacttcccagacggggtggcggccgggcagaggctgcaatctctgcactttggggggccaaggcaggcggctgggaggtggaggttgtagcgagccgagatcacgccactgcactccagcctgggcaccattgagcactgagtkaacgagactccatctgcaatcccggcacctcagaatgccgaggctggtggatcactcgcggttaggagctggagaccagcccagccaacacagcgaaaccccgtctccaccaaaaaaatacgaaaaccagtcaggcgtggcggcgcgcgcctgcaatcgcaggcactcggcaggctgaggcaggagaatcaggcagggaggttgcagtgagccgagatggcagcggcacagtccagctttggctcggcatgagagggagaccatggaaaggggaggagagaggggagaggggagaggggaggggagccggagtcactcttgtttgaacacctccaacactctcaatttttctttaggcaccagaaaatgaccttgttcttttctttagttattttctakttattcaaatatttaaagctcttgctttattcaaaaatgtgttttctatctcaaataataagtggtaaaagtttttaattgtgtacttaccacaaaaagatcattaaacatttgttcattcactgactcattcaaatggacatttattgagtgattagtttaagataatgttcttaatattgtggagagtatttatatattatagcctctgatttcaaaaaacgtatggaccggtctgcataataaggcaaagaggctgggcgtggtggctcacgcctgtaatcccaacacttttgggaggccgaggtgggtggatcacttgaccgcaggagttccaagaccagctygggcaacatagcgaaaccctgtctctccaaaaaaaaacaaaaaaaaattagctccgcatggtgccatgcgcctgtggttgggaggctgaggtggaaggattccttgagctcgagagtttgaggttgtggtgaggtgagatggcaccactgcactctagcctgggtgaaaaagcgagacactgtctcaaaaaaaaggcattaaaaaaaattatcgtaaaggttaaaatgaattaaaatgcgatgctctattaggttaaaaaatactatggatgttttggagaagagggagtgtcttcttaattagacacttacagaagactgcataagaaataatattttcattggatcaaaacagctcatttggcgttatagcaaaaggaggaaaagctatgtttatatggaagacaaagcacaaaggcaagaaagttatgggttttaggatcagtgaataatactacttacgctaggggaaaaactatggaagtcttaagttaccagattctaaaaaaaagtcagacctctagggctttctagggatatttgttattcatgaggtatttaatcctggactgtgttctgggctatttttttaagtattggacaaaacatcttgggttattttcttcataaagtcagagagacagaaaaataaaacagtttcaaactggcaaatactgtgtactgtgaaagcagtgaacaggcctcaatgagaaggaaaacagggagggtatcaccatgttttattggatggttatggatggcctatcttaaggaacagtccatttctatcctaagggaatggctatgtgaatgagttggttgtgggagaggaggagattaattagtcaaggatggctgccaggtttctggctgaagcacctggggttccatgtctaaaatggagagcaactgaagaagaatggagtttcaaaaatgggaagttccctttaacataagttctgagcttccttgagatatcccaagtggagttgttaggtaggccattttatgtaagtgtggaacttggagaaagtgtcttgaggaagtagaaaatttgtgaatcattaacaaatggatgacatttaaatcaacataaatggatgtgatctgccaggcacggtggctcatacctgtaattccagcatttcgggaggctgaggtgagtggatcacttgaggccaggagttcgagaccagcctggccaacatggcgaaaccccttcgctactaaaaaaaaaatagaaaaattagttgggtgtggtggtgcacacctgtaatcccagctacttgggaggctgaggcaggataattgcttgaacccgggaggtggacgttgcagcgagccaagattgcaccattgcactgcagcctgggcaacagagtgagactatgtcttaaaaaaaaaaaaaaaaaaaaatatatatatatatatatatatatatatatatatatatatatatatataaatggatctgatccctggtgaaagagagatgagggatgggacctagggccacaagggacttggctgccataaattagaatcagacagatgtgttgtaatttctgatttttgatttctgttattacagcttgtgtgatttatattgtgatcagttctgaaagaaaactaggtcttgctgtgttgcccaggctggagtgcagtggtgcaatctcagcccactgcaacctctgcctcccaggctcaagtgattctcatgtgtcagcctcccgagtagctgggactacaggcatgcctcactgcacccagctaaatttttgtatttttggtacaaagatacaaaataccagccaggctggtcttgaactcccgacctcaggtgatctgcctgcctcggcctcccaaagtgatgggattacaggcatgagccactgcaatgccttaagcattattcttgaagataactttgattaaaaaatgataaaatcaattcaaccaataacatgacagaaataagcattacattacttgttaagagatggcaattattacattggttgtttgcatatttcgatttattttcttcctataggtatcctgcaccccatgtaacataccaattggaaccccagtgagcggctatgctctctaccagcgacacattaaagcaatgcatgagtcagcactcctggaggagcagcggcagagacaagaacagatagatttggaatgtagaagttctacaagtccatgtggcacatccaagagtccaaacagagagtgggaaggtaggtagatagagctatcaccaagagaacttttatgaagggaaataaagctaaacccaaaagcagtgtccattgtgctttgtaagttgtcagcctcccaactgattattatatttgtcctaacagacacagttccttaaattgaccttaaactatgaagaaatgttagtattattaactactaaaggatgccagtaacatttttaatagcattctagttaatgtgaattttctgatattcatctttgtgctggaagacattataaataaagttatgctttatgttccrttcatctgaattttcagagtgadaattgttgtcctgtccttgaagcaaatcaccttcaagtattacagtgtaatattcacattctctggtagatgagagacacaactttgtgtagtggatatttccaatcagacgctggctaagccttcaccttggcatttgccagctgtgtggccacaggcaagtcacttaacctttcatagctttagttttctcatctgtaaaatgaaaataatagtacacgtctaccttgctgtggttgtaaagttaaggaaggagcattcggtattgttatataacaggtggctctgcattattttatgtataatgtagyacgttattacatattaattagtgtattagtactgtatatacacagtagatactatggaggtacctgttttcattgttacatcactgtttttatttcaagtgatggatttgagttggtccgttgctgttttagttggtgtgtgatacacttttactttctttaaaaaaagaagaaaggggtggtttttatgttttaatacattcttctgacatggttagaagaattggcacatgtttctggttaagaatgagtttatagtctacttatatgctacgatatgcttagaatatcagaatactgaaatagtctgaatgattcagaagattctttacagtactttatttagctaaataagagctattagctttacaatgccatgcattccaagggttatttaatataaaataggaactgtggtacttaactgatcctgctgactctgcccagatcacaccaatattgagttattagttgcctaatacactgaacctcttatgttagagttttaaatttaaacttgttaatttttaaacataaatcttgtgctaggaaaaatgtgaaccagaatgataatatccaccaaggaatataaaaggcgctaaatgaatatttccttgaatgaaggtagaaatattgataacttttaggcttttactctgttgggtctagggaattcttaatcgctagttctgtaattgacacaacatgtactcagtaattacaccttaaaggaatgaattataaatgaatgacataatggagatatccttatcgtgtttcactacagggtattaatggacatcgcaggtgtttgtcttttgaacattcgaattatgaggaaatccgtcagtggaaaatgaaactttagagaataaaagtctctggatgtattccttacatttattatttaggatagattttgtgaagaagtagtaaaagttagaaaaatgacattcagatggtatcatttgttgaacttatgacaaggcataacatcattgttagtaatatctgggtcatttaaatatggatatcataattttaaagcctcaatatcttttattggtctgctttataaaatgagttgtatttgggaactgaagaaactgaaccaggctggagccccaaattctgagactccaaactgtgaattgtatttctctgtgttagtcacattactacacgtggtttagatctcagtggtatcctaatttttaatcataattyagtcatcttaaaatcaaattgtaattatacttttgattagtatgacattaagaattttacagtttggtcgaaggtgatgctctacaaagtagggcaagtttatccaaaggttgttttgttttagctaatctccctagtgtattcatcctgtaatttgtttaacaagtaccagaagtttttccttgagtctatcctgtagttcagtgtataggataacctttcaaataacatttaaatgtttgcagttaagatgcttgtgtctagaatgtttgacaaaaatggtttaaatttaacctcatagaacagtttatagaatgtgaagaatagtgatagtatggatttatgtataaagtatcaccaaatattggtacagtccacctgaattagggccatggtttttacttttcccttcatggtctcttttagcaagtaacaggcagcacttgttgtccaactatttggttgtatttatttctcttaatgtgaatggtataaataattactgtaggtatgcctgttttaagttgcttaaagcttttcccatctgtagaaaaggttgaaaaaaaaccttagagaattgttttcacttaccagtaacatttatacgagttgacctctgctttactgataacttttaagcctcttttctacagtgaaggaactcaaacttaagcatatggaggtagagttagaattgaacttctaatgcaaatttaacaaaattatccaattaaaataagagttaatgcttctatgtaactgaccctagtttgttgcatgtttattttgttgctgttgctgtttttcttttcctgctctgggtacatggtgatgtagatagctgtgtttagaaccatccaatttccatcatttaaaaaaaaaaaaaaaccactactatgaccagtggatttttttttttaaacatagttataaacttactggaaatggtaaaataatcagacattggatttttaatacattatcatattaaattatctaggaaagtgattttcttttggagttggttatttcataaatctgttttctcagtattaggacacttactctaattcattatattaatatgtcaaagaaggaaaaagtaccatcgtcttgatggatacaccagagacatctgaaattccacacccagtcctttagtgagacactattgcactgtggtttagagctaacggtccggaattatactgcttttaaaaaaatcgctggtagaccttgattgggcaattagatgtgatttttctgagcctcagtttcctcatctgtaaaatggtattaataatcacattggtcttgagggctaaatagatattgtatgtaatgcacactgcctagcacttgaatatcagttgatatttttgtaattgtttctgatttttaaaagcaccttacaaaagatagtgtagtaaggaaataagaggtttaggtatttgaagggaaaagacaaattatttacaggataagattattcacctagaaagcctaaaagaatcaactgaaaagttattagagctaaaaggaaagttcattaggtttttcagaaaaaattattacacagaaatccgcatctttcctgtatgtctgcagtaatcaggtttatttatataaactcatatatataaaagagatggttttcttaccaatatgacatatctaggaataatttttaacaagcaagggatggaactatctgacaaaaacaagatttctcaactagaaaactcattattataaaatrtcatcacstgtttattcataaatttaatacaagtctaatgaaaattctatttattctttgttttgagaggaagtactcaatgattttaaatttagatttacttggaaagataaatggatacaactaggtaatgaaaataataaataaaatgagtgggaatttattctgacagacattaaaatgctacaaatctaagtggtcagggttacaaatgagttttactttgtgcttttttgattttcaaaaattacagatgtttcattttaaaaagaaactatatattttaaagtcttaaatatgactgcatttctggcgtgccctttaaaatatttaaagtttctttatgctttatgtggagataacttacatgagaagtaattttcattagtattattgtagttatattcatggtttttataagcttatgtaggatttttgaattagtttgatctgcatcttttgaaaggcttcttccatttcttaattaaatatatttctgtgaatattagcaaggagtgagcttcaacaggctaattataagacttgtgaaatcctcgcaaagctaataacctccagtcaggccagatttgaattaacagaattgcttgataatctgatgtttgcctgttgtgattttattgcatgtgaaaacacttgattctccttaagaggaaagagaagttctttttcctttaaagggaaaactcgtaaatgaatttttgaggatacacaggagatttagatttacaggatttcttaacttctctgtgggtgaattttgcccccaggagttttagactttaatgttatagtcggatcagcccctggatggtgtgggcttggtcctttcacacttactattttaatttggggttcttcccttattttgataactttaactttcataggaaaatcagtcgcctatatgccttatgctgaggtcaaacgtgctctagaacaggaagcacagatgcacaatactgcagcaaggtcagcctcaccgtgtaggctttctccaagagaagtcagtaaagccgctccacagcctgatatgagtgcagcccgctatagtgtcccgccaggtaaatatcactcctctgtgcagtggctgctggccatccacccacagatgttccacgtgggtggtttaatctcgtgaatgaactgctcttccaggacgtgtccttgctgtttcagaatgactttgtttctctgcgttccatcatcagttgtatttagttgagttcactgggccactgggaaatttgtgttcacacatttatactgtgacattgactggctcttcctttaagaagagtacatgaatttgtaaaagtcttgagatctccccatccccaaaattcaagtgttctgtgagagccagaatcagtaagtgtttctcaatatgcaagatgcaaaaaggatgtataactggttgtcagtcatgtctgcgcattctctgaagtagtgttatcagctgtttttaagaagtaccctaagagtgattggcgagagagaaaaaatttttgaagactgatgtttgctatgctaagcrgaagtttgaaataagcatcagcttgaaagctgtggtttgaaagggagttgaatatttcaaccccacaaatagtatttgtgacaaatatgtatacaggcttacgtgaatgagaaatttaaaatagaaatgttcattgttggtttcatcttacattttttaattagtgatttaaaaattcaggaatgactgagagaggtaacatgttgtaaactaggaaatggactagtttaaaatcatttttctttccttttaaaagtccttcagcctgctccacatcaagtgataactaatctccctgaaggcgttcggcttccgacaactcgaccaaccaggccaccgccccctctcatcccgtcatccaaaaccacagtggcttcagaaaaaccatcttttataatgggaggctccatctcacaggtgaaacgacttctctttacagtagatttcttgttgaatatggctttgttaaaacttgtcctccctcctcgcactgatttgtcagagttgtaataaataataatctgtctgaatatgaagtttcaagagataatgaccagaagwtgcagcagtcactgtactcttgccacaaatcagaactttcagtgagttatgtacccagattgagtggtcataacataccacccatttaattacacttggcacttggcataccacttggtttaatttacatcactctaaacttaccaagttttaaacttagtttcaaacagtagaatatttgttcactaacatatggtaaaggctcaaaatattaaattgtaggtggttagtattataatttattctgactttggccactaaatcttttttctggttcattactttttaaaaaattgagatatggtctggtcttcacagttccatcagttttgactaactgtacatcagtggtcacacccctgtcaacttattgaacacttccatcacttcagaaagttttctcatgttccttcccaggccatctccccttccactgcctgaagcaaccactatttgatttcctgttgttgtagattagttttgccttttctagaacttcctgtgaatggaatcaaacatggtgtactcttttgtgtctgtcttctttaacccagcataatggttttagggaattcatccagggttttatgtaatcagtagtttcttcctttttattgctgagtaataccagtttgtttatccattctcctgttgatgaaaacctgagctatttccagtttttggcagctatgaataaagctggtcattcttgtaatgggttctttgtggacatatgtttttatttttcttgtacaattacctgggagtggaattactaggtttgtgtatgttttatacttttccagaatggttctacaattttatgctgccactagcaatgtatgagacgtgattgctccatttgctgttgtcaagtcttggtcattttagtcatacttggtgtgtagtaatatcttattgtggttgtattttacatttccctgaaaacaaacaatgttgggcacttttcatgtgcttattggccatttgtacacctatgaagtgactatttaagtctgattatctgtttctactgggtctttttgatactgtgttgtagatctttattatggttgaaagttctctgttagatatatgtattacaaatattttctctgttttttgtctgtttattttcttactggtattttgatgagaagtttcaaatttttatatagtctaaatatatatacacacttttttctcctatgattagttttattttgctaagaaatcttggcctgctccaaggttgtgagatattcgcctgtgttttcttctgaaagctttataattttggcttttatattgaggcatgtgaccagtctcaaattaatttttgtgtatagtatgaggtcaggattaacattcatctttatttaaatttctagttgaaaaatagcaccagttgaaacgtcttttactcatttgatcgcttcagttcctttgttagaaatcatttgacagtatatatgggtctgtttctgcactgtctccatgctgttccactgatctacttgttcatcgttttgtcagtaccacagtcttgattactgtagctttattgtaagtcctgaaatcatgtagtataagtcttcagtgtttttgtttttcaagattgttttgactatttgatgtcttttgcattttcatataaattatataatcagcttatcaatgtctgtctcccccctttttttggttcccaagttttattcaagaactcatacaaaacattccaggtaaatgagttataatcctcatcttccttctctttgtcctggttaatttggaagtaacacaatccgaaattctctttgctattagcagctacgcacgaccaatcacatagcttattcttcagatattttttgatgagctatttcaaataccctttggaaaaaggcacctcagaagttacggtgcttgtgttcttgctcctttcaatagttactacccctccaccaagattcccagcttttccattcactttaattctgtcttggagaaactgctcacaattggcagcatcatctgcggggtagatccagtcaagggtatacttcagaacctgctttttttctttttttgcccccactttttcatgggcacctggcagcagcagaggcagaaacaatctgtttgtcagtctacttaaagaaaaaaaattctgctgggatctcttctcttctctttttttttcttttctttcgccacttcatttattttatttgcaggagttgaaacatgttttaagggtgatgtttatttccccccccaaacatgaatcatttaagtaaaaccaacttaactgtagaaatgtagcaaagtaaggggaaagtagcacaaaccacccaagaggcaaaggttgtggggaagaggtgggtgcagtgagcatttaacatatgcataaatgctttacgattcacctgctcagcactgcctccccagaaggcgagcatagggaactattttacgaggatgtttccccccaaacatctgagaatgcttcaaattatagtttaaggtttaaaagaccaaaaaaaaaaaaaaaccatgaaccacccatctgctgggatttttgttgggattgtattaaatctatagatcaatttgaggtagaaatggaaatcttacatcgaatcttctaatctatgaacttgtatatctatatctctcagcagcgctttaaagttttcactttagagatttgtatgtgttttgtttgatttatatttggctatttgattcctttaaattttgtttttgttttttttttttggacaaagtcttgctttgcagtagtgtgatcatagctcactgtagcctccaactcctgggctcaagcagtcctcccacctcagccttccgagtggctaggaatttttttttttttcctttttttgagacagagtcttgctctgttgcccaggctggagtgcagtgacacgatctcggctcactgcaacctccgcctcccagtttcaaacaattctccagcctcagcctcccaagtagctgggactacaggtgcacgccaccctgtctggctaatctttttgtatttttagtagagacggggtttcaccatgttggccaggatggtcttgatacaggaatactgaatagtgaattggtgaacatggacatgaatttcttgttgctcatcttagaaggaaggcattcagtattttactgttaggcagaatgttaagtttttcatggatgtctttcatcagattgaagatgtttccttccgttcttagtttgctgagacccacccccacccctagttcttatatttttttagctccagaatttctattttgttctttttaatgatttctttctctttgttggtgttctctatctggtgaagtatcattcttgtactttcttctttttttttttctttttctctctcctaaaacaattctgttgctcaggctggagtgcagtggcatgatcttagctcactgtagcatcagtctcctgggctcagtcaatcctgcctcagcatcctgagtagctggaactacaggcatgcatcactatgcctggcttttaattttttttttattttttatagagacagagtcttaatatcttgttaaggctggtctcagactcttggcctcaagcgatcctcctgcctgggtttcccaaagtgtaaggattaaagaaggcaggccactgcacctggcctcctttaatttagacatggtttattttagttcttggaatacatttataatagctgatttaaagtctttattcctgagcccaaagctcaggaatattttctgttccctgctctgtttcatatgtatggctcacactttcatgtttctttgcgtatcttataatttttggtcaaaaactggacattttgtataatgtagcaactctggaacttggatcccccccacccccacttttcttttcagagcttgttgtttcttttggctgttattatttgcttagtgacttttcttaactaattctgtaaagtctgtattatttgttgtgtgtagccactgaagtctgattaacttagtgatcagctaatgattagacagacatttccttaaatgtctaaaatcagtaaaatcagcctttgctgaggggtgctctttatgtgttgggcacttaacagctttgccttagtctttacttcctggcgtgcagagccttaagggcagcctaagttgagagcagtggggccttcccatgtctttcctaggcatattcatagccttgcacatgcatgtagcattctaggttctagggaatatgttggagtttttcagaccccatgaacatctcattccctggcttttccttttaagtgttttggttagcctgttgtttaccctggctgttatctactgtctcaggcagtggagaagttaatcagttgcctctgattgtttttgacaagtctgcacctcctctcccactccagtcaggtcaaataaagacagctttgtgaatggagtctcccagagaaccaacagagaagtcaaacaatgacagttatctgggaatgaggcttttaaggagctccatccttgctctttcccttctagtggctgccaggcagccaccataggtttgcactatgattgagtgcttttggttttcaacacttccatagagtttgatcaggagaatgagaatggaacaagttaaaatgccacaaagcccattgtttttacctgtttttacctagattcagctttttttttttttttaaataaatatttccagatttctacaagcctttggttaatttccagggttctttaaaagtcgattcttacattgcttgagactgggaggcggaggttgcagtgagccgagattgctccactgcactccagcctgggtgatagagcaaatctctrtctcaaaaaaaaaaacaaaaagaaaacaaaaaaaacaaaagaaaagaaaagaaaaaaaaaggttgattcttaaaatttttccaggttttcttgttgcttttatggaagagagtttttggaagtccttattactttgctgtatttgctgataccactctccatagcatttttagtcggaatgaatattaataatagtagcttacattttgattgcaacatataagtgctttatttatgtaatttattaatagtaaatactatttacatgtaatgtatggtaattttagaagacatatcctactccctttaaaattttttttatatttaagcaatctacgatgaagattttcttgctttacaaaaactattcttggttttgggtagaaggggtataattttttttttttttaaacagaaatgggaatgctgactttgtgaaattgaccttgtgaaaaaaacaatgtttgcttaatctttaaatttttttttgtttttttcttagggaacaccaggcacttatttgacttctcataatcaggcttcctacactcaagaaacacccaagccgtcagtgggatctatctctcttggactgccacggcaacaggaatctgccaaatcaggtcagtgagttaatacagtcataatgcatctacrtttgtagcatcacagccagtaatttagtactggattgtttcatgtttctctgcctttccacagctactttgccctacatcaagcaggaagaattttctccccgaagccaaaactcacaacctgagggtctgttggtcagggcccaacatgaaggtgtagtcagaggtaaaatatgctggttggcagaaatgttaaacttttgtccccaataaatttattaaagtaagttattaatatattttaatgatgggcttttttaactatagtctttaaattctaaatttgttttctttccatgtaaaagtcattttaaaaccttgaagttccatgtttcagcagttctttagtattattttggaagtacattttaataaaacaaacatgatgggttttgtgctgcttttttcttttcttcttagttgagtactctcccaagtaggggctgtttttttatgttttggggcaggggctgggggtgtaatttgctaatagctttgtttgtattcaggtaccgcaggagccatacaagaaggaagtataactcggggaactccaaccagcaaaatttcagtggagagcattccatccctacggggctctatcactcaggttagtcacgatcatctctgatatactcaacagaagctcaggaaaaaatgataaataattcttagcactttggctattttgtggcttaagttcatttttctgcattatgggactgggtctcataacctagatctgcaaactgtctccacagagacgttaatgtgatcattttgactacaagctatattatgaatactttggttcatttgaaaaggtcacttatttgcaaactggaaaaagaaatatgttctaattgatgcagctcttattgtcttcctggaaaagcttttaccatgtgtttagcctaaatagaaattgagaagaaaatcattacgaattatttgcttacttttgccctggtggagatgtagttgtagaatctcagtatgtgggctgccttgttagaatctaatgctaaaccaggaaatgtggatggtattaacaaaagcaccagaagccttccaattttgggctaaatacatcaccaattttgattaataaaatttctctcagttagttgttaattttaacttgatacttaagaagttcttagcctctttatgtatatgcataagagggaaaattctgttttgggaaatcattgtaaacagaaacctgtgccttgcattttctaaagtgttcactcattgtcacaagttttttatttgtctagttactatcctctaagacagttgttctcaaagtatgatccccacaccaggagcatcagaatcacctagaaaattgctacacatataaattttcagatcttaccccagatttactgaaacccaacccttgttggtggggactggcagtctgtgttttcccaagcccttagctgattcagctagggctttgctggccaagtgtggtttgtgcaccagagcattggcatcactgggatgcttgctagaataatgcagaaatgtcagtccgcactctagatcatgtgaattaaaatccccattttactgaggttcccaggtgatttctttctgaaatgtagtttacatactacttccttgtggttaagttaaaaacagaagaaaagaaagttacatactgactcttaaaatctctctttttaggccaggcgcggtggctcacgcctgtaatcccagcactttgggaggccaaggagagcggatcacgaggtcaggagtttgagaccagcctgaccaacatggtgaaaccccgtctctactaaaaatacaaaaattaggcgggcatagtggtgtgcgcctgtaatcccagctactcaggaggctgaggcaagagaatcacttgaacctgggaggcggaggttgcagtgagctgagattgtgccactgcactccagcctgggtggcagagtgagactccgtctcaaaaaaaaaaaaagtctccatttatattgggtcagtgtgtttctgttttaacagcaagctaatactttaatatggacagaggaaagtaaatgggcctgtatgtattattctttctcttcactctggcatccaaactgtgggaagaaagagtatgaactgggccaaaggagactaaattttatctgtttaaaatctgtttgtgcacttgacatgagtacttctgaagtgggcgttaaggatttctagacacttactaatgagttcacttaatgactggacaagtaagtgtatgtctcttatcgcttttcttaagcatatggtatcagattgtgctctctagggttttagcagtcctcagagtatagtggtgaccctaaatgtgagtaaactcagtctaggcctctaactcctattttacaccaagctgctctctcttgcaaaatgctctacgtattagattctatgaacaattttccttgaaggaagggctcgctgcttaaaggaagggtaaaaagaatcatggtcattggcaactccagaggaggattgatgatggtgaaaatatagataacctgacctaaactgaatcagtgtcaaaacacagaggcatccaaaggcctaacaacctagtagtcagtttgatatttgaaagttatttttccctcatatcacaatttgagaaaaagttgtagtactctaaatttaaaactactttatcatcttatttttattagaaaatttatattaggttggtgcaaagatgtgatttcggactgtgaattttaaatcattataactaggctcaaacgcatctttatcaaaataggaaccattacaatcaacacatttttgccagtgagaaataatcttgttcattcctgtagcataaaaatacatgcttcgagattcaacaaactcttagaaagcattttctttctcttttcttttctcttttcttttcccttcctcccttcctcccttccttttcttttccctcccttctcccctccccctcccctcccccctctcctcccctcccctatcctctcctcccctctcctccccctcctccccccctcccctctcctcccctctcctcccctctcctcccctctcctcccctctcctcccctctcctctccttccctttccttacctttcctttccttcctttttgcttgcttgcttttttgacagagtcttgctctgttgcccaggctggagcatggagtgcagtggtgccatctcagctcactgcaacctctgcctccagggttcaagtgattctcctacctcagccacccaagtagctggaattacaggtgtgcgcagccgtgcctggctaatttttgtatttttagtagagatggggtttcgccatgttggccaggctggtcttgaacccctggcttcaggtgatccgcccgtcttggcctcccacagtgctgggattacaggcgcaagccaccacagccagccatggaaagcattctgctgcttgtggaagaattttccctgcataaagttgtcgagatgcttgaataagtggtagagagagaggtcaggtgaatgtggcagatgaggcaaaacttcatagcccaattcattcaatttttgaagcattggttgtgtgacacaggtgttgtcgtggagaattgggctatttctgttgaccagtgctggctgcaggcattgcagttttcagtgcatctcattcatttgctgagcatacttgtcatatgtaatggttttgccgggattcggaaagctgtagtggctcagactggcagcagaccacctttttttggtgcaagtttggctttgggaagtgttttggagctgcttctcagtccagccactgaggtggttgtcgctagtttttgtataaaatctacttttcatcggatgtcatgatccagttgagaaatggtttgttgttgcctagaataagagaagacacttcagaaagacagtttttaaaattttcgctcagctcatggggcacccatttactgagctttttcacctttccagtttgcttcaaatgccaaacaaccgtagaatggttgacgttgagttctttggcaacttctcgtgtagttgtaagaggatcagcatcaatgattgctctcaattggttgttgtcaacttccgatggccggccactatgctcctcatcttcaaggctcttgtttcctttgtaaaacttcttgaaccaccactgcactgtatgcttgttaacagttcctgggccaaatgcgttgttgatgttatgaattgtctctgctgctttacaacccattttgaacttgaataagaaaatcacttgaatttgctttttgtataacataattttcatcgtctaaaataaatataaaacaccaagtaataagtcattaacaaaaaaagtgacaaatgcacattaaaatgatatattgcgtaactacattcagaagaaaacaagaacttaaccacatttatttaagaatgtattccagtatcaaacggcaaatttcaacaacgcaaaaactgcaattacatttgcaacaacctaataaaagctgttacatttacttgattttagtccttaagagaaacttctgagagttaaatcctgtaatagagtcctcacatgaaggtgagagcaaagttgattcacctaatgtacgtgtcataattttaagtgttatgtggctgagttgaaggatgaaggtacaggatgtcttcatgttgataaaaattcaatgtctaatttcctttcatgtatgtgtgctttcttctttgaagctatagattagcctgactctgtcataggttaaattttctgagcatcttgtgttttccctaaactcgagtgactcctctgctatttatgcttgatttgatggcagggcaccccggctctgccccagactggcataccaacagaggctttggtgaaggggtccatttcgagaatgcccattgaagacagcagtcctgagaaaggcagagaggaagctgcatccaaaggccatgttatttatgaaggcaaaagtggacatatcttgtcatatgatagtaagtattgtatgtatgcaccaaagccagtattacaatatgtgctaaaaacataggcttgggttttcccgcatttctgctctctgggagtcagtttatctttgctgagcctatgttttctctcagtaaatggggttagtaatacttgtctcatgagaattttgtgaataacagcttagtcgatraaaagtaattaacaacgcagagctcatattaaatgtcccataggtggtagctaagattgtcgactgtggtcagtcagtttagcttaggtaaagagcctttgttgaactttaatggaatacttttattttgaagagattcatgttttatgaattaagaattagagggtagataggctgggcgcggtggttcacgcctatctactatctaatcccagtactttgggaggccgaggcaggcggatcacaaggtcaggagatsgagaccatcctggctaacacggtgaaaccctgtctctactaaaaataccaaaaaattagccgggcatggtggcgggcgcctgtagtcccagctactcgggaggctgagccaggagaatggcgtgaacccgggaggcagaacttgcagtgagctgagattgggccactgcactccagcctgggcgacagagcgagagtctgtctcaaacaaacaaacaaaaagaattagaaggtagataatattctgataatcttgataatattaaatactccttaataaaactattttaatgtctatgtacatttttttagatgtattcttgttatattttctcagtagtagtattttataagaatgactcaaatgtgatagaaatattagccaaagttttgagtgaatttgagttcttatttgcacctgactctgtgaccttggagtagtcatgagctatgctttctcttccaatacaaagaaataaagtatgtgcgtacatagtgccagatgctgcaaaatgcttgatagcattcttatttcmctctcctttacacgtctggcatattatgattcacattttgtttttggggttaagaaattaataatgtacgttgtccatatcagaagtctacacacctctgtttctttccacatccaccaaatcactaagccatttctgtttattttcctaaagtgtctagaatccatccattactctgtattcaccactgtcaccatcatctttaacccagcagccacctaactcatctccctaccttcagtctcacccatattcaaagtgtgtaccacgtcactccttgactgatttttccatcaccctggatataactgcaaacccctaccttagctttataacccctccaggagctgctttcagcttagctcttcacatttttcccttctcacttttccctttagtcccctatatttacctcccccacactcttcctcccaactccactctacacattagccggttaccacgcttacgttcttttattgtacctttctctgtctcaccttggggtcttcgtgttcactgttcacactgcctgtactttttcctcctattacctttgacttgaacaactcttattcatccttcattctcagcttacacattgcttcctctgagcaggcttatctgaacctggaggtgttaggtttctctcctagcattttcatagcacattatacttctcctttcatagcttattttactacataatctgtacctacattattgtgtaagtttcrtgcagaaagggacttaatttgttaatcttacctgcaagcctagcttatgcctagcacacagtaggcatcaataaacacatttgaatgartgaaaatattttcatgaatcatctacacatattttatwgtaggttaagacaagttttaatattattatttttataagatagactatgaaactaacctatttactgtacattgtataccatgtgctccgtctgagcaagtcttgtttgtgtattctgtagatattaagaatgcccgagaagggactaggagtccaagaacagctcatgaaatcagtttaaagagaagctatgaatcagtggaaggaaatataaagcaagggatgtcaatgagggagtctcctgtatcagcaccgttagagggtaaagcattgttttcagaatgttattttgatacatgttattttatatagtaattttgcattgttgaattaagttgtatgcaatttctgtcatttccacctgaaatgtatatttatattaagttgtatgcaatttctgtcatttccacctgaaatatatatttatattaagtttatatctgtatctaaagtggcacataacaatggaaggaagtcaaatttaagcgtaattggtcatatcataggttactattagaatgttcatatttgaatgctcatacaatttgcagattattcctgtttcagctaagtgagttaaaaaaggtaaagtttattatgagaacttctttttgaattgtgagacagataaagtggtgtaatggataaagacatgaatttaaatttcagcttcacccttccctggtaaaattcctttgagcctgtttcttcctctgtaaattaagggatcgtacctaacactgtgtgagggttagaggcaggtgtctgaactggtgctgctcatgtgatatggcttcagtacatgatcagtatgattttgttttgttaatggcccactttgtttaaatcttaacctgcctcaaccaattttaagctagatgaaatactaaaagcagggtaagtcctgtgtaattttctaagagctgtatttttctctatgttaaaaacacacacttttactgtaaatatgtgtggttatttctaacccttgatttatatttatcagcaacaataatgtgaagcttcttaggaggttatttacaactctttcgtttcaatttgcatgtttcatttaatacattttccctatttttatggtatccatatttcccgttttccctttatcacaagtatatttcaaagctaagcaatggtttccaatcctgtatcttctttcctcttgataaagaagtgttgggattttagatttaactttgaaggtatctttccttttcaacctttcattagatgcctttggtggccattttttatttaggaaaatatttacaaaggactgtgtgatgtcatattaggtacttctggatagttcacaaacttaaattgacattccttccttcatagagcatttatcaaaaacatagactttaagaacagcattcagtatatgtgagttgacatatacattatgttgaataattgaattgctttcttgttttggaagggctgatatgccgagcattacccagggggagtcctcattctgacctcaaagaaaggactgtattgtctggctccataatgcagggtaaactttctgcttgttttgcatttttatttataactgcctccctggcaaaatagtttgacattaatttacagtgtatttctgcttttcaagttattttcccttttgaaatattaaagtcttggttattacttttctgcctctgagctacataatttattggaagatgatagttgcttaatcttttaatatagagatatctttattatgcaagaaccattctgtgactattatgaatgatgcattaatatcatatctcaagcaaccctaaagaaataatgattgataaatactgatttgaggatctactgtaaacagaaagttaattagaaactacaagatgtcaaggcattattttaaattatgttaaaatatatgtaacaaaatttaccattttaaccatttttaagtgcacagttccgtggcattgttgtgcaaccatcagcattattttaatgtttcctgaattctttttcaagggacaccaagagcaacaactgaaagctttgaagatggccttaaatatcccaaacaaattaaaagggaaagtcctcccatacgagcatttgaaggtgccattaccaaaggaaaaccatatgatggcatcaccaccatcaaagaaatgggrcgttccattcatgagattccaaggcaagatattttaactcaggaaagtcggaaaactccagaagtggtccagagcacacggccgataattgagggttccatttcccaggtaactaagttttggctctttttgtcagtaactgatatttatggaacatttaaaaaagtgtgacttaataattataagtggttcttatgatgtcagacctcctggaagtaaacatgaaagtttcctgtaccttttttttttttcctctgtggaccaggctggagtgcggtgtgtgatcacagctcactatatagccttgacctcctgggctcaagcgatcctcccacctcagcctcccgagtagctaggactacaggcatgtacctccacacccagaatttttgtatttttatagagacagggctttgccatgttgccaaggctggtctcgaactcctgagctcaagtgatctgcccatctcagcatcccaaagtgctgggatcacaggcgtgagccactgtgcttggcctttgtgtaatggcacgatcttggctcactgcaacgtccgcctcctgggttcaagcgattctcctgccccagcctcccgagtagctgagattacaggtacctgccaccacgcctggctaattttgtatttttaggagagacagggtttctccatgttggtcaggctggtttcgaactcctgacctcaggtgatctgcccacctcagcctcccaaagcgctgggattacaggtgtgaaccaccatgcctggccttgtgtacttcttatcatcaggttttcttatgtctatagcatagagtgtggaatgtgggaaagtatgcagcttgggatcagtggggttgtgattgagatttgtaaacagaccaaaaaagatcaccacagtgaactgtaactgccatgggccagacatagacctgagatagaaaagtagccagatgactttgctacctgtaatgtttgtttctttcccwttagggcacaccaataaagtttgacaacaactcaggtcaatctgccatcaaacacaatgtcaaatccttaatcacggggcctagcaaactatcccgtggaatgcctccgctggaaattgtgccagagaacataaaagtggtagaacggggaaaatatgaggatgtgaaagcaggcgagaccgtgcgttcccggcacacgtcagtggtaagctctggcccctccgttcttaggtccacactgcatgaagctcccaaagcacaactgagccctgggatttatgatgacaccagtgcacggaggacccctgtgagttatcaaaacaccatgtccagaggctcacccatgatgaacagaacttctgatggtatgttacttttgttgcttggtctgatactttttattgcatttaaaaaaaaaaaaaaaaacctttgtcaagtagtaaatatcaaattgtcagctttagagtatcccaagatctacaggtcttgcttgagtctaggagtatggaaggctactaatttaaaagtaggcataatttaagtaaaatacctgatatttaaatcaagtgcagattatgatgcagtccagaaatgctatagagtaagtatatttttagagtggattttcagccaattgcataaggttttctggaagtcagttttgacattgttccttcagcggcagtgtggtgtgaaagctgtaagtagcctctggaacaagactgcataagcttgaattaacattcttactgcatcaactcagatgagttacttagtttttttgtagcttagtttcctgatctgtaaaatcataatgtaacattaagacctacctctctggattgttatgaagatcaaataaggtagtacatgtaaagaacttagaatggtgccgagtatttacgaagggctcgataaatgtgaattattcctgttggtgttactgttgttattattgttgtcactataaccccatgctactggcagctacatcagttgagaagtgatttttaccaagtggtccctatcaacctgaggcccttaaaaatgcatccacttaccattttttattataatacaaatttattgatggctcacatggtacgtcctgggctgggcactgtgagctgtacaagtgtgttttggcgggtgtgaggggcgtagcacagagtgaggagaaggggaagtccttgttagggatggggaggtgagtccaaatgcttgtagctttagttttgatggcgaattgccctgcagagggaagggcactccatatttgagcacgctgggacttggaaggggatgtgataaaccagtgtgatttctttctttgggcaggcagatttgtttgattgtggtaaagtttatagtatcaaaatattagtaattagatgtgatggttacacagccatcatgcttgtacttaatgccactgtgaattgtaccctttaaaatggctaaaattgtaaattttatgttatgtatatttcaccacagttaaaaaaaattgagggtggctgggtgcagcagctcatacccataatcccagcactttgggaggccaaggcgggcggatcatgaggtcaggagattgagcccatcctggccaacatggtgaaatcctgtctctactaaaaatacaaaaacaattagccgtgcatggtggcgcgctcctgtagtcccagctacttgggaggctgagacaggagaatcgcttgaacccaggaggtagagactgcagtgagccaagatcacgccactgyactccagcctgggtgacagcgagactctatctcaaaaaaaaaaaaaaaaaaattgaggatgatggctaataagtgtttgaatatatatttattggtgggacaatctgaccatcctgaataacatcatttaagagaagagaggctggagtagggaggtgatagatattggtgaagtaatgagaaagtcattgtggaagaacagagcaaggaaaaaattagtgaaactagtgattaatgggtaggaaggaggttgcataacacaggcaatgagagaaaactgaagtttactacatgtggggacaaaagaatttagaatgttaaagtcatacaaaaaacaaaatgattcataatgagatttaaagaagagtattgaattttatttttaatgttacataaggtggtaaaatactggtgctatgatccaaaaggtgacagtactctccaaatctcagtttctactagttgtttacattttcatatgttgtttacattttcatattttgcaatattgaatgttaaatgttgagtggaaagagaagatccaaatacatgaatatagtctttatttgaatggttgagaaatggacaaatattatcatacttgcaagtttcttaagaacttgtggcattggctctttttttccagttacaatttcttctaacaagtctaccaatcatgaaaggaaatcgacactgacccctacccagagggaaagtatcccagcgaagtctccagtgcctggggtggaccctgtcgtgagccacagtccgtttgatccccatcacagaggcagcactgcaggcgaggtttatcggagccacctgcccacgcacttggatccagccatgccttttcacagggctttggatcctggtaaacacaaaatatagtgataatttatggcaaataaatatgccaccagtatgacttttcagctttctgttgttgtacaatatagtacaattgcaaatatcattaatgtacagctcagtgaattttcacaaactaaattctcccatgttaccagcacccagatcaagaaataaaatcttatcagcacccggtaaagaactaaaaagaatagtatatgaaaagctctcttatctgatggcacttggtgaaactagttgaaaaagtggattaatgtgaataattattttaaaatgacagaggcatacctaaacatgttaacttacagcataaatagacgttcatttaccagaactctgatctaatgccaaggctttttcataaacaagtgattaagtctcactgtcttatataaaagaaattcttttttttaagtaaagctagaacttccaagtaaagacacttccaagcaatctaaatacagaatccttctagattttttttccagcctttgaagttgtctagtccrcacctgattcaacttctgtatcaactctttccaaagctgttagttttcagagaaaccactcttcattcttccttgatttacaaattatgtcattaagttacataattctagtaacaagtacagctggaagaaacttcagaacaccactgacattggtagacagaatctgataggtgcagatgtgcaggtttctagagagcagtctgctgggcagagggcattgtgttttacacagggaggggagaggagcagtcacatcggttggtacagagaggcttggctgggctgttataatctgcaggaccaccggctgcaccttgtcctcccagggtgcagtccttgctcttccttgccgctattggctgagcccagtcacacatgtgttttctgctgagacctcttctctggcctaaataaactctttgcttaataagtatccttcaggtgcaaattaggacacagaatacttgtgcctcactttggtccttagagaagaatttttcattatcagtatgstaaattttaaaagtaagaattctaagggttatttacatttcataataataggaaagtaactgtgggaaatattttatctaaaagctgtgtaaatgccatcaaattatttgtcatttgacaacactgtttcagaggagcccaatacctattacttagggcactgtctcccagattgtgtcagctgacagacttacctagcttctagatgaaggggaagcaaatattccagaaaacatgttacttgtttttctagggagaacatatacatataaaataggtcactcaagttctcagacaaaatggaatttttctggtttctatttagtgtttatcattgtcttcattttgtagtggtttcttttgcttgtttttgagcctgagttggattataatgttttgaggagagagacattatctactttttaccacgcctaccccttcctcgtatcttgtgtcttgtgtcattctctcacctaggggttgctaaaaactacagctttttggccaaatcctgttgccacttgtgtttgtaaataaagttttattaggatacagccacaccatttattctttttttccgtagctctttttgtgctacagtgacagagttgagtagctgtgacaaatgcgaaatggcccacaaagcctaaaatatatttaccatttggccctttatgtcaaaagtttgccaatctctgctccaaacacatggactaattaaatgcttatagtctataatcattttcaccccctggagagtaaagttactgattgccacaaagtattttcgtatacatttctgttggttgtactggatgatcagtactataaagacaattttattttcaaacacaactcttgcagatgccaggtaaaaatatgataaagttacatgtcaaagattgaaagtaaaactacttgagaagtttttagctactgttatccttccccttttccattacatcttagacattagaattgctattgctaatacatcaaggtctaaaataaatccaccttaatccttgtagctaagtaaaagttccatgtgcactagctcagcatgtgatttttctctactcttttgtacgtggtgtttagcaaatgtatttcagccaggacaaaactcagtgcctttctttcattctctcaatcagcagcggctgcttacctgtttcagagacagctttcaccaactccaggttacccaagtcagtatcagctttacgcaatggagaacacaagacagacaatcttaaatgattacattacctcacarcagatgcaagtgaacttgcgtccagatgtggccagaggactctccccaagagagcagccactgggtctcccatacccagcaacgagaggtgtgtgtctttgcatttcagatttygtagaatttattatgtttacctrgtgtttcttaggtactcagtaaatacttgttgaatgaatgatggaaagaaagaaagaaaagaatactatatccttcytcccgtagactttttagcccagagacatacattgagacaaggtgttttggtgaatactgaaattaactaaaccaaatccttgtgctgagtatttgtaatccatggcttacaaatttgctctctktaatctgcccatactttgaggttactgatgtgaagtacagtctttaatatccttctttaaagaatgtcttaaaaagtaatgatgatagtaaacatttttatttatattatrtacaaattacccttgattcacagagatagacaaaatccaaagtcatgtatggttctgtacctttagaataacacttaacataaattgtattgtcttttggataggaatcattgacctgaccaatatgcctccaacaattttagtgcctcatccagggggaacaagcactcctcccatggacagaatcacttatattcctggtacacagattactttccctcccaggccgtacaactctgcttccatgtctccaggtgagattgtacagttacacacctctctaatagaaccatcrtgtttacatttttacaacatagccttttaaggtatcttgggcaatttttcctcatttggtttcttgtttttcttttaacatttaatagtagttcttatgtgccagctgtcactagataccttaggaatgccttaaaagcttatgttatgcttcagttcttatccaggactcttaataaaacaaacttctttttctcttttcttgttttttttttgtttttgttttggagacagagtctggctctgttgcccaggctggagcgcagtggtgtgatctcagctcactgcaacctccatctcccaggttcaagagattctcgtgcctcagcctctggagtagctgggattacaggtgcgcgccaccacacctggctaattttttgtgtgtttttagtagagacagggtctcactatgttgcccaggctggtcgtaaactcctggcctccggtgatccacctgccttggcctcccgaagtgctgggattacaggtgtcagccactgcacccagccaaaacaaacttcttatatcccaaatttgaagctttttgaaaaattttcagtcacttagaatttcggaattgtttgatatactcagtcagttgatatttttatctttaagctgcaggtttatgttttacaggacacccaacacaccttgcagctgctgcaagtgctgagagggaacgggaacgggagcgggagaaggagcgggagcgggaacggattgctgcagcttcctccgacctctacctgcggccaggtcagtgaaaggcactgctcttccattctctggacacatcttagtaatcttgtacactgtgcttaatgctgcgcacaaaaagttttgatggaaacaaaaattctaagacaacgttattacaggccccaagtgaaaaacaggtgaaagtgctgtagcagctgagatggtggaaacgtgaattttacacggaaaaatgttttcatgatgaaggtatcatttttatttggtgcaaacagtggactgcagttgggcctgaagatattggtcacagagctttcaaggctgaaagaacagccctagcaaaaactcctagatataaaggtgttgttgagcttgagtttagaggaggaatggaaaatacagttagcagcttgtgtagcatcttgaattacagtgaaatgttgtgtccaggaggcaggtgacatgatcagagggacatttacacgagtggaatagatggattaaaaccctgaagagtgggtatggctggtcccggatgtagcctctgtggagataaaaattttaaatactcttttgtctagtaattccacgtctaggaatatatcccatagaaatactcagataagctgggcatggtggctcatgcctataatcccagctactcaggaggccaaggcaggaggattgcttgaggccaggaattcaagaccagcctcagcaacatggtgagaccctgtctctaaaatatatatataaaaaattagccagcagccgtggtgtgcacctgtagtcctagctactcaggaggatgaagtaggatgatcccttgaagccaggagtttgaggctgcagtgagctatggagtgtcactgcactccatcctgggtgacagagtgtgatgctgtctcttaaaaattttttaatttaattaaaaaaataaatattcatataagctgatgaatggttagaagggagaaaactgctgagaagcctggctgaggtggtggtgtctgtgagaagaggggtgtgtgctaaaacataaaacagctagctgttatgaagccagtgagcacgttagaaggttggagtgaggacacagaacaagatgaggtcaagaagaaagtgactggggagggatttgagagttcagaatcctctgcgtgaagtagttcttaccaagtccaagctctgacttggttatgggagagttagggttaagtgaacaaaaacataccaaatattgtagaagtgtaattgtgggagccaagtgttttgtgggaagataatgtgaatgatttcatttcaaaagagagagcttgctgagagaaagagtcacctgtgaaggggacagtgaagaagtgaagcagggcaaactgtggttgaatgaaacagtctcaaaccctagtgtagcagtggtatattattttcattatgatgcttagaaagttgtgcctgattagattttggaaatcatatacacactagagtttgaggaaaaatcagaaagatgaacttatatgatttgtagtagtacttcttgttggtgctgttttatttmtggaatcaagattgaaatttatcagagaaatggaaatgacagtaaatgatggctgatgttttgtttcaagttactgctgcggttttattgcatctttatttggacacttttagaacatatttctggaaaggccagaaagtagactatcaagtttcttatcttgtttttcttttttctatttaggtatgttaggaaataaacaatccataagcattgcttccttttgtctctggcttcctccttatgtctttgtttctttctctttttcacctctgcaggctcagaacagcctggccgacctggcagtcatggatatgttcgctccccttccccttcagtaagaactcaggagaccatgttgcaacagagacccagtgttttccaaggaaccaatggaaccagtgtaatcacacctttggatccaactgctcagctacgaatcatgtcagtctcttgtacatattttgacaaaaaatgtctcttgcatatacattttaaaatttgtgactgcaatagtctaagtatagtcatgcttttctgcccatgccatgaaggctttttttgttgttgttgcagtttgtccttccatctccccaccacattcccagcaaatggtcttcccttcacagagctgtgatttggttttatttacaggccactgcctgctgggggcccttcaataagccaaggcctgccagcctcccgttacaacactgctgcggatgccctggctgctcttgtggatgctgcagcttctgcaccccagatggatgtgtccaaaacaaaagagagtaagcatgaagctgccaggttagaagaaaatttgagaagcaggtcagcagcagttagtgaacagcagcagctagagcagaaaaccctggaggtggagaagagatctgttcagtgtttatacacttcttcagcctttccaagtggcaagccccagcctcattcttcagtagtttattctgaggctgggaaagataaagggcctcctccaaaatccagatatgaggaagagctaaggaccagagggaagactaccattactgcagctaacttcatagacgtgatcatcacccggcaaattgcctcggacaaggatgcgagggaacgtggctctcaaagttcagactcttctagtagctgtatgtatctcaatccgagtttcacaatgtgatgtctgagtaaagaattactttattctttaggtcaagtagaactatatggtatttaaaaatcctaacggttgatagtaaatgtaatgcaaaaatgtatcttctgctgtttttatgattatttaaatatcccagtttcctacatataagcctatcaatgtatcttccacaagaaaactgtatcattcatgtaattaaatttggaaagtagaaggcagaccttattaacatatttaggcatctgaaaggtaatggatatatcgccaggctctgggctactgaggtgtaatttctcaggaagcatttgctaggacatggttctatatttatgccaataccccaaagcctctaatatcctttttctaagacacaggtttttaaaagtgagactacctattattggtgattggtatttatattgcatcgtttttgcaagttggattttgttcaagtctggttagtcattaggatggctacactgcaaatgtgttagaattcacaggtctacattaaaatgctagaaaagttactttttaaattttcttttaaactattgccttaattctatgtggaattgcagaaagaacaagcaagtatttaaataagcatctgctaatactggaagtaatttaatcatatataatcatctttctgttatctccattgaataaattcagtagagttagacatcatgaaaaaaaaaatgatttctcatgctccagaatgcaatgtgcagttcttttgatctctgagtatccactagcttaattataatttgtttacktcatatctaccgcattgctgaggcttttagagagagagttagtgttgtgtagacaaaagacttcttttaacctgagattaggaaaatctgcaatatagattttctgcatgcagaaaattgctagctgagaaagagatattctatagttgtatgaataggtcttttgaagggaagtcaccggcacactgggagatcccacctgggcttattgaatggtatagcacatgggttccttaatcattggattaaacatttcttttcagtttgcatcacaaaccaaaccttgctttaggaatttgattttcagaaggtgtgaaaatagaaagctcatcttttctgagtgtccatgtctctgtgtgtggttatcttttttatcactggtcagtgaattccatgatgtccaaaggctatgtacagttcttcagtgtggttttcmgtttgactcttgagarccttcctcatcctgaaggggaggtccattgccatagtcttgccccttaaggcttcaagaacaatgtgaacacggtttggattccgactttctactgagtgaatattggaagttgtaaccagatttaggatgttgaatacataaacagtgatgagtaacagtggatacaaaagtcacaaattactgtaaacttcttakaatatagwgatttattttagtttctcaatgatcatttctgttccatttatcaagtttccaatctcctaagtgtactagaacccakgtagctgcagtttccatgacctggtggggataggaaggactgttgagtaccagaggagcaggtggtggctagggagcagagttcattcccacctgctgcatctrtgtccagcccagggccatgcaccctttggagctctgacagtgctctcagattctgtagtgcagtttgtggatgtgaagagccctctgaattcagaggttcctgagcaggcggttacatctgctcccaactgtcagctctgaggctatggcaggactgtgaaaagctgcctgttagccccactgcatagccctctgtttacttgggaactgtgtcttagaggaggtccttttctgatgtgggtatcctccagagttggttgacatcctccctttctgggaatatacttcccttcagacattctctaccatttctggttattttcacaatgtaacacagtgctaaaaaattattaatgtttggagtaagttttgttagcaatactccatttatttgagaaaatcattatatagtgttatataatccatagctttaaaatcatcatggtgktgaatgaagcagctttatagcctcagcgtttttctaagaacagagtgtcccacagaattggaatcattggaatcagttattgagatctactccctcatttgtttattaacctcttccataaatgtttccctggtgatttcttttccagctcccaggaaaatatcataaatctgttctctgttctgcctcattccagtgtttattattgggctttaaaacatgtctttttttttttttttttttttttttttgagacggagtttcgctcttgttgcccagaatggagtgcaatgacacaatctcagctcaccacaacctccgcctcccgggttcaagcgattctccggcctcagcctcccgagtagctgggattacaggcatgagctaccacgccctactaattttgtattttttttagtagagacagggtttctccacgttggtcaggctggtctcaaacccctgacctcaggtgatccacctgcctcggcctyccaaagtgctgggattacagccatgagccactgcacccagcctaaaacatgtcttaaagcccataaaacttcagaaaaccctcattaacctggaatacctttgaacatggtggatcagaattgaaaawatgctacaggtgtgaagaacttagacttcagaaacttttccygggattagttttgaaataagattttcttttcttaaagtatcttctcacaggtatgaaacacctagcgatgctattgaggtgataagtcctgccagctcacctgcgccaccccaggagaaactgcagacctatcagccagaggttgttaaggcaaatcaagcggaaagtatgtcttcttaagctaccatttacatgttttcatatttgcatttatcatttgcttctaattatctgtctagaccatagtaagaattaacttgttttgtttgttttagggtaatcttacatgagccttctttagaaacagcaatcgattcttttttattttttaatgatacagaaaattgtttatattaattttgtttgcttacttctgcatttatattttgttccactagtcctcagacttcttcagtgaataattttttttttctccaaaattaagataagttctttgtttggagctatgtaccacatcctttcaggtgttcttctgaattatatttaatctttgataatgagtgaaaagcacagacattcctggagtaagacatctatgtgttctctcctagatgatcctaccagacaatatgaaggaccattacatcactatcgaccacagcaggaatcaccatctccccaacaacagctgcccccttcttcacaggcagagggaatggggcaagtgcccaggacccatcggctgatcacacttgctgatcacatctgtgtaagtttttcattattcttattagttaatttttcttttttgatcatggggaaagcagatttcatatagaaaaagaaatttataataaagatatctagatttcttaatactattttttttttgcaagtactcaatgaattttaccacttccttcatttctcattcacagcaaattatcacacaagattttgctagaaatcaagtttcctcgcagactccccagcagcctcctacttctacattccagaactcaccttctgctttggtatctacacctgtgaggactaaaacatcaaaccgttacagcccagaatcccaggctcagtctgtccatcatcaaagaccaggttcaagggtctctccagaaaatcttgtggacaaatccaggggaaggtatgatctttattccaaattatatataaattgcccaacagtaaaacaaatggaatatatctacaggataaggaatttgtttctcacaactaaagttcatttgcctttattcccaggaaagtgtaaatgagctttcttccccctgcatattattcttagaatgtccactgtcttggcatttggtactatgactttttaatgtatattcaaaagatgattatattctatttgttggtttgtaaagacagttaagaagaatgtgtagtttggtagtggtttggggacacttcagtggtgcttccgaataatacctctcatatttatctgtctcaatggtttctactgggtcagcatcagtagaagtttaagaaggtgatattggccagacatagtggcttatacctgtaatgctagcactttgggaggctgaggtaggaggattgcttgagcccaggaatttgagaccagcctgggcaacatagtgagatctcatctctacaaaaaaaaagtttatatattttttgtttgtttgtttgcttgcttctgcatttatattttattctaggcctcagacttctgtcagtgaataattttatatatatatatatgtatatatgtatgtatagatacacacacayatatatatgcacacacacacatatatattttaaggtgaccttaaataaaggaaagggaagccaatagtggcatcatgagtggaaacatgttatatgccagggctctctgataaagagcatatcttcttacctgatattctgtgtttggttaaaataaagtggacacaggattcttgcttcaaagtggtagactaaatattagcaaatgttaaattatagttaacaagcacaaagggaaataaatttaagaatgctgagaaggccgggcgtggtggctcacgcctgtaatcccagcactttgggaggccaagctgggtgcatcatctgaagtcaggagctcaagaccaacctggccaacatggtgaaaccccgtctctacaaaaatacaaaaaaaaaattagccaggcatgatggcaggtgcctgtaatcccagctactcaggacactgaggcagaagaatcgcttgaacctggkcrgaagaatcacttgaacccgagatcatgccattgcactgcagcctgggcgacagagcgagactccgtctcaaaaaaaaaaaaaaaaaaaaaagataaaaagaatgctgagaacaagactgagatatgggcagatcaaagattctggcaaatacctgaagacatagaggacacatgagccagagtaatggaagccatggctcagagcctgaaaaagagaaatttgtagcagaagtgattctccagcctacctaccaacccatcaaagtgagcaaagagcagatagaagaatataaataarctaaatggtcttctttaaaaaaaaaaattattgtggaagttttcaaatacatacaaaagtagagagaacaagtataatacacctctaggtatccatcacccaattttggtaatcctcagtgtatgacgagtttygtttcattttcatccccgcttgccccgacccccaaactggataattttgaagcaaatctcggacttagtcattagacgcagctggataaccttaaggataagatgaaagcacatttattccctttcagccaaaacaaaaccaaaaaaagaaaagaaatgtgattatcaaagaaaaatggaaaactatatagcattgtcatggtccattcctgatgaaaatgtttgcacaatctgtggtgttagaaaacagcatcaactgattttcattttagttatttatttaactttcattttaagttcaggagtacatgtgcaggtttattatataggtaaacttgagtcgtgggggtttgttgtaaagattattttgtcacccaggtattaagcctggtacccattagttattttttcctgagccttctcctcccaccctccatcctccaataggccctagtgtgtgttgttctcttccatgtgtccgtgtgttctcaccatttagctcccrcttataagtgagaacacgtggtatttggttttctgttcttgcgttagtttgctaaggataatggcctccagctccatccatgtccctgaaaaggacaggagctcattctttttcatggctccatagtattccatggtgtatatgtaccacattgtctttatccagtcaatcactgatgggcatttgggttgattccatgtctttgctgttgtcaatagtgctacagtgaacatacatgtgcatgtgtctttataatagaatgatttatattcctttgggtatatacccagtaatgggattgttgggttgagtggtagttctgcatttaggtctttgaggaatttccacagtgtcttccacagtggttgaacyaatttacactcccaccaacagtgtataagtgttccattttctccacagtcttgccaggatctgttattttttcactttttaatagccattctgactggtgtgagatggtgtctcattttggttttgattggcacttactctttttttgttgttgttaaaacagagtcttgccctgttgcccaggctagagtgcaatggtgtgatcttagctcactgyaacctccacctcccaggttcaagtgattctcctgcctcagcctcctaagtagctaggattacaggctcctgcccccatatctggttaatttttgtatttttagtagagacagggtttttcactatgttggccaggctggtctcgaactcctgacctcagctgatctacccacctcagcttcccaaagtggtgggattacaggcatgagccactgcacctggcttgatttgcacttctctaatgatcagtgatattgagctttttttttcatatgcttcttggctgcatatatgtcttcttttgaaaagtgtctgttcatgtcatttgcccactctcttttttatctcattctgtttgcccaggctggatttcagtggcgcagtctcggctcacagcagcctcaaccctcccaggctcaggtgattgtcccacatcagcttcccaagtagctgggattacaggcacatgccaccacactcgctttacccgctctttaatggagttgtttttttcttgtaaatttgtttaagctctttatacatgctggatattagacctttgtcaggtgcatagtttgcaaaatttttctcccattctgtaggttgtctgttcactctgttgacagtttccttttctgtgcagaagctctttaaattagatcccacttgtcaatttttgtttttgttccagttgcttttggtgtctttgttatgaaatctttgtccctgcctatgtcctgaaaggtatttcctaggttgtcttccaaggtttttatagtttttttttttttttttttttttacatttaagtctttaatccatcttgagttaattttatatatatatggtataaagaagaagcccagtttcagtcttctgcatgtgatagccagttatcccagcaccatttattgatagggaattctttcctcattgcttgtttttgtcaggtttgtcgaagatcagacagttgtaggtgtgaggccttatttctgggttctctgttctgttccattggtctgtgtgtcttatctttgtaccaatacaatgctgttttggttactgtagccctgtattatagtttgaagtcaggtagtatgacacctacagctttgttctttttgcttagtattgccttggctattcaggctcttttttggatctatattaattttaaaatagttttttgtagttctgtgaagaatgtcttcggtagtttaataggaatagcattgaatttgtgaattgcattgggcagtacggccattttaatgatattgattcttcctatccatgagcatggaatgttttttcattttttatcttttcatcttttatctctttgagaagtgttttgtagttccccttgtagagatctttcacctccctggttagctgtattcctaggtattttattatttttgtggcagttgtgaatcgaattgcattccttatttggctcttggcttggctctcattggtgtataggaacgctagtgattttttgcacactgatgtatcctgagactttgctgaagttgtttcatcagcttaaggacctttggggctgagactatggagttttctagatatgggattatgtctgcaaacagagatagtttgatttcctttcttcctatttggatgccctttctttcgttcccttgcctgatcaccctggtcaagacttccaataggatgttgaataaaagtggtgacagagggcatccttgttgtgtgctggctttcaagaggaatgcttccagcttttgcccattcagtatgatgttggctgtgggttttcatatatggctcttttattatgttgaggtatgttccttcaatatctagtttactgagagtttttaacatgaaagggtactgaattttattgaaagccttttctgcatctattgatatttgtgtatattgaaccaaccttgcatcctagggataacatctacttgattgtggtggataagctttttaatattttgctgggtttggtttgccagtattttgttgaggatttttgcattcatgttmatcaaggatattggccggaagttttctttttattgttgtgtctctgccaagttttggtatcaggatgatgctggcctcatagaatgagatagggaggagtccttccttaatgtttggaatattttcagtaggaatggtgccagctctttttgtacatctggtagaattcagcagtgaatgtgtctggtcatgggctttttttgggtggtaggctatttattactgactcaatttcagagcatgttattggtctgttcagggaatcagttttttcctggttcagttttaggagggtgtatgtgaccagaaatttatccatttcttttagatttcctaggttatatgcataaaggtgttcataatattttcttatgattgtttgtgtttctgtggggtcagtggtaatattccttgtcatttctgattgtgtttatttgaatcttctctattagtcttagctagcagtctgttttattaattttttctaaaaaccagattctgaggccgggtgccgtggctcatgcctctaatcccagcactttgggaggccgaggcaggcagatcacgaggtcaggagatcgagaccatcctggctaacacagtgaaaccccatttctactaaaaaaaaaaaaagaaatacaaaaaattwgccaggcgtggtggccggcatctatctgtagttccagttactcgggaggctgaggcaggagaatggcgtgaacccgggaggcggagcttgcagtgagccaagatcgcgccaccgcactccagcctgggcgacaaagcgagactccatctcaaaacaaaacaaaaaccagatcctgaatttgttgatcttttgagtgtttttttgtgtctgaatctccttcagttcagcttccgttttgtttattttatttatttatttattttttgagaaggagtttcgctcttgttgttcaggctggaatgcaatggcgcgatctcagctcaccacaacgtctgcctcctggttcaagcaattctcctgcctcagcctctcgagtagctgggattacaggcatgtgccaccaccccagctaattttgtatttttttagtagagacggggtttctccacgttggtcagactggtctcaaactcccgacctcaggtgatccgcctgccttagcgtccccacgtgctgggattacaggtgtgagccaccgcgccccctgcagttttggttatttcttgtcttctgctagctttgggrtttgtttgctcttggttgtgatgttagcttgttaacttgagatctttctaactttttgatgtggatatttagtgctataaatttccctgtcaacactgccttagctgtgtcccagagattctggtacgttgtatctttgttctcattagtttaaaaaaacttgctttctgcctttatttcattatgtactccaggagcaggttattgaatttcyatgtaattgtatggagtgatttttataagcaaaacacagaggagtttctctgtagttctagaaaaggatgtgatgcaataaatcttaaaaatggctgacagatattgggaggtgagggttgcataggaaagagatggagaagtaagggtatgtgtgctaatttcttcatttttaaaaaagaaaatataaaaggctgaagtatgctatgtaaaggcaaaatggacaaaattaaaataggcaagccagcacagtggctgacacctgtaatttcagtgctttgggagaccaaggcgagaggatcgcttgaggccagcggttcaagaccagcctgggcaatgtagtgagaccccatctccacaaaaaaactaaaaaataaaatcgcccaggcatggtggcatgcacctgtagtcccagctacttgggagcctgaggtgggaggatcacgtgagcgcagaagttgaggctgcagtaagcagtgattgtactactgcactctagcctgggtgacagagggagaccctgtctcaaaaataaaaataaaaataaaaataaaatgggcaacaacagagaaggcaaatcaaattcttcatctttcatggaagagagttaacagatactgtttcaagttttataaataaaaaaaacatgtttaagattatttacagagttttggaggtaaacagcaaaacaacttaaaaaaaaagtggctatcttgaacaactggatgggctgattgagaaaggccataacaaatcatattataattttgctttagtctaatagtcataattccagatgttgaaagtcacaggtggctttcatatgcataatcgctatgtcaaaaaattttagcagggccgggtgtggtggctcacgcctgtaatcccagcacttcaggaggctgaggcaggtggatcacttgaggtcaggagtttgagaccattctggccaacatggtgaatccccgtctctaataaaactacaaaaatcagccaagtgtggtggtggctacctgtaatcccagctattcaggaggctgaggcactagaatcctttcaacctgggaggtggaggttatagtgagccaagatcgtgctactgcactccagcctgggtgacagagcaagactctgtcttaaaaaaaaaaaaaaattgagggtgtggtggggcgaggtgcttgtaattcccattacttttggaggctgaggtgggaggattgcttgagcccaggagtttgaggtcagcaacatagtgagacccctgtctctacaaaaaattaaaaatgggccaccagacataataaaacatataataaaaatattagctgggcatggtgacgcatgcctgtaatcccagttactcgggagatgtaagtgagaggaccacttgagcccaagagtttgaggctgcagtgagctatgattgcactcctgtactcctgcctgggcaacgagcgggaccctgtctctaaaaaataaaaattttaataataagataaatgggccaggtgcggtagctcaggcctgtaatcctagcacttttggaggcccaggcaggtggatcacctgaggtcaggaggcctagccaacatggtgaaaccccgtctctactaaaaatacaaaaattagccsgggtatggtggcgcatgcctataattccaattccagctgctcgggaggctgaggcaggagaattgcttgaacctgggaggcagaggttgcagtgagctgatcacaccactgcactccagsctgggtgacaaagccagactctgtctcaaaaaaaaaaaaaatgataaatgggtgggagctaaacagtgtgtctatcttatattattcttaccaaatggtatccagagaaaaaatataaaattgcagagaacccctctgccataatatagtgtaactagaacctatgttgactcacctgataaaacttcttgggtgtcagtttagtactgaagtcctttatctttaacttgacgatgaaagaactggtcagtcgactcaaaataggtaggaaaacccttgaggtttcacctggactaaggagccaagggtgagatggtgtctgatgttgaaggacatgcggagcctcaaggackcagcttctgccactgctgctgcccgggcagcactgtctgatgacgtgactcctggatccacggggcgcgcatgggtcaagtggcagtaacacagtggttttttttgttgttgtttgtttgttttaactatgtatatagtgaatacctgaggcaactttttttctgatagaaattggcagcttttgctccttctcctgaatgaagtcatgagttaacaagtttctgtttaggtaagtcccaggttagcctttgaaacacaatctaatatttcacatattacaatagtaggcctggaaaatccccagagaggagtcacgtctcttcggagccctacgagcccatctccccaccccaggttccggttgtgcatgagaaacaggacagcttgctgctcttgtctcagaggggcgcagagcctgcagagcagaggtaagtgtgcttcctagtgacagcaaccattcatggcgtgggtgctcatgctttaacatttccttcagttgttgccgtttttctcagaactttgggcttttatgtctggatggcattcttagaggatcatttgtctcttttcctactcatctaatgctagtgtattttagcaaaaagaaaatatttataatatcatatttaaataggttagaaaatatttgttcattattcttgaaattaaatctttctagattttttttttaatgtttttgtctaggggaaagggtcatccattgattcagccaacatttgaatgcttactgtataccaagcactgtggactctgaatagatttaatcttacctatttctaaccgtgaccccaaccctattaattattaaattatccccatttgactagatgcctttgagttggctcctttccagtcagtctccatacctccacctgagtgatttgtctaaaactcatgcagaatccagcacccagtcttttgcatggcatctgagttcctggcatgaccaggtgtatgctgcgcattcagcttcacttccctctgcatcatccctacactggaatctctgtccaaatcatgttgcttattgttccctgaattcctttctgtccatagtcgtgcagtttgcctagtgctgaaccctccactgatgcrctgaaagccagacatgtcacttgctcatggtcgtactgatactaatggggaagggccagttttaaacgaaggcctttctaactccaaattgctagtgcctttcttacaaagtgttgctattaatttattgcatttattcttagggagctaaacagatattgctacttttcaatgaaatgaagaaaatccatttttggagagggagtgatgttcaatttaattatacatttacatctttcccctacgtttatgagtgttttgaggacagggaccatgtcttattcctgttcctatcaccttaattgtctttcctggcatagagtacgtgttcttgtgtttgaatgatgactgaatccacatgattggattaggttttcaataacctatagtctctgttctcatctctggctctagctagatccttggtggcctggagtttttagggaaaccttgtttttttttaaatgtgttagtataggaagctgccagtaaaatatgaaactctttatattaaactcagctcatttgttaggttgcttgaaatgattgtaacaaataggcagttttattcctatactgttgtgttccagtccagctgttgattgcttagatatgagttcttgctattttgtagtcaagcgtgctattagttttaattttagtgtacttaaaactaattctagtaaaattgttcccagtttaggtggtaaccattaatatatcagtgtttgtgctgttaaggagagagcatcataagctgtttctgagttttcctattaatattcatttactgcttcttcattccttcctaagaatttctgctctagattatctccattctaattctrattttatgatttcattttgagagctaaatcatttttcctcaaatgatgtactaagtggtttatgattacatactgtttcttagggctgtaaccacaaacacaggatgaggaggcagtagttttctaagtactctctgactgttgttatcattgataggaatgtccccaggattaggagtacgtggttgtaatatacttaactttggccctaacaggaatgatgcccgctcaccagggagtataagctacttgccttcattcttcaccaagcttgaaaatacatcacccatggttaaatcaaagaagcaggagatttttcgtaagttgaactcctctggtggaggtgactctgatatgggtaagtgggatttctttcatgaaccccaaataaaacatgcattaataatgatatctccagtgttgcytctcctgtaatgcttgagtttgaaggctctttacaggacatctgtccaacacatctgatcctagagttccttctcaagtgtctgccagcccatgaagagttctaattaggaggcaggagttcgctcctttctgaagctgtgccgtttctctttgaagaaatgctgtgtctaggttacttttctttatgtaggactggattaactctccatagtttacttttctttctcccctacccatcagtcttcattttgtccatttgggcctatccccacataacatctcctcagatatttgaagacgtgtctttcaggagtcctctcaatcagtgtccccagtttcatcagctgtgggtcacatgtcctcattcttagtacccctaccatctcagttattctccaccaaaaacatttaacctagcctttcactaggtttcgagtaatacaaaatagagtagtataatatgatctatgctaaattcatcatttttaaagtagcctaagactattagctgttttgttggcagcctatacactgttaagttatgaagtgcactgttaagtacttagtatgaacgttgatgtcaaggtcttgggctacttttaattcatgccttgccctcgctctacttttacagtaactagctccaagtataggacaagtccaagtccgtctgtgcttgctccagtccagctactttttctaccctaccagtgtctttgtggacttgagttgattcattcactattcatatgcaactctgataaactaaccgtgtaaaaataaaacattggcctggaatctcaacactttgggaggccaaggcgggaggattgattgggcccaggagttcgagattagcctggacaacacagggagaccccatctctacaaaatataaaaaattagctgggtgcggtggtatacatccctgtagtcctatttacatgggaagctgaggtgggaggattgcttgagcctgggaagttgaggctacagtgagctacgatcgcatcactgcactgcagcctaagccagagtgagatgtctcaagaaaaaaaaaaaawttttttttaaattgtctgggtgtggtggctcacrcctgtaatcccagcactttgcaaggccaagacgggttgatcacctgagatcaagagtttgaggccagcctgggcaagatggtgaaaccctgtctctactaaaaatataaacagctggtcatggtggcgtgcacctrtaatcccagctactcaggaggctgaagcatgagaatcatttgaacctgggaggcagaggttgcagtgagccaagattgtgccactgcattccagcctgggcaacaaagtgagtctctgtctcaaaaaataataaattaataaaataaaaatataaaatcagtaataatggtagcaaaaggttatctagcgtactatgtggtaggctctattctaagcatgtgtagatatagtctcatttaatcctcacaacaaccctacatattacaattatctccattttgtagatgaggaaacagactcaggtttaagagttggcacaggttacatatctagtaagtaatgaggctgcagttcaaacccaggcattccaactccagagtccatgttgctaatgatggaccaactggcttctaacagttccatactcatagcatcttaaccagattgttggtaaatattctagctaatgttctgtggcagaacctttttcctctgggttgatatgcaagtattaatcagaacctcctcgtgytctctcagcactcacttgtactaactatccccccagtcttatcagtcttttcctcagtccccttgatagagagactttgggtagaccatagtctggtttattctttttttttttttcttaagttcagctttgtattgaacacgttataagaaatttagtcaaaacaaccaaaagcccatgtcatcatcagactcctcagattcttctttgtttgcttccactttcttctcagctggagcagcagcagtggagtgggcaggatcccactggtgcagcaccagctgctggagcaggtccaccagcccctacattgtagatgaggctcccaatgttgacattkgccagggccattgcaaacaagctggaccaaaaaggttcaacatttacaccagctgctttaacgagggcattgatcttatcctccgtgatggtcacctcattgtcatgcagagtgagggctgagtagatgcaggcgagctcggagacagaggacatggtatgggcaagtgtggggctggcgctgccggacgtggtggtagttgccggatgaagtgagggcctcatcccaacgtggccttagcttccttggaaggaccaagcactgtggtggcagctgaggaaaggacgatctgctttatttctgtgatctaccatctactagtctcctgatcctgtcaaaagaaaggaaagtgggggccttgcactgtgaactgcctggtggatgtttgtttagatctgtgtcactcttgtgattaataaatgttgaacaccaaggaaaaaaggatgagccagtgtcaccactgtttctgaacttgtcctcgctcttaattactaggttctgtttaggtggcaacaaaataaaagacaaatattttagaatgctgaccagaattgttatcaggcttacagatagcctttctttctttctttttttttttttttttttttgagatggagtcttactctgtggcccaggctggagtgcagtggcacgatctcggctcaccgcaacctccgcctcccgggttcaagtgtttctcctgggccagcctcccgagtagctgggattacaggcaccagccaccatatccggctaattttgtatttttagtacagacggggtttatccatgttggccaggctggtctcgaactcctgacctcaggtgatccacccacctcagcatcccaaagtgttgggattacaggcgtgarccactgtatccggccaccttttcaaaaaatattgttattactattttctgtctccagtcttcaacagtttaatctattatttacagctcctcaagtgtcaccaacaaaaatatactcttgttttcaatttctcttggcactcagagatgaatctgtgtgagcacggagagctagagatctcagagcagccaggaactgagatgcaaatcatttcacctttgtgtggtctgctcattctgtagtctttgtcttacccttaaagtgggaaactctttgacagggaaatgccatgtttgaactgaagaagcctactttatagttttttctctcttgcctaatgttttcagtagcgtactatgttgggtgttttagtatgccacatggtctctattctctgaagctgtatgatgaaacaagtacctaactttaacaggagataattaatgtcttaagggaagtactaacagaattgctttagagtctgggattttttttttattgcaagaactatttttcatggtggaaaggagaatttatattaaagaaccagtgggctcctgggcccaccatggcacatttagccttcactgggaagtagaactaaatgaaagccatcagcagccaacacagcttcacttcagctcattgtatctgaatccagtgttcccaaggacatcagtgactttatttttttgaaaactgtaatgctttaaaacttactttattggatctctttgcagcttttgacacagtgaaccactttcctttcctgaaatgctttcctctcttggctttctgatgccatgttctcctgtttcttctctacttctctggccacttctgtctccttagaagctcagtcttgctttgcctggcccttgattgttagttttccccagggctcacttcttagcccctttctcctcatgtcttataatttgagtcatctcatctactctggggagttgaatggtcgcttgtatgctgaaaactcccaaatttgtatctgtagcccagcttttcctactaagctctacttacatatctttgcagacctcattacttcttgactaacttactggctccttaaatatctaaaattgaatccatgttctacctccccatacaaaaagttcctcctccttccctaccacagttaacagttaccattactctggccattactatcctggtctctctgcctcctgatgggagtcagctcctcctgtcaagttggcctccacagtggctttcacatgtctaccttccaytctgctaatttctgagcagttaccacattcttgctcaacagtaggtaccagtcacctggattgcttattaaatagttgaattatggagccccaggaatgtagaaaatttactaagctacccaggtgattctaatttgtatggccttagcaagtaccacactgcactgtaagctccattagcaaaggaagggttatcctgcaagtgcagtatctaaggattatcattggttaacttataggaaattgtcttcatctgaccatttttgatcaataaggtaatcttaacaattcagtcaaataactgctcaattaaatatctatcaaatgaatgdctcctrttccacacacttcatgataacagggctctgctgtttcaggctcaatttatttaccttgtcacctggcccataagtaagaagactgtcatccatggccattgttttctagttcttctgaggacttttctcctctctttgtcagtttaaagcctccctaatcaaccaagtttgtttctaggcacatgcactcttccctcctctcatgtgctcagcccttgggtaagagtccatccttctgtggtctcattagaaatttcacattctggccgggcacggtggctcacacctgtaatcccagcactttgggaggccgaggcgggcatatcgaggtcaggagatcaagaccatcctggctaacacggtgaaatcccatctctactaaaaatgtaaaaaattagccaggcatagtggcgggcgcctgtagtcccagccactcggggggctgaggcaggagagtggcgtgaacctgggaggcagagcttgcagtgagccragatcgcaccgctgcactccagcctgggcggcagagtgagactccgtcttaaaaataaattaattaataaattaattaatttcacattctggctgagcacagtggcccatgcctgtaatcccagcactttaggaggctgaggtgggtagatcacctgaggtcaggagttcgagaccagcctggccaaaatggtgaaactccgtctctactaaaaatacaaaaattagctgggcatggtggcggggggcctataatcccagctgctcgggaggctgaggcaggagaactgcttgaacccaggaggcagaggttgcagtgagcctagatcacgccattgcactccagcctgggtgacaagaataaaacaccaccatctcaaaggaaaaaaaaaaaaaaaaaaaaaaaagaactttcacattctttgggacacatcatttggctgcccacttgctttctgcattctttttttctctttaaaattcttagcgtcaagttgggaatgacggaaacaccaatttatgtcccaaattcttcccctttctggcacactgctttattataggcggttcccaggtcttatgctgttatcattcaaactgcagattacaagttgcacagtcagcaggaatgaaaaggatcaacagagtcttttgttttttccagcaaatatcctgagtttccagttagccatgcagggaaacacagtcattttcatagtattcactgtggtggctttcctctggatcacatcccaggctgcctcaaacctgttggtatttgtggcggtcatcccagagtccaaggtttcttcttcgtcagaaagccttggttcctgttctgagaacagcattttcctatttgtttttctccagcagtgcaaagttcctttcccttttctgggttacactgcttctttwtttwtttwtttatttatttttggtaaacagatgggagagtctcactgtgttgcccaggctggcctcaaattcctatgctcaagcagtcctaccgcctcagcctgctgagtagctgggggactaggagtgcaccactgcacacagcttattgctcttcttttgatgttcctaccttacctatttcctgatttccctttaaaaatagcctgggcaacagagtgagaccctgtctcaaaaaaaaaaaatacttccattttatcttcacttaatgggtgagaaataaaggttgagatcatgraaaataaaaagattaattttattataggaattttttgagactttagtttggtatatatgattatcacatcttaattaacttgaatgtttgcttaaatatagcagctgctcagccaggaactgagatctttaatctgccagcagttactacgtcaggtaagattgaaaagacattatttaccaatacaaaattggcacagcagtagtcagtccaacaaatatgtactgagtaccaactgtataccaggggagtgactgctctaatatggaaaaataaataaataatttagtgaaggaaggtttacccagtagcacagaaaggaactgagatccagtaaatacctattgaaaagataaatgaacaaaaagaatgaaactattaaagaacactgtcaaaactagggaactgagaaaattgttgagtaactttaatagaagtgtgggtgactgattcacttgggaaacaaatttccttaaggagttatctgtggattaagatggtctctgggctgggtgcggtggctcacgcctgtaatcccagcactttgggaggccaaggcgggcggatcacctgaggttsggaattcgagatcagcctgaccaatatggtgaaaccccatctcctaaaaatacaaaaaattagcctggtgtggtggtgggtgcctgtagtcccagctacttgggagactgaggtaggagaatcccttgaatctgggaggcggaggttgcagtgagccaagatcgcgccactgcactccagcctgggygcgacagagagagactctgtctccaaaaaaaaaggtctctgtgtggtgggtcctggtattgttctaggtcacttgccaagtgctgtgtgtattcagtgggctgatggggcaatgcatgtttgtttcctgattggcctttcagaaataagtggaaatgtttttgattctctttcaggctcagttagctctagaggccattcttttgctgatcctgccagtaatcttgggctggwagacattatcaggaaggctctcatgggaagctttgatgacaaagttgaggatcatggagttgtcatgtcccagcctatgggagtagtgcctggtactgccaacacctcagttgtgaccagtggtgagacacgaagagaggaaggggacccatcacctcattcaggtacagctttcattttagtgcttttctgctgcttttccccaaaaaagccagtttatttcccaaattctgatgcatcactaagacatttcatttatgtctttatgtgctcagagtcacctcttagggtttccgttacttaaaaaaggtttttgaaaacstacccagacattataatatgaacagaaataaaatggaagaaaatttttacccaaagtgtcaccctcctgggatgtccattttttatttgtttgcacctagtcctcatctatacatactgcattgtaattgtaacacaaatataatgtttttgaataaaagtgatttaactgtaaaaattaggctcagtagaaaagaaacataagccagccgggtgcggtggttcacgcctgtaatcccagcactttggggggcggaggcgggcggatcacaaggtcaagagatcgagaccatcctggccaacatggtgaaaccccatctctactaaaaatacaaaaattagctgggcatgatggcgtgtgcctgtaatcccaggtactcaggaggctgaggcaggagaattgcttgaacccgagaggcggaggttgctgtgagctgagatcacrccactgcactccagcctggaaacagagtgagactccgtctcaaaatacatacatacacasacacacacaataaaataaaataatcgtaagccataaaaaaagagtaggaaaaaaggtgtaatcatagcactttgggagggtaagttgggtggatcacttgagctcaggagtttgagaccagcctgggcaacatgatgaaaaccccgtctctacaaaaattacaaaaattagctgggtgtggtggctcacgctgtagtcccagttacttgtgggggccgaggtgggaagatcacttgagcccaggaggcagaggttgcagtgagctgcaattgcaccactgcactccagcccaggtgacaaagtgagaccctgtctcaaaaaaggaaaaaaaaaaagagtaggaaaaagggaagaaaaagaaacagttcttcagatcacatcatccggaatgctaatgcttgtatctgataagcattgtttcagacatgtctctggatagccagataagagttgctagaatgagattttatacattctgttaaaaacaagcacacaaaaaaaccataataatcctaagctttaatcttacaacctttttcttaatattttgagaatatctcttgtgcttttcaaaattacctgaagttcagcagtatttctgttttagtttagatttattttcctgttatcttcaagcaaaagatctatctcactatggttaagaaaaagattaaagagattagaggtcttaaaaaaaaaactatacatgttaactttaagaccttcccctttctgttcttaccttccaatttttattggctttaagtgtgtgtgttttaaggttataagactggtgacttagtcaattacaattgtactggttgtataggaatttggggcagtgtgaaattgttttgctggggctgaggaaaaaatttgctgatgacctgggctctgatctcttctgagctctttttgatgttttcttttagagcacagtcagaggtgtctcacttctgtgaaattctgctgagttcatcagctacacagtctggaaaaatcaaaagggctaccaaaacttgctgagcctctgctcaagtcctgtagtagcatgaagaagctttgttctgcagtttttcctttacatattatttctttgtgtggtgtattaattccagttgggaaaggggggttggtcattagtgaagtatgatttttgtcaccctgccttctttctttagtagtttctgtactctgaggccagtaaagaaggcttgatgtcccagaaatttcagttccttaattaccacattttaatggcaggaggacgaaccttgttttttgttttgattgttacaagtgaaatcctggctttcttttaaatgcaagcatacctcgttttattgtgcttttttttttaactgaaggtttatggcaaccctgtgtcaagcaagtctatcagcattatttttctaatagcatgggctctcctttgtgtctgtgtcatattttggtaattctcacaatatttcaaacttgttcatgattattatctctgtgatggtgatcagtgacctttgatattactattgtaattgtttgggggcaccatgaggagcacctgtataagatggcaaacaacccataaaggtggtgtgtgtcctgactcctccactgactggttgttccctgtctctctcctcctctggctcccttattccctgacacacaacaatattcaaattcggccaattaaccctgcaatggcttctaagtgttcaagtgaaaagaagaatcactaagtctgtcacttgaaatgaaaagttagaaatgattaagcttagtgagaaaggcatgttgaaagccaagacaggctgaaagctagacctcatgtgccaaacagttagccaaattgtgaatgcaaaggaaaagtttttgaaggaaattgaaagtgctattccagtgaacacacaaatggtaataaagcaaaacagtgtttcgtgacacacagaagattttagtggtctggatagaagaccaaaccagccacaacattcccttaagccaaaacctaatcctaatccaagccctaactcttcaattctctgaaggctcagagaggcgaggaagccacagatgagaaggctgaagctagcagaggccattcagaggttgaagaagccgtctctgtaacataaaagtgcaaggtgagggagaaagtgctgatgaagatgttgcagcaagttactcagaagacctagctaagatctttgataaaggtgactgcattaaacaacagatcttccatgtagacaaaacagccttctactggaagagtccaaaacttcaaaagacaggctgactctcttgttaggggctaatgcaggtggtgacttttaagttgaagccagtgctcctttaccattctgaaaatcctaggccacttaagaattatgcttggtctactcgcctgtgctctagaaatggaacaaagcctagatgacagcatgtgtttacagaatggcttgctgaatattttaagcccactgttcagacctactgcttagaaaaaataattttcaatactgctcattaacaatccacttagtcacccaagagctctgatggaaaggttcaaggagatgaatgttgttttcatgcctgctaacacaacatccattctgaagcccatggatcaaggaataatttctactttcaagtcttattatttaagaaatacatttcataaggcaatagctgccatagtgattcctctgacggatctgagcaaagtaaactgaaaaccttctgaaaaggattcaccattttagatgctattaacgacatttgtaattcatgggaggaggtaagaatatcaacattaacaggagtttggaaaaagatgattccagctcccatggataacttgggaggggatcaagacgtcagtggagggagtcactgcaggtgtaggagaaatagcaagagaggccgggtatgatgactcatgcctgtaatcccagcactttgggtggctgaggcagtagaatcacttgaacccaggagtttgagaccaacctgggcaacatggtgagaccccatctctacaaaaattttaaaaagtagccgggtgtggtggtgtgtacctgtggtcccagctacttgggtctgaggtgggaggattgcttgagcccaagaagttgaggctttagtgagctggtaagccgtgattgtgccactgcagtgcagcctgggcagcagaggtgagaccctgccttaaaaaaaaaaaaaaaaaaaaaagaacaagagaactagtagtggagcctgaagatgtaactgaattgctgcaatctcatgatcaaacttgaaatggatgaggagttgcttcttagggatgagcaaagaaagtggtttcttgagattgaatctgcccctgaagatgctgtgaacatggytgaaatgacaacaaaggatttagaatactacattacataaacccagttaataaagaagggtttgagggatcaactccaattttgaaagttctactgtggctaaaatgctatcattgcatgctacaaataagtctttcatgaaaggaaaagaaattgccacagccatcccagcctttggcaaccgccatgcagattagtcagcagccatcaacatggaggcaagaccatccaccagcaaaataattgtgacttactaaaccctcagtatctctgaggtatgcctgtagtattttatttcattgagtaccaggatctggattcttcatgttaccattctgcttttttttcatttagcaatatataatcattagcattttggtaatttttgagaacttaatatattaatactttaacttgaatttcactttcaggaggagtttgcaaaccaaagctgatcagcaagtcaaacagcaggaaatctaagtctcctatacctgggcaaggctacttaggaacggaacggccctcttcagtctcctctgtacattcagaaggggattaccataggcagacgccagggtgggcctgggaagacaggccctcttcaacaggtaaggattctgctttaacttagaaaatgagacagagcaataatatcaatgtcttggttattagttcttcaaaattcagcaactcttctaatttggaaacctatattcccatttctgtatcattaatatgttccactttcccgaatagaagtatttttttgaggggtcttgttctgtcacccaggctggaatgcaatggcatgatcatggctcactgcagcctcgacctctgaggctcaggtgatcctctcacctgagcgacccaagtagctgggactacaggcgtgcacgaccatgcctggctaatttttttcattttcattttaatttttattttttgtagggacaaggtctcactacgttgcccaggctggtctcgaactcctgaactcattcctcctgccttggcctcacaaagtgttagtattacaggagtcaaccaatgcacacacccagaatagaaactgaatgcacatataacctgaaacatttttagaatgcaaagcctgattaccataaacaaaggaagagctatgaaaaaataatctcaaccattctcctcacttctgtattacactggtagcgaacatttactatttgcaaagcaaataaggtggttttagttcttttgagaactgtacctgaatgtacccatgccacttctaagagtacttcacctttcatattggtattcttagaaaaagttcttagggaaatactaagaaatcaaaattagaaatgagaagactagtttaaaaagccatcatctagctgggcgcggtggctcatgcctgttatcccagcattttgggaggctgaggcgggcagatcacttgaggtcagaggtgggagaatcacttgaacctgggaggcggaaattgcagtgagctgagattgcgccactgcactccagcctgggcaacaaaaagagactccatcttaacaaaaacaaaaaaagccatcatctgtctgtacgttcactacatttacacaaactgatgaaaaacaatactccaggatacttattattttctattttgtgcctatttgtaaacttaatgtatgtaataactatgatcacagtagctttaaaaagcaacagacttttaaaataaaactgggatattacgaattttagagtttcagagaattataagccatcttttccttaggattaaatacaaatatgtcactgaaaaaaatctgaaatgtgcccttccctgtaagatatatgtaaattatatcaggcttttgcattataaaactcatgtcacatgcaaagtggttgttttgagtttgaaagcttacagcccagaccagtggttgctgcttctcagatctcttagggaagaattaattaggccatacatgagatttattatttgattaaatggttatgttttatgtttttgggtttttttttttttttttttggagacggagtttcgttcttgttgcccaggctggagtgcaatggtgctatcttggctcacagcaacctccgcctcctgggttcaggcgattctcctgcctcagcctcccgactagctgggattacaggcatgcaccaccacacccggctaattttgtaagatggggtttctccatgttggtcaggctggtcttgaactcccgacctcaggtgatctgcccaccttggcctcccaaagtgctgggattacaggcgtgagccactgcgcccagcctgtttttgcgttttcttaagctgtaggaggctttctggggacagttaaacatctagaaactgatgaagggtagcagtgttcattaattacctcatttctcaatcttgtagactttaaaatctgcccagtgagattcagcagatgacttgcatcctgctgcccctcagtctgcagacgttcctgggtacttgtccattgtcgtctgagaactatactcttgcatttctcttgaagagttaagaaagctcttgctataacctgactctgtgattctccatggaaacatctgatatagacttaactaaaaatctagcctgggctttctcttctgggctcagcagccctcactcatatgctactcatgttactcttcttttttggacccgcactgactgctatatatcattggctaggatttaagtggtgagactttggccattccgtgttgtattcattttgctttcatggtgtcacatgaccattttacaataatcctattctactccatcctacaaaagttggattggatgaaataccagttatgttcatgacaatgaaaacctaatttttcttttgtcaggctcaactcagtttccttataaccctctgactatgcggatgctcagcagtactccaccaacaccgattgcatgtgctccctctgcggtgaaccaagcagctcctcaccaacagaacaggatctgggagcgagagcctgccccactgctctcagcacagtacgagaccctgtcggatagtgatgactgaastgcacaaagtgaggggaacagggtgcaggagagggatctctagtttttgtggtttaatttttagtagcaggtcaaaaacctgccctcctgtgacttattccctgagacttttcaggagagccagcccacagatgatgaagaaatgatggaagttcatttggagagtcaaatgggaaaaaaacaaacaaaaaactgcctttgatacaggcaattcagtggactataataatagtggagggttgagatgtagagtttttaaaaagtgaacagttgctgttcttacatctgtaaagaaaaccataatgtctttaaatcactcttctgtaaatagatgacctttttgcagtgtatatccccttgctgtagtatctggtgtacttatgttcaaatcagcgcatcaactttgggggtgatttttaaaaatctttttgtctatctatctttttaaccctagccttctaaacaacctcatacagcccagttacataatgttggctgtcacgggcattgtacttttatctgatattgtttcctctaaattcagctttccagtgatgtttaaaatcttgtgaaaatgtttagatttttaacacagaccctgtcataaaatctgtacattagggtcaaaaggtaaaagtaacaaattctgccatattgtaaatttccagtgcaggctttaatttttttttttcattagtagcactgaaaaaatattactgcatgggtatgttctagttcagtttataaagttttaaaggcttatttgaggcatacctcactgttacgcacactggtaatttaaccatgcccctaagtattccttttctcctgcatttgatgcagcccaacaaagcttttgttttgaaataaatttgactaccctgtccatagctacagtagattatttgtggtttaaggctcctggtgtctcaggttccaaaggaaaagcttacatatttttcccttagtttgaatatatgattggttgggttaaaagataatgatctgtgtagtatttagataagctttatgctgcatcctgaaaaactcatggtgaacacagtcctttttccccatcactatggaccagcatttactctcactttgctcccttgggacaagagtttactgttaaatgttttcatttcacagagtctcaaggtgcaaataatttaaaagactgaattctaaactaattatggtactagagggccagttttatctttcattaagaattgcttgctgaattttaaagtttttttcatacaatttatcatagcatttaagtatctttctataacatagatactaacagttttgggagaatgccactggtaactggaaaggggagaaacagatctctcaggatgataaaaattagcactttacagactttcaagtagacctaaacttttaaacaaaagtactcaaggcttttaaggaagcagctctgtgattagctactgaccaagaccctcctatcactggtgtctaatccctatgttacagatgaagacayaggtttagtactttgcccatatagttaaattagtgacagagataggccataagcccacatttgtcttcagtcaaagctttcactcctgtccctgttccactcctgtatacctgaggtccccaacataaactttagatcaggcttagtggtcagcattcctagtacttggaaagttggtattttttacaacagatatatgtaaacatataaaaatttcaaaatgaatgaaaaacagtgactaaatgttccacttcacagttttctgctgaatttttttttttcaggtactggtaatattttagagtttgttaataatttatattgccaacctaccataaaagagattatgatggtatttttctatgaccctgagggtcttaagctattctgagtcagaatacagttgacccttgaacaacacgggtttgaactgtgtgggtccacttatacatggattttcttccacctctgccacccaagatagcaagaccaaccccttctcatcctcagcctattcaacatgaagatgacaaggatgaagaccttcatgatgatccacttccacttaatgaatagtaaatatattttctcttccttataatcttaacaaacattttctcttctctagcttactttattgtaagaatacagtatataatacatatacaaaatatgtgtcaatcgactatgttatccgtaagacttctggtcagcagtaggccatgagtagttaagttttggaggagtcaaagttagatgtggatttttgactacttagggggtctatgcccctaactcctgcattatttgaaggtcaaccgtatagtttctgagaacatgtcagatcagagcctaacttcttactcttgcagttctacctgaggacccgaaggtgaggtgctgtgaaccactccctccatcctcatcataatgcatgtgcgtattactttatttaccatcacctggagaagaaatctcagaatgagagttaaaatccaataatagttcttggttcaaaataaatgaaaggacagaattctcacatggtttacctatggaggttcaccttatcatgatttaagtggtaagcacagagcagcactgacaacttactgtggttcactgcaaaccaaaacatgatattctttgtagacttagatttcagtgttctgacactatatccttacacgtgatttttttagcacccagaactaaattaaggtcttcctaatactcttcataaaagtattctgacagccagttttccagtgcatgtttatgactgcaaatttcataatgcttttaattttggtacactgagtgattctattttaaaaatatttatgcccagaaaactccagtgaccattggacagttaaaaaattttaatgacacgattttaaccaattcacttttgaatttagaccaatcagtaaaggagatcagtcctccttttgcttcggtaccttattttacaacagtgtaaatgaactgtaatgaaaacacccacatgaagagactgtcctgaaaactcctagtgtttccaacaacgagaccatgagctgagtcactgtggatgatttaaaattaataaataaataaaacttggaatgaaaaacctttcagtaacccctgcagttgtgaaaaggtaaaaacattctcaatgcaaaaggtgagtggttgacattaatttttttaagaaatcaccatacgttaatactggtttctactgaaacagtctgatttatattgtatcttatctctctgagctagacttggtaaacggcattagctgcatggtaaataatatgagattagacagaaaataggaagaaatttacatctgcaacatacaaaactctagttttagtctaatccctgaggatttggacctcaaggtttctggtgtttttattttcttcagaaagttttttttttttttttttttttttttttgagaaatgcaaagattactgggatacatacaatattgttgtgtagtctcatttattatgaagattcttccagtatgtacatacgaaccaaaagtatcagtttatcagtcccactcacatcccacccccacaggcataccaacagggtcaatcttccttcatggtacctagaaaaactgtctttttccttaggtaaatggctaaaaatgtattcatgactgctgcagtaagagcatccacctatgtatctttacatactttgagacagtgtgataaagctctttcagcacagcagtctattcattcaaagtcatctaaccaaataccttcccccacagctaagaaagaatcccagtgtttccctagtttagagatgaagatactgaaattgcaaaagcaaaaaggctaggactaagatccaggtcagtagttcagctataccagcagtacacattagaattacgaagagttttaaaatatacctgtaggggcctattctgactcagaacagcctgggctgtgtgtccttaaagagtacttgagatgactcagttgtgtgactaaggctgcaaaggaagtagagtgttcagataacacagacaaaaggttacatcattcttagtttttagttttatataaacacccccatttttagttttatataaccagataaatatggttcacttttatttaaattcaaatgggtgctatactgtcacgtgcctaatccccactttacaacttcatgctggatgctggtagcaaactaagatatttttctcttttatgtattaaattccacttgtgcttcatgaaacagactataagaacaacaattcaccataatccccctttgccatgaggaaggtaattctggtcagtttgccaggtattgataaagtaaagtaagagaagacagggcagcaaatcagcagaccaaaaacttatggtagaaatgccaggctgaatcaccacacccacagcgcacaggaacaccagcccatatgaatctacagttctacttagaccagcagggacagcaccaagtcacgtgttacaactgaaagcatcacttgacgacatcctgaaaggtcataatcagttgggaatgaaagtcatttttcctttaaaatacaaaaatggcagtgtgtacaacccctccttcactaaggctaaattgaggaaacctgaatatcaaaaacgacagatttaagccattgatcgggtgccacagagacaggaatgatagctattcttccacattactagacattattctccctacacaaaaatggatttagagcttgacagaatttgtcaaaggtctacttttctttgacagctcagccaactcttccctgatgtgttgtacagaaatttcatcttttttcagctttgcttgcttcagtgcttcctggtagatctcttttgcttgtgtatatcgttctaaaataacccagagagaagggacagtaagaagaaagtgtatgttttcaaggtgattctgaagagagagcatgaatgcagatatagggctaatttactgtgtgcttatgaagcgacaagctggtgctgcctcatttcatccccatctgacaggctggaactccactgaatgctgtgggattcctaacggccctttccagtatatcctgaggactttgatgagcccaagatttcatgaatggtggtatgtgtaatacacctgtcatcccaggtttctgaaaatgatcggtatagtgtgctgacactaagaaatgtctgacaaaatgatacttcctgtcataaagcttcaccagcacactgtgagaaacacattgtaactgaacacatttagaaatctgtaaagcactactgacgtaaggtactatcattgcaaggttttctccagcttgatggggttcgacaggctagtgcaggtctgtagaagttacgtgaattgaacacaatagtacttcaacctaatcaatacctcctttttctgccattcaaccagtcttttaatttacatgtttattcgttggcccttgccctccctacataccacttcacaaatctatcaatccagtgacatccctcccttaaagcaagtcagttaagtttacattgctacctacctctgtgcatcaaaactgcagctagattactgagtaccatgtgtagctcaggatgatttatctgtcttgccagatctgatgccctttgcatataaatataggcctcatcaaagcggccctgtgcatccagggtagtagccaggtcactcatcagcacaatggtctgtatgtaaaagaaaaaacaattttttctttaaaaacatgccttcacagaactttaatgtggagtgcatccaactctgaatacataagatttcatctttcctagcattccacaaaagatgagggataccattctttaacaaatttgtgggcatttgttaatcataatcacattgtacagtggacaatgttagttcgaccttttgggaaataatacaaatctggaaattaggtaacagacagtgcttattaatccaactaattacccagttagaagcaccaaatgaaaaacaacagcaagaagctacacatattatctcctttaaggctgagcaactttgagaagccagcctcctatggtttgattgcctctggagccccactgtaattatgttgttcctgctgataaccctgaggctcatcaaaaacaagaaatacaccatctattttaggaagatgcccagtaggagtttttttaatttggctactgaaatggaatttcagtatggaagaggtagacttccatacctacttccccactgatgccatgctttaagccccctgactctagtacttggagatctgaattctgtacttgcttgtttattattcctcactccattaagggactcttcataataagttataaatccctttcatggagataattcatagctcaacctcccttttcttccaaaacatattactcaccctacccatgtaccccagccttgggacacattcagttaaaattgttatgtcttatattggcagtagcaagcattcatagacaaagcaatgcactccttacatctaagaacttactcggatggaggggagacccaaagagatgatttcaattcaatgtgtttaatgttctaacacagagctttacacgttatacttaaattctataatatgccaatggtttaagtgtttttaatgtggtcccttgcccttccctcacctcttgccattttaactgtggggcaagggaggcaaggatatttgtgtattaaaccgttcctcataagcttctaataggggtatctagagaccccactctgaaatactgtgctgtgtccattgaagcctgaccagtcctgctctgtagaaaggttgctctgttgtgcaaaccatggatcatgcaaaaagttctgggcagacctagtaactgataactagtctcaaatcctttctgaaacaagtagttggggtgagggtgctggtgataagaaaatgagtagactggggaccaaggaggatctaggaccatctgctgatcctgttaccaatgagtgtgacatttcacacccttcaattttgaagcctttgttttatattcccccttctgtgttttcctcccttacctgtgggtgtctttctccttgtatttcttcagaaatctgcagagctttttcatacatcctttgtgcctgtgacggctgcttggagaacagaaggtagcgagcacaggcgtctaagcacatgcccaagaggaggtgggtattggctttctcttccactaaggagaaaagaggaatcagcaaatctacccaaatggttgttaccaggacccacaaatatgtcagcagaatgggacccacatgtcacttagggaacaatgtaggtgaattaacatccagttaaatgacctattccagactagctggaatcatggaacttcagcccacattttaagtagattaagagtccgcacatcaattaaaatgtggaatgttatttttagtttgaaacaaataatattcagcagaaacaaatgaaaataaacccaaagaagaatgagttaacaacaaaaagtcaaggccaatgaaaaacctgtatggtataagaaaaacaatgcaggaagaagacagagaacactcagaatcctgaagtgcaaagtcacaagctgaatttaaagaattcaacgtaaaggccgggcgcggtggctcacacctgtaatcacagcactttgggaggccgaggcgggtggatcacaaggtcaggagattgagaccatcctggctaacatggtgaaaccccgtctctactaaaaatacaaaaaaaaaaaaaaaattagccaggcgtggtggcgggtacctgtagtcccagctactcaggaggctgaggcaggggaatggcgtgaacccaggaggtggagcttgcagtgagccgagatcacaccactgcactccagcctgggcgacagagcaagactcagtctcaaaagaaaaaaaaagaaaaaaaagaatttaaggtaaaatttaaacaagctaatcattcagagaagaagaataaagcttacaatgacatagcacctctcaacacattcaagaattgactatacgatgtctgaaaaaaaacaagcttaaaatacctaatgccatgtaagaagaattggagacacagatctagagaacggtaaccta

SEQ ID NO: 97043 - DNA, 25376 bp, Homo sapiens
ttctcaggaccagtatccagtgtgtgtcccaatcccggcttcacagaatcagtattaccactcttcaaggcagcagttaacatttgtttatcagatgggaatctttatttttgtatacttcacctaaaagatttttaaatgggagggcaagaattttataacaaaaggttcacaatattagcttccttatttttagtaactaaattccttctccccaccccttcccaggttcctgccatctccctggcttatgagcaggctgagagtgacatcatgaagagacagcccagaaatcccaaaacagacaaacttgtgaatgagcggctgatcagcatggcctatgggcagattggtaagctgcagcctggagtgggaagctggcacatctaaggcatctgaggtgatggtgtccacctcaggttgaggttgatttcagagactgcaaatccaggcgactttcaggtctaggatgagccctaacggagtgagcctgtggagtttctctgaactctcttccatgtgagaatacatctgttgctgtttgcccagttaccttttgtggaaactggttttctatactgagcaccttggaactgggctcaactctgcctgagaaatgaggatgtccttcctcactgagccttgcggaacaggaggcatggttctaaggaattgtgtgtactgacgcacaggctgctttccctggagatacacacttatctgtcactcacttggatggagttaggcattggagaaagtatatgtgtttgagagtttggctggtaggtcaccaccaaagggtgatcctccatccacctcacactggacttctgcccccacagtgcagcatgactagctaacaggtgatccaggtggtgggcaatcagcatgccatttgtttttaaatcctctgcctagggttccttcaagagaacctggcaaagccaccatggatgtcttattctcctggattaatgggtcacataactgtgaacgcttggataaagaagaacagattagatagaatattgtggaaattatggcaaagattcattagacagttgttggcaacaaagtaattggctggtggcccatcctgaccttctccaaggaggcctgcttttgagaggaaggaagactaggtctctggtggtttaggatgaaaccctgccctgaggaacttggagcagcgtggttaaattggatgccagggggaggagggtcctgaaggtggggaggagagtcagaaagtgccacagtggctagaaaaatggcagcatgtaggaattttgaaagatggaaaagaagttatcatttgtcagagattaaaaagtagggaagtggatttcccctaaaggtcatacccttagaagcagctggtcaagtaacaggtgggcattttgagagcaaggcacatgtgtctttgtgtaggctccaaaaagtgactcaaaaagcagagggccctgagattggagtgtatgcctggggtcctccatcccatccctcatagcctgtgagtgaccaggcaattctttcctgtgcttttatcaaccagggggaaacactcctccatatgtgctctcccaggcctgctgcagtaatcagctgaaggctatacaggtacccttgtgtgtgaggttctagtaattgggttgttttcccaacttaggaatgatccaggccctgggaggcttctttacttactttgtgattctggctgagaacggcttcctcccaattcacctgttgggcctccgagtggactgggatgaccgctggatcaacgatgtggaagacagctacgggcagcagtgggtgagtgggcacctctgacctgaccagtgtcagagctcctcaagccccagaagactgaggccacactgccaccagccatgcaggtgaagagccagagctcatcttctgtcttctgcatttcagacctatgagcagaggaaaatcgtggagttcacctgccacacagccttcttcgtcagtatcgtggtggtgcagtgggccgacttggtcatctgtaagaccaggaggaattcggtcttccagcaggggatgaagtaagtaatgaaggacatgtcaaggccttggctcaaagaaggggactggtgatttgtaaaccctttgccaaaaactaaacatatgacacatatagccaggtttctggaatctctagtttatagagcaaatttaggaagcaagaaatgtagctttctagttttttcatctgacctccaagttttcaagtacagctaatacataaagatgttgatctgccattttaatgcatagcattagaagataaacctttatttgcaccttttaagttttttctcccctactttgattttaggaacaagatcttgatatttggcctctttgaagagacagccctggctgctttcctttcctactgccctggaatgggtgttgctcttaggatgtatcccctcaagtaagttgatcctctggtagctccaaaaagtatgaaatagtatgtgtggcttttccccccattacttgtggtaatagttgttattttcagaattttgagtggtatgtacaaaaattcctatgggttggaaaactgtgaaagcttgacatgtcagtaaatcagactaacaaatcctgaggcttccatgatagcagctagtgtttaggatttggcccaagataagataaagccacacaggctctagctccatggaactgctcaacagcgaactgcattgagcactcaggtctgccacagctgtagtccagttgtctttagaggccaactgggggtatgctggagcgtaggcgcccaggctcaaatcttgatttgcttgcttagtcactgtcccattacaagtcatccacctttctgagactctgaatactctgctctcaaagaaagaaggttggagaaacagatctgaggtcccttttactttataatcagtcatgggtagagttgatcaaaggaagcatactgctagtctttggccttaaacacagtgaatgactctgcatttcagataaacttgaattttcaaagagggtttatcacaaactccgttagttttttgcaacattgagtatgtttggtgatacctggttgaggttaagcaactgcaacttgattaaaacgtgcaaagccacagattgtgggacccatttacaagttcctttgaagcttttgatttaaagcattagtctcctttgaattcctgctgtcctcatccttgctcagacccgtctggaccatctctcaatcccctgttgccagcacttccttcagctcatcttatccctaaagtaaccaaaacccatcagcctcattcacttcctgtgggttatgtgcagacatcgtctgtggtgcaagatgagactggcatccagagtcagtctcattgtcccaacctgtctttatagctttctcttgtaccccttacccatccaagctcatgttaggtgaattcggctttcttcctctgcctttgtgtttggtaagatccttcctccccacatccctccttctgttccctcttaccctgccaatcctgatagtcccttcagggccggtttccttggagcttgtccctccagggcctgtgcacttgcacctcttctctggcattacttgttgcttgtcatttcacctccctgctaggttttaatctagaaggcatgggccacagtgtctttcttctctgtgcatccccagctccctacacaaagctggtgtacagcaggggccagccatctccaaattgaattctgtcagcttgggccattatgtatcaagatggggcttggagaggtcacagagctttccaaaaaggctggtggaaaattacactgaaaagggggcatttccatcttctgggtccttccctggtttttttgccaccaccaaagagattgttctgacaggttctgcccaattttggaaggtggttcagttattcggtgactgagtcaaatgagatcatctctcttagctgccttgtcagacacacaggaagaagaggagaccaccggagtcctgcccagggacagcctttctcacaccatagcagggagctggtgatcacggaggctgcctggagcctgtcagcaggctagagactgtgtggctcagcctccaggccccttggaagccttcgggctcagcttttttcagtccccaggaccaggcctcagaacacagagctgatatcccaaatgctgttgtcagagatcaaatttggggaatgcataaactggttttgacccacactggcaggtctttatcttcaaaatgctgggatattaggcagatggtcttaaaaagcttcttaaacactttagaaatgaaagaaagaaaatgttcagttgctctgggatggttaacagaaaagtactctgctcatcctataaaccaagtcttatgaaatccaaactgaagatgagtagggattccattacaaagtctgcagactgatttcctctgcgtctctaggccctgggcacatggagtagcaatctgttttaagacatttttatttgttctgttaatgactcagtagttaactgtgactgtacttggcttctcctttcaggctgattatttcattgtcactggtgatgtgcaatttctctttctttatttgaactgtgttcgtgtgcatataaattggtaccttactctatttccagacctacctggtggttctgtgccttcccctactctcttctcatcttcgtatatgacgaagtcagaaaactcatcatcaggcgacgccctggcggtaattatgggcattctgactttggttggaggaggagtgggaggggctatagttctattggttttttgtttccctcaaggtgtctaggctccctcagtggtcagtctgattagctaaggtgactggaccagcaaactgaccatagtcacatcttcagaatgtagatctcagttacagtttgaggactggtcatgttttagactttaaaatacaaaccaagtatgatttagtgaaaacttgtcagaatctaaaccatctttccaggtaacttggtattcctaaaaacatgtaaataagtacagttgaggtcccatgtttggattttaacacacccgacccccatcatcctccggttggttttcatccctgtttccctctgtaatgctggagcgaggaagactcactgtagtgtgtcttgtctgtctctttgccacccacaggctgggtggagaaggaaacctactattagccccccgtcctgcacgccgtggagcatcaggccacacactctgcatccgacacccaccccctctttgtgtacttcagtcttggagtttggaactctaccctggtaggaaagcaccgcagcatgtggggaagcaagacgtcctggaatgaagcatgtagctctatggggggaggggggagggctgcctgaaaaccatccatctgtggaaatgacagcggggaaggtttttatgtgcctttttgtttttgtaaaaaaggaacacccggaaagactgaaagaatacattttatatctggatttttacaaataaagatggctattataatggaatttgtctgtgccctcgtcgcttctttggtacagatgtctatgtgatctggagctgtggttttcaacatgagtccctgaccagcagtttatcagcatcacctggttgcttgctaggaaggcgggcccagacccactgagtcagaaatgcatcagcaatgtggcttaataagccctcaggtgattttgatttacattcaagtttggaaaccactggctaagaggaagcattctgcccgtgctcttttagttggagtaggtgagtttacctgacccattttttctggctgctgcctggggtgatagggctgtaactccacctgctgccttagcatctggctttttgatggaagagcacctcgcctaaaggatttccagaccctcagagtatactaaactgcagatgaggcccttctctttcagtctaaaagagacctgaagccttcctgctttccctccagagatcaccaccacatctcaagtgtctctagcccagggcttatctgagaagcagaaatctatcccacacagtctgcctgggcatgtgtgctgagaagtggttcccttccttccatataatgtgttcctaatttagcatcaatgacacaatttcagcaagtggttatgtgccagcaagcacttaagaaaaaggtgaaagagatgtgtttacttcagggtcaagtctgagaacacctcctgctttcagagctgctgtaaaaggctcccctcagtctcagccatgagtggtgcagagtgctgttaactgccggtgcttctcccaggctgtcattgccaactgtcgcctccaagcaaacacaacaagcaaactccttacctctggcaccaaacagtgatcgtgatctgccagatgatcatagtgtcttttttctcygaaaagcttaactcagtcctcatgcttggttgctgtgcrcttccaagctgggccaatgcgggaggagacagtggtgactcctgtacactggggctgtggttgctgcacccacccactccagccgcagaactgggaggggcaggtggtcttggactctcctttcttggggcactttcccctgggatgatctctacatttgtctgcaagtcatctttaaaatgagccatttgctcagaccaagataaggaaactagaactaaaagatcatgggattagaaggttgtgagtcaggtagcaactggagcctcctggaaggtactttactggcccagctgtgacggcagggccagtcacacaagacgtctcttgtgaggtcaggctggcactggtggtatccgtactgcgactccctgtatgtctactttcrgcatccctggagaagaccaacgcacatacgctgctgcgatgaaggtcatgggcatttcctgatgcaaaagatttgaaacactctgagactttagcttttgacaaggggaccccagagaacgttaagccagtgtttctctgacagctctaagaagccctggtcttctgggaaaccctggagggagcaaggcaaaaggaaggctctgaacttcacacctgattttccaccagaacatttctgcycttttctgtgtgacaatcctttgaatagaaagttctacagccaaacatttgatttaggaagagcaggtaagtgagctgctcttcatgggtaaagctggcaccaaagtcaggcctgctgtgggttagagctttcccaactttctaaaagcaggagtgcttgggctctcatttctacctctacgctcaaactctcctgctggccctgtcactaggagctaaaatcactccagagccatcacaagcagcttctcacaatggccctcagcactgtcgattccctacagatctctgtctctgacccccctttcaaatgccttcctaacaaacacttctgaccacatacctttttcagtatatgggtcctcactgatatgttcaacttcttaaggtccttctcagcatttaaattgcggtcttatccctctcacatcctgacccctacccctttctctagctgtcaccctccctcatggacaaacttgtagaagagtcactgccactcctcctaattgttcacctcccagtcatccctctgcctcttccagctcccatgaacaccagtccaccaaaattgcctggttgaggccatactgacctcctgatgcatcttggtccttccttgacctctgctgcatctcttctgtccatcacacccttcctgaaaccagacctcccgtctttctgtcattgtctctgtgcactccttagctctcagccccctcttcacctgctcgacccctcgtttcctcagggaggcctccacaccttctctccctgcttcatactcttcctggcatgatttccagctctgatctggtcctctcctgagccccagatgtacaaatccagtgtgtcctagacatctgcatttgttcagaaagagcatggcacacttgagtcttagtaccaatggcgagcctaagtttgaggttccacaaataaatatgctttaggcagtgatgacatttggcaccctactgcccaagcgagaaaccggaaaggtgggtgagccctctcttttcctgctctgccccccacccaattactgtggattccaatgttgtggtagagaacatggactttgcgtcttttaacagacacagacagtgwcccatcactggctgatgaagggcacataatttagcctctttgtgcttcctttactctagaatatttcagagctgttaaaaggattaagtgaaattatgcataaaagggagtctcatagtggctgctgttcaatagttcattctctctactgccggtgtcctttacatctgggtgctggaagcggctttttggtggtatccctaatttttgcctttctctattccggtagttctcaaagtgtttctggaccagcagcatcagtatcacctgggagcttgttagaaatgcaaattctgatgcagacctattgaatcagaaactggaggtgaaacccagcaatctgttagaagtagctttccaggtgattctgatgcacagcaaaatctaagaactaatgctctaatccatcctccaagcccatatggctgcccctctccaccatccatcttcacactggaccccaacacataaacccatctctgctcagccattcaaactcctgtgcagtcccctaatgtgccatacaccctttcttctgccatcctataagtccctttggcattctcccaacccacccaccttccccccgaccttcattcacttggcaaatccactcaccctgtgaatacccattaggtctggatcctcacttttgcacaccttagtgtagcacttccacttctgttgatttgcctgttcccggatagattatgagttcctagatgacatggaccaggctataccctccccagcatctaatgctatggatgtttattgaatgaatggatgcatgcacatttttctgttgcccaaacagccatcattttaacatttcactgtcactttgagtccgcttcttggcttagggctgacaccttacccaagggaaatccatgtcccggcttgccacctgtctgtgagttaaggcctctcctctctcaagactttgaagttagagagtgtaagaatgagtcatgcatggaattagggtgttagaaagttgagtggggacccatggcaagcaaaggtactaggtaaagaagagatccacaaagacagagacaccaaaaggaacatcagccctggacctgcctggttccagagctttttagtccctgtcctgggcctctaatgctctcacaaacccctcccttccccaaactagattgaaatctcccatcagatagttgatgagtactctctatttcttcaaagaactcacaattctaattaattatctatattactcagttatgtaattattaatttaatatccctttttttcctgctaagctttatgaggtcataaagccaatctgttctttccattttatccctggtgctcagctcagtgcctcacaaagaaaactgaacacttagcacagggggtcaacactccctactgaaggaggagggcatagaggcaaagggacttgtccatggtgtcctgtgtttaagaaaaggaggcaaggctggaacaagactggaatgggtgggtctcacacttcccaccagctacgctgtgtgccgtcctcctagatgcaaacctgactgcacagatgttcgggcgctcacagtgggaggcatctcctggctgggctcaggcttgccggtgggactgcacgggatttgtgcccacagactttcaagtgctgggtttccttttcagccccaccacctcacccatgtgcccggagacagtgtaagtctcagcagtgggttgggaagcctggatcctgggcattttaggtggacaatgtgggcaagtcatgtggtctctccaascctctgtctgtaaaatgggaggtgacccccgttcctacctcatgaggctatcgtgaagactaagtgaaggaaaatgtggaaagggtttagtacagtgactggcccttcatcatagttcaataaaaggtcactcacctcctacacccgcccacacacacatctccaccccaaactgtgctccaggtgtctcctgaagataaacacaggggaacgcattgctgttcccacctaatggaagtagctacttactgtatagtggttgttacatgccaggcaatgtcctaaactatcaacatttcaaaagtgaaacaacagagcctcagagaagtgaagtaacttgcctgaagtcacacagccacaaagtggcagagttgggtgaatctgccttgaacccagacgggctcgaatcctgggctcccaacatgctagggaagtgttggctgtggtggcagaaagcactagcagggaccaagaacaggagaagggcagtgtttttatgaaaaacaaagaacagggaaggttagagttggtgttaaaacataagatcatggaaagtttcttggaaattaagcacatgctgttgaacagttactcaaatggatttgcccccaggagctgctgggtgatcaagctgcaacttgcataacgggagcaagaaggtgggaggctctaatcctyggcaagctcggcactgcctctcctgttaggtgaatgggcagatctgcttcccaggctgcggctgtctgcgtacggggatgtgtcccttgcctcctgtgggctgcagagaggcctcctctgcgttcatgattgtccttcagctgacagaagttttaatactgtccctcctggccctgtcttgtataagcagtgatctcatcccttctcatctcttcccttccccatttaggactctgacgcagtacagttaatctgtgcayaggaaagaagagctgtttgaagaggttattcggtaaatgcagagaatgtctttgtagtataaattattgctctatataaaactgcttgtaagtttttgttggtggtgtttttttgtttgtttgtttgttttagagatgtggtctcactcactatgttgcccaggctgggctcaagagatcctcctgacttggcctcccaaagtgctgggattataggtataagccacagcgcccacctggttgcaagtttttaaagttttgctaaaatgacaggcatatgaagacattattgccaactatatattgtcccagaaacaaacattcatcctttactataaaagtcttctgcgtatgggttctctcccaaagaagggacagcaaaatgctcacagccagctcttcaccccatgtgcatgtgccaggagagaagcccagagtccttgcaggtcacccaatccagctcccttatcactggtgccaacaaggcaatgttttctaagggaagggaaaccaacatttatcgaacatgtactactgcctacagcactattttgggggctttttatttcatttcatcctatgaagtagctagaggtaaatataatccccactttgcagaggggaaattgagaggttagtagcctgtaagaagtggttaagaatgtgtttgaacacatatctataagccttaatctttccattagatcaagctgcttcccattagggacataaaagaatcctgtgttgccactggtggtttttacctcaacataccctaaagccagagactcccatatactaaggtggactcatcagattcttgtgggtccatatacttgagcagctagctaggtatacttattccaaagaagtagctagtaggtaggcatggcagaaacttattagttgttcaacaaaccataccccttcttcttcctaagcacccaccttgaacacatttctcaccccaccttgtggaggtacagccatgtgactgttctaggcaacggaacaggagttcacctgatgtacctatcacttgcaggcctggcccataagcccttccacaaaaaagcattctctttctatacctaccagatgcatggtggaagaaataggaaggccctcaagcagtggttctcatcgttagctgttgattgaaatcacatgagagctttaaatatcgccattgtcaggctgcatcctagaccaattaaaacagacactctggaagtggaaccaggcatcaggatttaacaaagcttcccaggtgattccagtgtgctgccaaggtagaaaatcattgcctcaggctgggcactttgggaggccaaggcagatggatcgcctgaggtcaggagctcaagaccagcctggccaacatagtgaaaccccatctctactaaaaatacaaaaaattagctgggcgtggtggcgggcacctgtaatcctacctactcaggaggctgaggcaggagaattgcttgaacccaggaggcagaggttgcagtgcagtgagccgagatcgcatcattgcattccaggctgggcaaaaagagcgagactccgtctcaaaaaaaaaaaagagaaaaaagaaaaaaaaaatcaaatcattgcctcagagcaatgattctcaaaatgtgtcccccaaccagcaagaccagcaagaccagcaatgcctgggaactgtttataaaatgcacatccacaagccccatcccagacctactgagtcagaaactctggggaattgcattttaagctctccagatgactctgatgcatactgaagtttgagaacttctagaggaagtaagccacaagacagaaggagcctggccctgagtcgctgcttggaggagggccatgtgagagaacaactcaatcaggaacacccatatcagactattgtgtgagaaacccactttcattgtgttaagccattgactcagtgggtacgcatttatgtggcttatgagagaacatggaagattggaaggtggggtctaagcagtggtgtgcaggagctggctcacaccagctcatttgttaaattttcaggaattttgcaaacaaggtgacttctcattggcaacattaaattggccaaggttggaatagttacaccatggaaattgtcaaatgctacaaaccaggacttgttttcccagagagctggttgttaaacattaaccagcacaccactgggactaagcatcagagagtagaaaggtgggatgatggtacagtggccctgggctgtaatgaaccatcaaaggaaatgccatcatgtgaggctctctaggcccagcccacacgcaggcttctcttgacaacactgtgtctttgccatgtccttgtatttagagattctggaagctgagagagaaagactgtggaagcagagtgggtgaatggtcaaaactatcattcaggttaagaactggtggggtttctcaactgtggcactgttaagcttttgatcagatgaatctttttgggggacggtatcctgtaccttgtgcattttagtaggtttagcagcctccctgggctctacccactagatgtcattagccacccttctccctccagttgtgacaaggaaaagtgtcttcagatactatcaaatgtccgtccgctggaggcaaaatcacccccagttgagaaccactaattaagaactacctagaaggcaagagacacccccataggggtgggctgggcctcagcctaccatctcaaccccatgacaatttagggaagatgcttttggattcaactgtaatcactttctatcacattctattaatctcttttccaatgttccctatctctctgatcactccactccgttctctaccacacagctcccagagtctgtaccacattagctcttggtttgggagtgtctgatgttgactgaaaaatatttcaagtgtgttagcttctctcctcgacaccactggcctccatccctcttcaagatagtatggtgcagggattgagaacactggttctaatggcagctggtctgcctggatcttgctctgccatactttagctctgactttaggcaagtcacttaacctctctgagcctcctccatttccttgttaatcaaacgggtgaaaatactatttcctacttcatagagttctgagaataaagtgagataatactcaacaaacactggctactgtttttcactcaacggattttagagcacacccagaatggtggaccatgtgccacatgctgggggaatggaattgagcaaaacaaacacataggcccactccctgttacagtctggtggggaagacagtgcaatgagcaggtcttaagaggatgtgtggtaagtgccagaagaggaaaatcccctggtaccacagaaaaccacaggtggagcctaaccaagcctcaggggttgggaggaggctcctggggaaaataaggatgggctccgggcaggccctgctggttgcctgccaaatgtacatgccctccccttggtctttacccatcccatgctccactggggtatcccaatttttctggatcttttttctttacacttttttccatttatttacttataaaaatacggaatgcttcatgaatttgcacagcatccttgcacaggggtcatggtcatctctgtgtggttccaattttagcatacatgcttccaaagccagcactcttcacttttttcaccacactcagctctccttcctttcttctcctaaaaggtaaccaaccattttaatgtttatcttcttatttcaatgtgttcttgcaacatgggtattgttttgtgtgtgtgtatgtacttttaaacttttatcatgaaaattctctaaggtacacaaaagtagagaagataatatcacaaacttccatgtagccatcatgtagtttgaacaattttaccaacattttgccaattgtgttttatctagtctctcctctccatccctacttctttctttcagaagtattttaagacaatcccagacatggtttcacccattatacatctcagtatgcatgttcaacagaaaatgacttttccaaaaaactcataaccaccaagtagattctttttttcttttttttttttttttgctatgagtactcctgatccttcctatgatactccagttgcttctaactgctacacagtgctttttgtgtgcacgccccacatgtgacctattatttttcacaataattgacactcagttggtgggcaactcccttccaccactaataagactgcaggagcatcctcacacaggtcttctcctggcctttgtgagaatttctcctgggacagaactgtgggtcacatgatatattcatttacataatttcaccaagaagaccagactgccctccagaatggctgcaccagtccacagtctcaccagcagcgtgaggttcccatgtctgcacaccctgccaatcactggaattgtccagctggctttttttctttttttttaattttctcagacctcgcaggtttctattaataattgttttcagtctatgtaaagtctcatttaaattcatatttttgatgattaacaatgattttgagcattttatcatattttgtaagattttagggttaattcttccataaatggcatgttcatatcttttactcatttttctatggggttgctgtctttttcctgatttgtaggaattccttgtgtattctagatattagtcagttttagacactgcaagcatcttttcccattctgtcatttggtcctactttttgatcacttttgtatccrcctttctctcccaccttcagctccagggggatctcctgctcagtctcatctactcatgagactcctatacccccttgccagtgatggatttaggaatacagttgtgaccaattctctacaacatagtgaattcagccagagggcttccaagaaaaatttcttcactcctcagagacacaagaagatctagtctctgtctctcctcccgctgagtgttctctggatatgacatggagcttctgtaaccatcttactaccagtttgaggataaaacccaccatgaaggcatggtactgttggtggcagagttaagccactgtattaaccaccttggggcctgcatcacctctagtcttccctttaagtgagataataaatgtcctcctcatctaagttagattgagccaggatttctgacacttgcagtgagaaggatatggacagatgcagcctctaagccaggggtttttgaatcttttttttttttttaatcgcaatcaccagtaagaatttggctttttatatcatgatcccgcatccacataacaaacagcacttaacttcatggtgtctaatgtgctcagatagcctcttttctatttcctttaatctttttgtctttgtttttctggagggtgtgggggacggtaatgctcaatgtaacctactaaattaattacacaagctactaatgggtcatgacccacagtttgaaaaacattgctctaggtctcaggcctctgaactgaggcctgtaagaataatgggctttagtcaagtaagatctgcagtggggagcgaggatggtggggagggtgttttctaggaaagaatactgtacagaggccctcagcaggatggggccaatcagatacctccctcccccaagtgtgaccacagagtgagcccttgataaacctttgttgattggttgtgttccctcccacagctctcctcccagggtgcctttctgcaaccttattctatgaatagatgagagctcttatctcccctctgcctgaccctcaggacacagaagggttggrgggggggagggccctgaagtcggctaattagagatggctgggaggattactagggccttgctctggcagctgtgcccacctctaaattcaatatccagaacctgcagagaaagggctcaccttgataagctccggagacaaagcaggagacagatagggtttgttctcaacagagcactcaccctctgaatacagtttttgtttaagccccaaggctgggaacattccacagcctggcaaactccctgtctcctcaaggtcagtccttcctcagcattcctctttggaaacgtctcccacggctggccctgctcctgccccctggctttaggggcagttatataactcttaggaagacctagaaatgcaagcatatggtgtcctcaattcccagcacagacttgctgcttcacatttttagctggtgctgagagactggctttcacacacagacacacacacatacacatccctgactcataactacatttctgctgcagtattgcagatttctaaaaaattaaatcctacatctggagccacataagggtgaaagcataggacattttgtcccagtaactgtggggatagaaaggcctctgaggcaggacacaaaggccatatcagggccactgcagggccagaggtcctagcacccctggctttggctctgagggtttggttgcttgcagctgaattccctaaccaaagcctgtcatgtgtggtgccaagctcacaaattcagcatgcatctactatgtgtttgcaatgactaaaaggttacagaaggcagcctggattgcggggatcggggatacttagaaaatacgttctgcaaaatgttgtattagaggttctgaaaattaagatacagaaaacattttacttaatgaagaaaatagggtaaatatgttcaaaggagtatagttgttaaaagcaaactgtttagagtcaagatcaacccagattcactttctggttctctgcagcttactagctgtgaccttcaacaagtctctcttaacctgagtcttagctttccaatatgtaaaatggacacagcattgtgagggtggttgggaggattaaatgagatcagagaatttagcaccatgactgtaaagagaaagggctctacaaatgtagctggtactacaattcacttttttttttttgagacaggacctgactgtcacccaggctggagtgcactggcatgattacagctcactgcagcctcgacctgccaggctcaagccatcctcccacctcagcctccagagtaactgggactacaggcatgcgccaccacatcctgctaatttttatattttttgtagagatggggtttttgcatgttgccaggctgatttcaaacttctgagctcaagccatctgcctgccttggcctcctaaagtgttgggattataggcaaatgagccaccacgccagcccacaattcactttaaacacaagtgaaacacatttcattagacagtggaatagacttatgtcaattttcttttctctcttattttacacagtctgatttcctgaagacaggaggcgggartaagctaatcaggccctgagttagctgtttccaagaagcttagagtgtcccacttacctacgggttgcagggcccgcattgccagtagggctggcttttagggatgctgctgttggtgtgtgytgtacttgttttctaggattgggacaagcttccttgagctcctgactttagagaccaggtttgggaactgatgggtgcarmaaatgcaaacagacagcaaacaggccaaagaggagattcattcactgaagagggccctggtacagtactgtcgaggttttgcggtggcctggacacggctggctccttcgacttacacaatatatcttctctctctcttacctgcacttataagaatcggtgctaagggtatgtgcctaccacagtgcagcttgtagattaatgaagaaagaattgctgccacttcccaaatattaaacgccaggttctgcctatgcatattctctcaaccttcacaacacacctactaactccagcttacaaatgaggagacgaaccagcaggctgttccaggcgtctggttgtaagagcagtggcagtagagaaaatgatttattttagcaccagccactgtgctaatccctttagatatcatctcatttaatccttttaacaaccctgaagcaccatccttattctaaagggacttcggacctctctgcggtccacactgtcccctgctcggtgcaggagtgtagactgggactgttccgtctggtggtctccccgacaagggttcacctggaaactggcctttgggctgggattgggactctgtacttaggctggcagcccatattaggactgggcaccgtgataagcactttcttaccgcaaatgcacgatttcactcggccctcacacaccccacgaggtgggcaccgtcacagtgccatctcacaggcaaggaggccaggcccaggccctgaggatgcgccgctcaggtgggagcttccggggagctcgcgcgacagcctgggggagcgcggattcgtctctgcgctacggcggctgcagagggtcaacccgcggaggcggcgcttcgcggcgggtcctcggcctgaggctgtgggatgcctccaaacccggcgcggcctccgtctgcaaggagagcagagggtccccgccgggagcgcgcccggctgcggccccaggcggccctgcccgcagccgccacctgagcttgggcgcggctcctatctcccacccgcgcgtcggccagtgaagggctccgtgcttaaacatcattcgttacagaagtattgcggccatcacacggcattttaaaaacacgaatgatgataaataactttaacactgcttccaattctgcctccaagcacagcatcattaccatttgcatgcgtttcacttcattcgatttccatgtgtatggatttgtttctacatagctgtggtaaaacgcacatactaaactgaatccagggttgttttccactttgtaacatgaacattttcaccgtgttagtactgacgcttcctacctataatttttaatggcaggactttaaaaaattgggttgatacgctgtcacttctctgagcatctcgcaaatgttcaacattcaagtggcttccaaagcttcacgattataaattattcattcttttttgttttgtttggttgtttgtttgtttgtttgtttgttttttgagacgatgtctcgctcttgtcgcccaggctggagtgcagtggcgcgatctcagctcactgcaaccttcgccttccaggttcaagagattctcctgcctcagcctcctgagtagctgagattacgggcatctgccaccacgcccacctaatttttgtactttcagtagagacggggtttcatcatgttggccaggctggtctcgaacttctgacctcaggtgcttctccctcgacccggcctcggcctcccaaagtgctgggattacagcactttgctgcccagcccattcttgtgtataaagtcctttcagtattgagatcagtttccttaggttatattcacaggagtgaaactgctaagtcagaatgtgagcatttaaaagctttcagtattattgccaaatggcttttcacagatgactcagggaggttttggtacttggaacactgctacttatatcccactcccccccccccccaccaggaaaacatctaaagtgcactttttttttttttttttttttttttgtgagacggtatctcgctctgtcgcccaggctggagtgcagtggcgcgatctccgttcactgcaagctccgcctcccaggttcacgccattctcctgcctcagcctcctgagtagctgggactacaggcgcccgccaccacgcccggctaatttttgtgtttttagtagagacggggtttcaccgtgttagccaggatggtctggatctctgaccttgtgatccgcccgcctcggcctcccaaagtgctgggattacaggcgtgagccaccgcgcccggctaaaatgcagtttcattaagagatagtgaccctttctgagagtgtctacatttaattgggatcagagcttgaagttgaaaattttgtgccctgggacttcagacatcagaaaacagggtaggaagattctcacgggttaggatttttctggtgaccctgagtgggggagccacttattctgccttcacttaaggctaaactagactcccggccctgcgtagagttctgagggacaccagggtcacaaggctagtgagacagagttcatttggaagaagtgaaataatttaggaattcacagaatattgatgatgatatccttcctcctccagatgacaaggtaataaagaataatgagatgtgatcatgggaaatagccaccatgagcagcagccaccaaggcacataaatactgtggaattgactctgctgtcagcttgtgggtttctggagtgacagattaaaccaaactcagtccagcttcttgtttactctgtgtaaatctactcactgtccagaatcttcaggccggtgttgccaccacttgttctgtctgtgattcccagtgatgagtaggaggtgaccagcaggcagactgtctccctatgggtagggagcctcagagttctgcagggactggggtataggtagaagatgaaaaaaatatcctttctgaatcagctctttgcctgtctgggcaaacccctacgtttcctatccacactttctctgctctaggacctaagccttggagagttgcccccagttcattgacaagctccctacactagagtccttttgtagtgggcattggggtgcaccacccagatttctctttagaactggtgaacttattccctcaagctgctggggatttgctggcagacagacctctccaggaagtgccttagctgaagagagatcctcactcaaggtcacaccccaccccccttcctggagcagcccacatccaatgaggtatacttgtctggcaccctcaccccaccttcaaagttccctatggggtcagcagagacctttgttgagactgctttgcagcctaacttatctctctgcacaaattgtttctcattttccttctattccaaaggtgttaatcccaagagtattcctaataaatgtccctcatggaagtttccatctctgggtcagcttctgggaagctcaacctgtgacaccaatcccacatgaaatatttatgtgctactccatgagtcccttgtttaataaacattatctagcaataacatggggataaggtcacaactcaaaatagactagcttatagctttgcagcttgttttgtgtcacttttttttctgattctcacgagctctgtcacactacaactcctatttctaggtgtggaagacagaataatggccccgaagacgacttacatggcatagggaaatcaggattgcagatggaattaaggttgataatcaagtgatcttaaaataggaagattgtactgaatttaacaggctcgatgtaatcacaaggatccttagacgtggaagagggaggcagaagagagtgagatgtgactatggaagagaatcagggagatgtgaaaattactcactcgccattgctggaggagatggaagaagggggtcacaaaccaaggaataaatgtggcctccagaaagtgtgaaaggcaagaaaatggattcttccctagagcctccagaaaaaagtgcggccctgccaacacctttattctagcccatgtcagatttctagcctaaaaaactgtaaaataatacatttatgttgttttaagccatttagtttgtagtgatttgttacggcagcaataggagaccaagacactgggcaaatctgcttccttcccaagggctcacttataggcgaggccgcagcagaaacagtgaggaggaagcagttggaacagaacaacctctcacatgaataactcttggccctcctgtcttgatgctaccatgaaagaagaaagcatctaatatttctccataatctacctctttaaagtgaaataataaatctgagaattttagcagtggacaaaaggataaagttcatctgtatcaatggctttcaagctttcatttagcagaggaacattttttaaaaatagagaatcacagacaaacaatatccaagacataaaagtggagctatcctgattgaagcccaaggcccatggtctttcgcctcccctgaggaactgaggacgaaggacaaaaaccatccacctaggacacttggcccctggactggagaacagcaaaacaaaagttagaactcaagtctctacctcagcctggtgcctaggcaaaaagattgactataggctgttctcagaacacttgtgggacagccttctgtggtcaatgagatttatgcagcatcacgggacatctgtgaatttcctatagacagatctacacctcttcttacatgtttcttgtgtatgttgcactttgttatacactggatcttcacacctagagccagtcccactggagatgtgaaataaacagcttactacatgatgtgactgtgtgacaacacagtcatcatctgactccaaacctctcccccagcagtccgccaagatgcctgacactctaccattggagtctctaaggaattgcctacaaaaggctcccttcaaaatttaaatacatttcattgattgcaaggctcacactgtatcatttctaaacatctttaaaatcagggcctaacaaatctctggactcttgcagttataatttttttaatggtacataaataaatgtagcatcttgcaatcgatgtcattttagatttgaagaaatacggtatgtgacttgggtggatgagaaataaattaacctattagcacctttgaaggctgaagcagatcagagtcctcaaaaaatggagataggagtgtgtgtgcatgtgtgagtgtgcatgtgtgcaaggtagagtctccgcactagcagggatctcagcagacaagaacaagcatgacagggaagggagggagacatgggaaagctttcttgggctgtgtggagcttatattctgacatagagattgaataaattaagatcctcatttggatacatggcaaaggttttttggattgtgtaaagtttatattctgacataagaaattgaataaattaagatcctcatttgttcttggcagcaaatgagattccaaaatggttgctagagttatgttacaatgacattccttatttcagagtctataatcaagcaaatcaagttaatcaagtaaatataaaatatacagttttaaatgtaactcattcattctaccaaatggacatactcatcatttctctgtactggctaaagatcagatggtagctaacatgagacttcgcgagtaacagttggtcaactagacttttgtttgtccttccagtccatttagctaaatgaactattaattcatttcaccagcatcttctgccttaatcaaaggtcagcagcccaaaggtatttgccaatcctaggatgacatttaagatctaaaaaataaaatatacttttgaaatacagacatgcattcattaactaataattatgatgaagacaagagtttattatttaaacaattttttgtttgagaacagaaggagaaaccaaaattgcaatccagggacttgttatttcgtcttccctgctgcaaaaattagctatcacttggtgtccagccaaggccatgaagtcccactttgcttgtctttcattataaatttggagatgtgctcctctggaaaacaaattggcactaacatataataaaattctctgcaaaaggacaacagcccttacaaatcacacagaggaaaaacaacagttttctgctaaaaaattcatcatgtcactgcctgcaattcaccaatatgggtgcaaatggttggaatatttttatgtttggcagaaaagataaaggtctaaagaagaaacatcactgatggcttaactgaacagaacataatgaactgaaaaatctctcaattttagcagatccctcttcagcccttaaagcactcccagtagtggtgcaaaccctgtacttaggttatcttgcagaagctactggcatttagcaatgcgctagctgatctgagggaaggtacagggagatatagagatgtagaagttgaccactgaatgcagccctaagtgagcaaatggactgagagagctaaaaatcttgcaaacaggtaccatttgtaaaatcagttccccttgtttcaaactcattaatggtgtattcctgtatgctgagtttctgcagaacatagcccatctggttagaaaaatgcctacaccataattcagcagacattttctgaaaatataccacgtgcacggcattgaatggggcaccatggaggatacatattgatattgtagag

SEQ ID NO: 97044 - DNA, 111842 bp, Homo sapiens
  misc_feature (1)...(111842): n = A,T,C or G
ttggccagaccggtcttgaactcctgacctcaggtgatccgcccacctcagtctcccaaaatgctgggattacaggtgtgagccactgggcctggcaagatttgaaattttgaaggaaacagggacaggattgctgggggtgacagcaactccagagcctcagagaatgtgctggtcacttgctctgtgatttcaccaagacaagactagtggccctcagctcctcatcagccacacggagcggggtgtgaacagccccaccaacgatattccagaatagcgcaaaccctgaggcccgcagacggctgctcagggtggaaaagtgacccacatccatcctggaagggtgcagaaaaggaaaggaaatgtagggacagttctacttgagaatacgagaaaatggtaacaggaataagaaacaggtatttgcagctgctgaggaacgcatgtggcctcccactgcgtcggtctgcagcacaggactggtccctgcatgtgtgacgttctcatttggagggagcttcttacagcttagtggtgagagacacaggcaaactgaaagaatctgttatttgtgcttttctcagatgaagactgggtggatagaggctctgaggttttatatcttctagttccttttagcaaaaaagaaaaaatcagtgaaagccagctaagtccagaaaaacccggtggatgttgaggctggaagtgagagccagctcccaggtgtgtccgagcaggtgccttcctcgccgtgggtggggctgggctggagtcaggaaggacctggagcttccagagggggcctgggaggatgcagatcaccttcccatttctgggcaggagctccagatgcccctctgctccacgtggggctttccacaagaagaaagagtgggtgtgatcacgtgagtgtgagcaccagtgtgggcaggtgtaagtgttagcagaaaactgcaagggaagaaggtggcagcggctttgaaccccaggacaacaggtgccccagacagtgcttctgtgttcactctagagcaggggcacccaatcttttggtatccccgggttacactggaataagaattatcttggaccacacgtaaaatacactcacacagtgatagcttatgagctttaaaaaattgcaaaaaaatctcataattttttttttttttgagacagagtttggttcttgttgcccaggctggagtacaatggtgcgatcttggctcactgcaacctccacgtcccaggttcaagtgattctcctgcttcagcatcccaagtagctgtgattacaggcatgtgccaccacaccaggctaatttttttgtatttttattagagacagggtttcactatgttggccaggctggtctcaaactcctgacctcaagtgatccatccgccttggcctcccaaagtgctgggattacaggcatgagccaccgcacccggccaaaaaatctcataatgttttaagaaagtttatgaatttgtgttgggccacattcagagccatctcgtgggccgtggcctgtgggctggatacgcttgctttagagtcaacgttgccgttcctgtttttgggttcattggcccagtcacaccgggtaatgatagtctgttttggggagaggcagatcatgcgggcagagtgtggactgggttctggcccctcccaggcgggtgtacatatccccctccaccgggtgcactcctgagcgtggggcactcaccgcctcctctgcttccttgcacaactctggtgccgtgcagaggggcagagcccagaggagctttcccggccagttggggctgccctggtttttggaccctttggagggaggaatgcccagtggctcagtccacccacagtgcggagctgcttcttgagggttgccttgtgggcaggggcagcctggtgcagaggcagcttagccgggaggctgacccctttccttgtcctgggctccgagacccagacaagatccggtctcagtagatttttgtgaggaaagagattgactcaactgtgtgtgtattttgacaaactaattttagagggtagatgaaatgtctgatgaaaccttgacatggaattagccaattttaagaacatccacttactacatgttcaacgaggcctcacacataaatttaacgtggttttggaaaatgcagcacttaacataagatcacatttttatctgtatgtcccaaagtgcaaatataatttcaaatgttctgccatcttggtaacagtttttttacattatgcagttaccctcaatgctgtttttgaattacatgccagagtgtttttagttaccacaagaaggaaaacaaagtgcaaaactgaattgagctacgtgtgtggcagacaggcctcctagaaggctctgcaaaatccatccaaggactagaggggcacagccctgctgggaacagccggcggggcggccgttgtgggtggctgagctgatggcggcttccctccgggccttccttcttcccacccaccttcagagcctcggggtggggagggttggaggcaggtgtgtctggcgtattgaacccactaaggtgagctccgtgctcgggggtgctgtctgcagccacatcctcatttctttgggcctcagttttgttgtttgaaaagcgaatggactgaacaagagcagcctttttaaagcagaagaccttttcttcaaatgaaatctgataaaggcattcattaagaaaactgtggctagactattttgaaaataagagtttctaacctttccttattctgacccaacccggcgcatgacattccctgtctttggggtgcggtgaggacgtgggagctgagagctggggctttgtggtctctgcggctcccccatctcctgatgccctttggagctcagaagtccaggcattttgatgtccagtaatgggctggctgttccgtagacagtgggctttggaattccacagcattgccctgacagatgggaaaggaatcctcctctgcaaacagaacccagggacatggacttgctgttgacccacatcaatgtcgtagaaaacttcccttgtgagtatttgacaaactcagaaacaatttaatattagaaggagaggaaaaaattgcttgcagagtttttgacagagagggagctcacttgcttgggttgagcgttgctccgctgggagagggatggacgctgctgcagcctcttcagctacatttaaaaatggcgctgggcacatcccttctgcgctttggttccttctttcccataactgatgcactgaagaattttgcatagctttcttatgtcccagtaagagtaggaaatcaatttaaaaaggccaggcaccgtggctcacgcccgtaatcccatcactttgggaggccgaggtgggcggattgcctgaggttagaagttcgagaccagcctggccaacatggtgaaaccccaactctactaaaaatacaaaaaaattagctgggcatggtggcgtgcgcctgtaatcccatgtactcaggaggctgaggcaggggaattgcttgaacctgggaggcggaagttgcagtgagccgagattgcaccactgcactccaggctgggtgacagagcaagactccatctcaaacaaaaaacacaaaacaacaacaacaaaaaaagaaggggctggtttgaattaatgaaaaatctagaaaactcatggttttattttgttaaagactgtaactcaagccagatagtcacattgtctcttcttccttagggatcttatttgacaaatatatagaaatgttagtaattagcatatcaattggcagtctgttaattcatggttgtaataaagccttgctgttttctgaagtgagctaggccagtttacttcatgaacagacttaacaagcctcatgctagccagttctgagctccctgaattggaagcaggtgtgatgcgcatgcgtggtgctctgcagtctctcagcttccccagcggccttggccccttctcctctgatacttccccttttatgcgtccgcagcccttttgggttctgagctgcggcaagctttaagcaagtgttttaattttctttagttcacttagctaagtcttcaacagattaactaacgttcgtaccttggtagaattatagccagattttgcaaagagcttgtgaaatgacagccagatggctgtggaatctgaatattcactgctgagaaccgaagccagctttcctactatgaagatgttctgtgtgagccacaccttgcccagggtggaagtgatgtttgtttcaggtccacagacgagggagaggacggagccagtggaccctcggtggcagtgtctggtgcagatgtgggcaggtaaccgggtggaataatgcttgctttgctggcattttggccttaattttagaaaacaacaagttaggtttgtagggctcaggacaggtcaaaactcagtgcactaaatgccaccacagcccagagttctgagtgacagttccaagcacgtgctgatgatcaaagccctagagaaaccaaagaatttgaatgtccctttgaaatttacagcaaaaaatttaccctatgtcttcaagacaaacatgagaagcaccgatttatgaggtgccaggcacactagtgtttatgaatacttagatgatttgtggcaaatagaaaggccataggcttcagaatagacctggattcaaatcccagcattgccaattagcacctgtgcagccctgagcagctcacttaacctctccgagcctcagctgcccgtctgcaaaaaagtggattcctatcctgcaggtggtagtagggattaaagaaggtaacttgtgggcagcacctgtgtgcttggcgctcggtaaatactggacacgtggcacacgttgttaccagccactggggcacattggccttggtgacctaatggagaaagccaaaccgaagtgctaaccccacaggtcgatggaggccccgagaacttgttggttcttccacactgaaggaaaagctcatggaattttaagggcagaagagaccttggcggtgggaggtgttagagcttcctccatgcagacacacacggtgggccctggggcgaccccacccctgcccgaagccccagggtcccttgtggtctcgtctggatgtggggtggtgacgctctgctgtccctttggagggtacgcgtgttgggggcatgggtgggagcagagccacctccaaagaaacccccccttggccatgtgctttcctcccatggagcacaggtggggggcccagcctgggctcctcattgccccccgagacccagcacgtcacctccacatttatagactctctagctgggcccagccatggagccccagaggctgggggctgagcttgtgcagccccaggaaccttagctctccagggctcctctggcccgagggaggggctgacagccctttttgttaagggcattgacagtgacttctgggcaggagaccctaatacgcttggagtaaaaagggagggtgatgccttggtgggcccgaggctcctgggagcccccggctgcagagacaagaaccatgaggaaatgcagagtgaggcccttggctagccagggcatgggacccggtccctgcctgtgtgtgactgcaaaggccactcaggcacccgctgcagcagccacgtggggacactgaccagaccacacagcaccagcctgtcccagccagtcccagctccaggctcaccgtatgtccccagccgtcaccagctccaggctcacagtatgtccccagctgtcatcagctccaggttcacagtgcaccgtccggttccagccgtcaccaggtccaggctcacagtatgtccccagctgtcaccagctgcaggctcacagtgcaatgtctggttccagccgtcaccagctccaggctcacagtatgtctccagcagccaccagctccaggctcacagtatgtccccagccgtcaccagctccaggctcacagtgcaccgtccggttccagctgtcatcagctccaggctcacagtatgtccccagccgtcaccaactccaggctcacagtgtgtccctcaggacccgggactcggcgctagacccccagagtgagcatgctccagcgtaaggctccaggcctttccctctcggaagggccaccctttagaagtgcctgctctcatctgtcctggaggttatggctgaacccacaccaggaccgtcactcattcgagctccctgggtttgctccaaggctgtgctgttgagaccacatccaggacaggagtccggtgctgggccagggtcagatgttctgatttgcagggaggagccacttgcatgcatttctctgtggaaacaaaaggcttgtttttgaaggcagcaaccctaaggatgtttaaaaggcaagtggacagttttgggggtaaacctatttaatgaaatgcacacagccaatattgctgtcacttgtgtcttcaggtgcctagagggtgaatgtgatatatagcaactcaatatcttagtgcatttaaatatacattttaaaagattctctgactcattggaattcatagttccatttttagatgaaattgaagacatagttcagggaaaatgggacagttacttgtttgttaccagtgtggtcgttgcaggctgtgctggctgacacggggggcatggcttttccctgaaacaccttggaatctgcagttgtcgttccctccagagcgctgaggggtgaagggaaacccctccattttggatttggagagctgagccctggggggttcgtgctgcctcacttccagcaggtcctgggactgggctgggagtcagaccaccccctgcccacctgtgagtttgggtgggtcgtgtcttcgttccctcatctgtgaagtgggaataaaaagctgagctccggggcctgttgttggggttacgaggctgcgagaatcactggagtcagggccctgcacgaggcaggtgttcacggacctgagttcctcttcccgccccgtggtgccgcctgcttttgggatgaggtagtggctggggtgtccgtagtgcagtgcatgggaaagggctcaaggcagtggaggatgggaggccactgtcaggtgagcgcccacctattctcagtgcctagggcgctgggatgcgtctctgcaggtcccatgggtgggctggggcacttgagacgccatgtgtgacggctgggagaggcacacacgcattatagaagccacagaaatcacgacccacggaggctgcgctttttccttggaaacttgcagccatagccttggtggtaacagggacagaagcagcaagtagacacacgctggaggtcgcctgcgagtggattcccagagggacacgccgcgcaggggtgaggggcagtgctgggaggagaaccactggggttagtgtttgtgagggagcgcagcgtgcgccagtcaccggacgagcaggtctcgaaacactttccgagatgcggtgcacagacctggctgtgggctacgtcgagtatgaaaagtgtccccacattttccagaaacaaagccacttacagggggcccctaaaaaggggcactgattctaaaggtgcacgagctgtgctcttttccgccagcgtccggaagagagctccacagggggaccctctgtccctgtggtggtctactccttccgtgcttggaaagccagattttgcttccaaatctagaagaaatgagtaatgaaaaaaagtaatgttttctctcaccagctctaaagtgatggcttttcagcattttaaaatgcagttctgctactagaatttgaaacaacaaattacatttatgaggtcaaggtgaagctagcaaatattacagggaaaggaacattcataaataaagatgaagtcatttatcagagacctaaataagaaataggctgaaagcgctggtgagataaactggtaatgtaagggtcatttagcctaatgttcacatttatatgcaaggaatcgagtttgcagcacagtccaggctcgttgctgggctggcagatgaggccgggtgctctgcggggtgcccaccctccacgtcctgctctgtgtcccacaggtctgtgggtcctttgacctctgtcctgactcacctgcctctggcccctggtctgctggtcttctctggctgagtgkaagggagcgcagcttcagagcaccttttccctgttctgaggcaggagaatggcagagggagctggagcttggatagagacggcatgtggactgcacttcctccctggcgacagcccccgctggcctgtccttgggctgcagctcactgtttcctgacagttgactctcatgcatgactctgcttcctcgtttgggccttgggtgctaacgacgacattactgctgaactagagagcctcttcctgtggttccttatgcctgacccttgcccttgtaagccatccctctccagttatcctaatttggctatgctattcatcatagtccgctcaggatgctataacaaatatgctgcagcctygggcttaaacaatggatgtttatttttcacatttctggaggctggaagtgtggggtcaaggtgccagcagacttggtgtctgggagcgcctgcttctggtttgcagaggcctgtcttctcactgggacctcacaggggcgagcagagggtgggctcctgagtctcttcctataagggcactaatcccatcctgaggctccaccctgatggcccagtcatgtcccagagggccctcctaacaccatcacgtaggagttttgggaggactcacacattcagtccggggcacagtctgtctccacccgtgtcctactgacagatgtttgctcagttgttttcctgagtcccgtcttattgatggtgggctgggaaggcccttgtgtcttcctgagtcttgtctcagtgatggcaggctgggaaggtcattgtgtcttcctgagtctcgtcttgtcgatggtggactgggaaggcccttgtgtcttcctgagtctcatctcgtcaatggtgggctgggaaggcccttgtgtcttcctgagtcttgttttgtcaatggtgggctgggaaggcccttgtgtcttcctgagtcacatcctggtgatggctgcctgggaaggcccttgtgttttcctgagtcccgtctcggtgatggtgggctgggagggtccttgtgtcttcctgagtcccgtcttgttgatggtgggctgggaaggcccttgtgtcttcctgagtctcatcttgtcaatggcgggctggaaaggcccttgtggggtcttcctgagtcccatctgggttatagtgggctgggaaggcccttgtgtcttcatgtgtgcctggtgcacaatagacaaggcagggcagcacttacttaacttcttattgtttattttcttgaaaacatcatcaagtttatgaaaccaggcaaagtttcaaatctaagacaatcactttcattaggcaagcctctgtctagccctgtctggacccagaggaggaggtgatgattttcagcaaaatttaaagggcatttcagaccttctttattttagttttcatgttttatatttttgaattttaattgatgggcttaatgagatttggggcattgcatcgccaacatccacaacaaaactaaatggaaggtatgggctggagttgtggttgctttgtgtggttgttttgagtgttttgtgtggttatgtgtggggttctggttagtaaggtcccaaccttttggatgtgaactgaaattttatttttcttcatcttatctagtatggaaccagacttttagattactcatttttgaagtacttttgcagattttaaaaataaactggatggaaaacttagacattttatagaaaatgaaagaaaaaatcccaaatataatcaagtatagccgctatattaagatttactgtgtttccttccagtctttttttttaaacactttatgtaaaaacaatcatggttgaggacatatacacactctgtattctgctttgtgttgtgtacacagttgaccaactaactgaaaaaactttattgcctaatttctaatggttgcctattaattgtttttgtatgatttcaatagccacctgaatgctacaagaagtcctcagtgccatggtctgaccccagagaaagccccagccgctccccaggtgctctaacaggcagttgacaaatagtccagccgcagaaagcaggattctgacacagttctgtatcaggagaacgaaaacagcacagattaaatgcaggtaccctcccattgcaggttcttaccatgacccagtgaggtgggcattttaaatccccaatttacagaaaggaaaaacaaggctcagctcatgtaagaaacttacccgaattcacgcagctgaatggggagggagtgagcattgacattaggtgtggttggctcaaagcccacaacttcccttggtactgagtagttaagagtatctgagatcaaagctgctgttttcttcgaccagattgtggaaggaacaagatatgcctttgctacagggtaactcagaacttcaacacttccttagattacatgagtaacagccacagaaaagaataccccatggaatctgagaatctgacattcccaggctgggagatcatttgggaggcaatgcaggaggaacagaggctttggaggtggctggtctctaaagatgttgtgtgaagtgctcctttctgcgagggcatactgaggtgtagttctggggaacactgaaacgcctgcctgctgacgaggctcgaggcaggacttccagacccccacctcactgtctcccgctgcgtttcccaccccgccctccctggctgtgcaggctgcccaacgtgcaggcgtcgtctctgctgatctagcaggatgttatctgtcgatgagctgcctggagccaagaaacatatggagaatgtctcgtcttcagagggtctgcacagccgaggtgaaacatgcccgggcagatggccactgtgtgacgtggtaggctagctttggcctgggtgatggggggagcttcgcagagatgtgtcttcaggagggactgtggtggacaagctgagtggcagctccattgcaagatggatggaggctcttggggtacggcaatgagggcagcagttggggcagagtcgcagttcagacatccagccaggcctgatcccactgcgtttgggaaatgaagagcagcacacagctgtccctgatgaagcctgtggcatgggtggtcacaacctgcacccacagccatccctgacagagcccagggcatgggtggtcacaacctgcacccacagccatccctgacggagcccagggcgtgggtggccacaacctgcacccacagccatccctgacggagcccggggcgtgggtggtcacaacctgcacccacagccatccctgacggagcccggggcgtgggtggtcacaacctgcacccacagccatccctgacggagcccggggggtgggtggtcacaacctgcacccacagccatccctgacggagcccggggcgtgggtggtcacaacctgcacccacagccatccctgacggagcccggggcgtgggtggtcacaacctgcacccacagccatccctgatggagcccggggcatgggtggccacaacctgcacccacagccatccctgatggagcccggggggtgggtggtcacaacctgcactggccagtggaggcccagggagggtagcccctgcatcttcaggcaaggcatccccagcaaaggcagtggtggctggggagagagcagctgtgacggcggcacggagggcctgacgtgcgactttgggatgtacccggagtgggagctgtgttttcatggtgttcattctgcatccacatcttcagaggaaatccccgaggcattgtgagcatgtccatcagggcaccctggaaagcttggtaaatgctgtgtggtggcgaaaggatgtccgttataggtgagagcttcatcgattgatggaagattgacggctcggtgcctcaggctagagcttctgtggtgtccacctggtgcaatgcagagggctggggtcaggacggtctctgcgggacgtcccctctggcccctgggatagggactcctcgtgtgttgcagggagacccatcacgcaggacagggtcctggcggtgcctccgggagtggacataggtctgtctggctcctgatggcttcctagcactccacgttgggccactcagtggaaggcaaaggtgcgatctccttggatggtttgtgtctgggatttgcagccagaygcggagggtcctagaaatctccatttctgagcttcttgctcaacaagtgagtttggcaaagttttgttgggacttaaagtttgcacagattccatctgtgagaggctcactttggtgagtgcagatcttgggcgctgccctgtgagcgagggtgcactgaggaagatgatgttgctgtaattaggacaaatgcactcagcccagtatctccagggatttgagaatcagttcattctgcaagtaacaaaactagggaaggaagtggttttcaagctcccgtggttgttggaggtgagctaattctttgcgagttattaattgctggtctcttggaatggcttgggagcacaaagtgacaggaacccaagtcatttctgttctgtttgcttgtgtttgttttgctttaagttaatcctttggtggttctggggatgaggccttgtccctggcttggtagagagaggccagtcaggagggagcaggtgtggtggagcctggccgtccctgagccatcaagatggtctgcgcgtcagagtgcagcacgggccacattctctctgccatgtgcagagggctcctgcacrgaagcctgcacgcatttaacaccagcacgctcaatgtagtcttgtaaggaacaggttgaagtgtgccgtggtgtgtctggaggaagcgcctgttgctggtttttgttgttttgttatgtattttttgccatgttccatgctgttcctctaatcacatcatgtccygggtttttgaagtttagtgacgtttttggtcttttcttactttttacccatgttttttcctctttgtaggatcaaagtcacatacaatagcaactttattataacgcacggtccaccacgctccaacttccagtgtggaggcatcggtgggggtttgctgaaagcctgagcaaatctcatggctgtctctgctgtctccgtgatgactctgtggggcacgtgactggaatgctctgatgcctgtttgacatctggggcttctcagaagccacaggagccacgctgggggctgacagtttcctctcccaatgtcgcttttgggcatctaagagcctggtcatagagacgtgacgtggcttgagaatggacagaggccaagagcagataacaaagcaaggtcgtgcccgacgagctgaggatctttttacactgggggcatgggcaccacccaggtgctgggccaaccctgaagcggtctgcacctccctccggcacccccttctttagggagcctctgttaatgcaggattaaagtctgtggatggacacgcccctttctgactttgttgtttattcagttttcactgtggcaaaaacctattctaagaataaaataagccggtttatctgacccttcagagggaaggacccacgttgctttgggttttttgccttccgtgtccttgtcagtggaaaccccaaatgcctgggcttctcggcgcacctaagtgtttaggcacgtgtgagtgcagtgatgcgttcagcttccaggtgcctagtaggttggagccagcgtggctgggaggaggcatgtgtttgtgtaaaatatgctcctgttcaccacgttctttctatgagcagagggcaggtggtgggtgagggcgtcgagcctggtgtttggaggttgttttatgtgatacagatttcttaacctttttctctaaaggtgatggtccagtggtgcattggttttgttctttcctgcacttgcttcagcctcctcctctcagctggggtgtttgcatctgctgccttccaggaggctgcgcgtgagatgtgggcatctgtccaccacagcaaacacccgtctgcctcgtgaggaggcctcatggtgccttccccacaggtgggatgagctgagcctggagggggctttgccacagccctgggtcgttctctcagggaacacctgctgtttctgtgccacccctgggctcgcaggcctggatctggatggggttggggccttcctgtggcccccttccccatcagttcatggagggtggcagccgcgggcttgagctcgactctggagagggagatgtgaactgacagccttggcttcccttccctggagcgtttcttggatggcagcatgggacgtgggtaatggggcgtggctgggaagccgttacctgagcgctgtagggtgatgtgtctgtaaatttgctgtgtcaggcatggtttggggcagctgttggccgggctgtaacctaggacattaaattcagttccctcatcgcagcttagggatcctctcgctttgaacacagtctgttgtggtttgtttttgtttgtgtgcacatgctcacccacgcccatgcacatgttcacacacacacccccatgcacatgctcatatacatacatgtggccacacacatccgcatacagatacatccgtacacatgcttacacacacacacgtgtatgttttgagggcacttgatcactagctccccccagcctgccattcccctgctctgctgagtgaacgtccttcctggaacctgcatgggacccacatggcccgacacctcttgcctcgcccctcaggagcaggaaggagtgggttctgctgtgaaacagatcttgggagtgtgcatgtttcttttcctttgccaccagctctttgtggtctgggtctttgcaaccccagcactcactctgtttcatatgttagtgtaaacctgcacacatacacctcacatgggcacacatatatgcacacatgggtgctcacaggcacacgctctcacacgtgtgctgtagctggttccatcgtgggctttctcttcaccttgcccacatggaacccccccccgccttgctctatgtgtttaagtcgtggggtacsagagctccctgtcccagtgcatgaaacctgctccagggagcagagctgagtctgtggcacacggggaggccggcgtgggatgtccaggtccccagcattcccaggagctcctgcagagcctccgcaaattgccaccttccctcattcagtccaattatgcttgttctgttttcctcatgtaccagcatcagtattgaagagaaacaaaaaataattttggattcaatttcattgcttcacttaattattactgtaaagaccttgctttccattgctttttattgcaagcatgtggcatttaaattgtattttggatcgacaggctttgatggactagccagggaaccaaatcactaattccatgttctaaatatctgacgtaattctacttatttktggggtcagcctgtcctaggaatggatctcacttcttttgcattctctctgttttccctcttggttgtgacagaaacttggagctaggcyttaagttaggggtgtgcatgtggcatgcgtgtggtgtgtatggcatgtgtggcgtgcatgcttgtgtgtggtatgtgagatacatgtgtgcatgtgtgtggtagcgtgcatatgtgtgctgtgtgtggcacgtgtgtggtgtgcatatgtgtggtgtgtggcatgtgtgatgtacacgtgtgtgtggtgtttgtccatgtgtgtagaggagatgctgagaactcatgctggctggggaggcctggggagactgtgagctggtcctgctcccgcctggccccttctggtgaccgcccctccccacagcccctggggctggtggacacagcccaggtgtggtgagtgtgtgctgtgtccgcagagggaagctgctgtcattcccacactgcatcttcgctgctgattggagcccagactcacacagttgccactctccccacatttgactcattttggtcaaaaatgcacaaaatatctaatacagagcactctgtggttccagaggcagcgatgtgagtttgcagctgtgtgtgagctgtcaccatggctcgtcgttgctggccgtggtcagcagcaccttccctgtccttgggggtgtcctggtgagtccgtcctcctgctggcctcccctgggccttcccaccttcctctgccgacacagccaatgcttgctctggggcgtgtcagcacctgcacagcagagatgccacgcattccaaagcaaaatggagatgattttaaaatgtgaaaatattcagaagtaaatatgcacgcagctgctcctcccatcagcgttagccccaggaccaacagcgacgggtgcttagtgcccaccaggtgctgtgtgagtgctgcgggcattctaatgtcctgtgtcccaggcatcattgttattattgtctgtctgcctgtctgagaaggggattgaggcatttgggtgacttttctcaggctgcagagctgagatttgcccctggctgtgtgatcccaaagccccttggtgggctcgaaggccaggctgactttcgtgagcacacgtttccctcacagggctggccccctgaggagctggtgtttccacccctcatcaccttagactcaggctgtgtaggaaatgttgtgtcttccaattccgggcactttaatccttgtttgcttcctgttgtggactcaccgaggccagtgtccatcgtgcacagttctttttttttttttttccgtttttgagacggagttttgctctgttgcccaggctggagtgcagtgcagtggtgtgatctcggcttactggaagctccgcctcccatgttcatgccactctcctgcctcagcctcccgagtagctggaagtacaggcacccgccaccacacctggctaattttttttttttttgtatttttagtagagacggggtttcaccgtgttagccaggatggtctcaatctcctgacctcttgatccgtccccctcagcctcccaaagtgctgggattacaggtgtgagccaccgagcctggcccagcatgcgtggttctaaatcagctgaaatgtaggcattcacaggtctgagacagcaagtgaacctgttcctgatacaccaggtgacgctttgtaaatgtgcatttcacagggcaagagacggctgaccggctctggggagtgattgagtggcctgttttgggacgtcacctggygttcataccccatggcaaacctcagcagcatctggaggctgcccaggcgggtgcccccrcctgtcctgcacccaagcacgggtacccccaccacactgtatgagtgcaccttctcgggagcctcttgtttaggctgatgcctctggagctctgtggaaacatgatgtgttacttggcagctgttacacagccagttgctagcagcttcactgcttagtacacaccaacttcctccatgtgctcacacaacacaggaacacccaggagcagctcctcggctgtccctgcctgccccctaccctgtcgtttagactgagtgtcctgctgagtccctgctgtgtgtcgggcgggatcagagatgggctttaaaccaacagacatagcacaagcaacacaggtaggtggtccctgctacacaggaaggtggttgagacagcagcaccgaggcgcagcttgtggggcaggtgagatgtggctggtgctgatgaatctgggatacggggcaggaagaccaggggagcctggggtgagagctggcggaggacagcctggccccagccccatgtacacagacaattctactctctgcagaggtcacrgtgagggaatggccagctctgtgtggctgctgtgagacccccccacagagtggagcccacacctcggagccctgccctgtgcacaacccccacatggctgagcagtgggccgccaggtgttaggaaggaccagcggcctgggagggacactgaccgtagtccctgtaaacaggcaaacacaatcccaactccacggtattctcagaaggaggaaatggagaggccagcccatggcctggggctggtgaggcctccatggcactgaagcaggaggtcagacatgttccttcacctgctcatcacatgtgtcttggcagacactcgctgaggatttagcacgtccaaggactggacacggagacgcaggctggccctgtcttcagggagctgtggccagggaaggcagtgaagtggctccggtggcggggggcatggccggggtcagggaggcccaggacgcgccttgtggggaggaggcctggggagctggtggagaagctgggtgtggggtggggggaggtgagggccaggcccacggtgcgggaaggacacagctgcatttgctccgaggacgggaaggctgtgggggatcctcggagggatgctcctcggagggatgctctcccaggcctgagccaggttggcttgtgcagtttctgcgcacgtctcgactctgcttggggcttctggtgatatttgtcacaaaccataacttgtgttgttacaagttatgcctttatgaaggtttgaggaggtcaccaactctatcttcattgtgttagaaagaaagtggcggaatccactgtatgaattggctcagtctccmtaacaaacccccacaaaccaggcggcttagcaaacaacagacatttctgagtcctggaggccgaaagtccaagatgagagcacggcagggcaggttcccccagaggcctctccccttggctggcagatgccgtctcctccctgtgccccacagggttgtccatctgtgcgtgtctgtgtcctcacctcctcctccataaggacccagtcagcctggatccgggcccatccggcgacctcgttttactgaaatcacctctttcaagacccatctccaaatacagtcccattctgaggtcctgggggtcaggacttcagtgtatgaactttggggtgcacaactcagccatcacacccacaaacaggaaatgggatcaggaatggagaacaaccgagtcagtttcccaagccacagtccagcatgtcggaattccgaggccgtgaccagcggagagacctccagaccctgtgtttgtgggaacgtggttgcctgtgccccgtcctagctcagagtggctggtggttctcgtgagcgtggctctacctggttatctctgcagcgtcccacgggagagatgcagccctgcygagctcaccgggaaggagtggygtcagttcccttcgccgccacaggtgggcagggagggcctgagcctgcacgaggggtgaccccttcgccacacaagtgaatcctgccctggattccgccggcaccctgccaacaccaggagccgtgtgtctgcctgatgtggctccccccagagcgggccctttcagaagctgtaggaagtcatcatctcctcagggactgggcagatagtcccccttcccacacagcgctgctgaggaaggaaggactgcacaatgccagccagaggggagagtaggggctgggctgcaggtctgcaggtctgcagagagccgagtcaatgggggggcattgtcggcttgggatgttgagaccctaaggcttcaggagagcttgggtcttcctgtcagggctctgggacaggtctgaggtctgtgaggggaggcgtcttcaccctgtatcatcggggctttcctcttgctgaagcgggagcttccacactgtgtgagcacagcagagagaggtggctgtggagcaggtgccgtggagagagaccagcagagatgtcctgggagatgggggcatctgcccccgagggctgcttgggaatgaggagggcacattagataaatactcattgtgcatgaaaggatctttaaaaatccccgtaatatgtgtgattatgctgaataataattaaacacggcactattaatactccatcccgtaggacctctcaggaggaagggaggagatacagtgagcgcctgttctgggccagggaggctggggtggccccagctcaggatttctgcagagcctgtgtccagctgtagagcgaggggtgcggagcggctcagccttggtcccactttccgtccttaagtctggatggggctggcaggctggaaacctggcccgtgcgtagcccatggcccctggggcctagcatcctgcccgtgctaccttctgctgcagcttctgctcgggtctcacggttttgttgcacattagggggccgtgtgttctccttggcagatgcccagtttccaaaatagagaaactttcacctctggactacttgccagaggtgcttttccttccagagcggtcagggcctgcctcacgctgtgctctgcagccggctccagagcctggagctgggaagtccagcactgtgcagggcctgggacgcagcatttcttcgcatggagggccagcttgagggttcagtcagagccttgcatcctgagccacagtcttccaagggctgtcttttcggagggtgcaggagaccgctgctggggccacacttcgaagggcagtgatgctggcacaggtggtgttggctgtgctggaggagcccccagtggcctcatcggaactacagtgggccctgggacaacatgggtctgaactcatttattcatggatctttccaaccaaatatggatcaaaaatgcagtatttgagggctgtgaaagccaagtgtacagaagctgactttttgtgtatgcagattccgtggggcagctgcaggacttcagtgtgtgaagattttggcgtaagtgggggtcctgggaccaatccccactccatgctgagggttaacgccaatttttcctgcaaaaacctgatttccaaacgcagtcaccttctgaggcactgggctggggacatccatctacgagttctggggcttgaccataacaaccaacagctttcctcgcactcctcagcgatctggcttcacttccctccactccagggcagactccactccagggcagactccactccagggcagacgactccactccagggcagactccgctccagggcagactccgctccagggcagactccgctccagggtagacgactccactccagggcagactccactccagggcagacgactccactccagggcagactccactccagggcagacgactccactccagggtagacgactccactccagggcagactccactccagggccgactccactccagggcagacgactccacaccagggcagactccgctccagggcagatgactccactccagggcagactccactccagggtagacgactccactccagggtagacgactccactccagggtagacgactccactccagggcagactccactccagggcagacgactccactccagggcagactccactccagggtagacgactccactccagggcagacgactccactccagggcagactccactccagggcagacgactccactccagggcagacgactccgctccagggcagacgactccactccagggcagactccgctccagggcagatgactccactccagggcagactctgctccagggcagatgactccactccagggcagacgactccactccagggcagaggactccattccagggcagactctgctccagggcagacgactccactccagggcagacgactccactccagggcagaggactccactccagggcagacgactccgctccagggcagactccgcttcagggcagactccgctccagggcagatgactccgctccagggcagacgactccactccagggcagactccacttcagggcagactcgctgtcggcagcatggtggctgctcctttggctaatctcttgtccgcaccagccctcaccgtgggacgtgtctgcaccactctggctgctgaggctcacccaccacccccgcccctggtcacactggggctccccagaccccaacctggctgcaacccgtctggcccctccaacttgtgcttcctgtgatgtcccctcctggaccccaagagtcacaccctggcctcctgcgctcttatcttgttcttctgagaccccattttccagttttcaagatgtcagcagccacggtgatgctgacaatccctaaatctaagtgtcagctcatcctctgttgaagcccttggctattcttgaaattcccatttttgggtaacttttgttcatctcagtcccagcaagttctgggtgatctttgctgccctctcccttctcacggcaggtctgttctctccagctccacatctgccacacacagaagcaagtgtgtggaaatgaagacttgggctgttggaagaactcgtgatggtgagctgctctcaagacaaggaaagccaatgtccacgtgagaaccaggggagacgctgagccctgcagactgtgccaacccctgggctggctccggtggtccgagtgcctcacggactccagaccatgctgatgccctcacttcaccttaatctgtgtccacagactgcatctagccgcagcaaggtgcatgttgtaagtgcatctggtcaccaggggccaggttacagagagcgattcgctgtacacacacagtggtgccagaacacaccctgcacatgcaccatcctggacagtccattctgacgtggaccttcctcttaaaacagtccaccaytctgacgtggacctttctcctaaacagtctaccattccgatgtggaccttccccctgagccagcacccggacagtccaccattgtgacgtggacctccctcctgagccactacctggacagtccaccattgtgacgtggacctccctcccgagccagtacctggacagtccaccattgtgacgtggacctccctcccgagccagcacctggacagtccaccattgtgacgtggacctccctcccgagccactacctggacagtccaccattgtgacgtggacctccctcccgagccagcacccggacagtccaccattgtgacgtggacctccctcctgagccactacccggacagtccaccattgtgacgtggacctccctcctgagccagcacctggacagtccaccattgtgacgtggacctccctcctgagccactacccggacagtccaccattgtgacgtggacctccctcccgagccagtacccggacagtccaccattgtgacgtggacctccctcctgagccactacctggacagtccaccattgtgacgtggacctccctcccgagccactacctggacagtccaccattgtgacgtggacctccctcccgagccactacctggacagtccaccattgtgacgtggacctccctcccgagccactacccggacagtccaccattgtgacgtggacctcccccctgagccagtacctggacagtccaccattgtgacgtggacctccctcctgagccactacccggacagtccaccattgtgacgtggacctcccccctgagccactacccggacagtccaccattgtgacgtggacctccctcccgagccactacccggacagtccaccattgtgacgtggacctccctcccgagccactacctggacagtccaccattgtgacgtggacctcccccctgagccactacccggacagtccaccattgtgacgtggacctccctcccgagccagtacccggacagtccaccattgtgacgtggacctccctcccgagccagcacctggacagtccaccattgtgacgtggacctccctcctgagccactacctggacagtccaccattgtgacgtggacctcccccctgagccagtacctggacagtccaccattccgatgcggaccttcctcctgagccagcacccagcgtgctgctcctgagaaatcattcgtcaactgattttggagttactgcttcagcatcttgctgattactaatagatttcctcattgttaaatttagatgcagggagaaaaaacaatttccagaaataattcaccctgttgggaagccagacacctagtactgtctctaactcagcaactaactgtgtggtttcgggtgaatcacacagtcctgtgcgttggtctagatgttttctcaggtccctttgggcaagaatacagccagccctgcataccctcaggttctgcctgagtcgaccaacagaggattgaaagtactggggaaaaaaatataaaataacaatacaacaataaaaataatacaaataaaattatagtatgactacgcagacagcattccagctggggcaggaagtcactgcgtctgcaggactgagcgcctcgcacagagggaagtcatggaataaggtccyggctgcagcacttggaatcctgctgtgggagagataagagggacgtggctgaaatctcctgttccttggctggctgagatctcggccaggccctcatggcctgcagggtgcctgtggtttgcccagcgtatccatgtgtatcctcctgctgaatctttgctgcaccctcatgagagtgaagaggctggggttaccgatctggtgctcagacatggaaaccaggacgtgctcactgtgacctggctgggcatggctgaggcagggattaggattttctgataagcagccacccgatcgttcttcrtatgtttgtttctattggtaatatggttgaaaaaaatccaggagttatagtcttttctaaaaaaccatgtaagtgctactttaaatggaattatcaccacccacaaaacagtggaaggccgcccagagcttggaagtcggggttggagccactgttgctcctgacggaagggagccttctctggagatcctgctctggggagtgtttctccaggggcctcgagctgagctgaaggtggagaacctgcttcaaacatccaggaaagactcgtctagaaactgtctaccgaagggcatgaactgttttaaattgtagtggcagtaaacatagaaacaccatctagatggacataaataataattttcaggaaaaataagttctcagagtccgtttcattgctgaagggggaatttcacaatagtggaattttactctcctttccacaccttcctgctctagaagggacggtgtgagacccaggctgccaatgcaccttgttcaagatcccaaactctgtttttcttaggggatggaagtccttctgcctccgtgtcagggctccctcttggaaggggagctgaagggcccactctgtggccagaaaatgctttcctttcttggcattgccgttgttttgttaaaagaaatgacaagtttgagtgggggacatccctgggatttaaaaaatcattctgtgttgcactggaaaagctcattaaatcgaaatgtttcccatggcacatgtcctgttcagaacttgtgtgtttggcagagtagtcattgcactgaacaggaaagcttggtttcaggctaatgatagtaaagttggaaaatgtaaggagaacagatgggtgttgcttgcagagtgtgaccgtgctggcgttgtggggaaaatggagaatttccatgccatgggggaggcattgggtaacccttcttccctttttcttctttctgaggtgagtcacttctttcccttggctgcttgggatgggagaaagtccttatatgatgggaaacagcatcagcagcattggagaaaaagggcccctttctcccttggggatgttgtatggccactagattcttgagtatctttagaatgaaggtccagagtcacccagatcaacatggagagtgcaggagagtgctggagaatgtcagaaaatgccagagagtgctggagaatgccagcccattccatcaccttcagagccacccatgcaaagcaaaggctcaaacacagcttggtcccccatgccctgagagccacctgcagatcgggcagggaaggagcttgaggtggaatcggcacttctgactcagccctagcacctctttacttatttatagactaattctgttctcggtatgaaaaagtaatttaactgtcatggccaactgagtgtctcacacagatagctgggatgagtccgacttcataaaatgaggagatgtgctggctggcaggacagtgtcagcactaagggacttcttttaatgttttctccctcttcccacttagatgccaaaatagccccaaagtttgaaatgacttttcagccaaggaagttcttggaaacagtgacgacgcctgtgtactgtgtggcctgagatgctgcacggctgttctctgctgcagtgctttggggatcctgagcctgttggcataaagggagctcagtgcaaactgctgcaggatgatgggcatcctggagcccaagtattgtttttttgtttgtttgtttagagacagagttgttttgctttgtcacccaggctggagtgcagtggcgtaatctcagctcactgcaacctccacctcccagattcaagtgattctcctgcctcagcctcccgagtacctgggattacaggcacccagcaacatgcccagctaatttttgtactttttatagagacggggtttcgccatgttgcccaggctggtcttgaactcctgagctcaagcaattcacctgtttcagcctcccaaagtgctgggattacaggcatgaaccaccgygcctggcctcaagtaacatttttaatcagctcgaatgtttgacccttagccttggggaaggttcgtccttccctcttgtcctgctgtggcctcctcaagtgggtccttcctctatggtcatgccgtcctggtaatctgtttatatcctctgttgatctcagtcctaccctcttttaaaggtggagcttgagccgtatcctttagcctctgtggacgttctggcccggcttggctgtgcattttcttcacttctggcttacttggcacctgagctactgagtatggcctttgctaagtccagaaaggacaagcgctgatgtccctgtgtgttcatatccttctcccaccccgtgaaatccgtatcatctctattaatgttcatatccttctcccaccccgtgaaatccgtatcgtctctattaatgttcatatccttctcccaccctgtgaaatccatatcgtctctattaatgttcatatcctcccaccccatgaaatccgtatcgtctctattaattaattgatagattgattcagtaagaactattgggctctaactattttatagacaccatggcagtaactgagataaacccactcttgccctcctggagtctattttcttttaagggaggagcaagttcttaagtaatcacaatgcagttggcgagagctgggccagggagagtccagggagctgggagaatgttgcaggggtgccccgcccggtcaggaattagggagccctcttggaggaagcaaggtgcaacttggtacctgaaaaatgagtggactctagtcagactgggggggagggaaggtttttctgcagtggcatgttagtgaaggcctggtgggaacaaaccggggtgtgtgggatgtgtgacgaaggggatggaggtgcctggggaggcctgcctggctgtggtggggatgagtctggaggcatctggaggcctgcctggctatggtggggatgagtctggaagcgcctggaggcctgcctggctatggtggggaagagtctggagacgctgtccatgaggctggcttggactccaccctaaaggcaggggactgcctgagggcattgcagctcaggagcaatatgacctttgcattttgtaaagatgatcctggcggctgttggaggagattgcagaggggcagcgaggccagtgaggaggtggaacggggctcaggctggggggcggtggggctgaggcagagtcaggccccttaagagatgtctgggaaggactgagggagacttgggaactgcagggatttaggtacagggtcacgttctggaattccccatatgtggcccaccccatcagcccacagtgcgcctgtggtgggcggtgataggtgtcgttgctgcggttctgtgagggggcgctgcccgcactctgcctcctccaaggctgtgggctgtttggtcttgcaggcttgcacccccgaagtgaggaggaagcctgtggggcagccctcaactgtgggacaggaatgggggtcaatgccacccgccctgtcttcagtgaggaccacactgtggaaccagcgttgtactgttctgtcctgctggcctttgtcaagtggtgtttggatgaatcgtgttgtgcccagtccaaaatcagtgaggcaccatgctggggcccaaggtgccccaggtctagtggtttggaaggaatcacaggactcacgagtggttctgctgggctacggtttactagagaggactttccatggtgtagtgtggagaaaagccttgcaggttacaggaatagcagaaacaccaagaacagcaccaggaacaataggcagaagcaccaagaacagcaccaagaacaataggcagaagcaccaagaacggcaccaagaacaataggcaagagcaccaagaaaagcaccaagagcaataggcaggagcaccaagaacagtaccaggaacaaaaggcagaagcaccaagaacagcaccaggaacaaaaggcagaagcaccaagaacagcaccaggaacaataggcaggagcaccaagaacagcaccaagaacaataggcaggagcaccaagaacagcaccaggaacaataggcaggagcaccaagaacagcacgaagaacaataggcaggagcaccaagaacagcaccaagaactataggcagaagcaccaagaacagcaccaagaacaataggcagaaagcaccaagaatgtggctgcctagggctgggtgcaaggcaggctgggagggggctggggagttgagggcatgggaaggaacaaggggaaagcacctttgtgccttgtaaggaagttttggcttcatacagaagaggctgcatgttattggaggattttcatttattttttaaaatttaaattatgtgttttttagaaacagggtctcactttgttgcccaggctggtctctaactcctgggctcaagtgatccttccacctcagccttccaaagccctgggattacaggtgtgtgagccactgcgctggctggaatgattcacttttaattgtaggagagaggagaatgaattggaaggtaaattacttaatgctatggagactccttaggaggcctttgaggcaagagatggccaggcggccggggcgtggggagaagcccagagaggcttctgtgaggtgcaatcaccagcgtgtctgtggatatcatggtaggtggggagggggacagtgaaaaggggctcagccttagagtatcaagtatgaaatgtttgtgtgatagaggttacaacgtccagaaagactggactatgaaggtggaactcttggaaaaagtgtggaaacgtatttaggaatcattcctgactacagccatggctgtggagagacgaccagacagaggatgaagcgtgggaggtgtcgatagtgaaaatttggtagacgctggtatttcagtggcacgtgggtgaaaacaagccaaggaaaggaatcaggagaggaggatggagagtagggaaacaggaaggaactgggaagagggattgcagaggccgatggggaagccttgagcatgtaacagatgatgtagaaaggcgagcatggaatgaggtggaaaaagcccctgggactcgcctcccattgggagcagtgggtgatgcagccaaattgagtgagaagggaaactggtctgtaaagttcttcctgatgttgagatgctggattttaaaaattacattcgcacggctgggcatggtggctcacgcttgtaatcccagcactttgggaggctgaggcgggctgatcacctgaggttgggagtttgagactagcctgaccaacatggagaaaccccatctctactgaaaataaaaaaattagccaggcatggtggcacgtgcctgtaatcccagctactcgggagactgaggcaggagaatcacttgaacccaggaggcagaggttgcggtgagcagagaacatgccattgcactccagcctgggcaacaagagggaaacactgcctcaaaaaaaaaaaaaaaatacactcactgagagggaaacaccagctggtgcacgcggccgctttgtgtgcccggggctgcccctttctctccgcatcccagttctcctcgccatagtgcaaccttgttctgcctgctgttttcggatcatcgtctttgtcatcgtaaatgttcggcacaaattaggcaagaaacagtactgtggagataaaataagagtggtcacggaatcctcttcttcagatgattttctttcctctggctctgcagaggcctcatgatgatgcccctgagagagcgggtccaggagcagcaaaccacacacgtgccagtgactttgaggcaggcggatggtgacagttctggaagtcagccatggctgttacatctgcgagatgttttcctgttaaccaaatggatggggcaggttcatcctcttatgttttattttcataaatatcttccaaatgacctcattagcttaagtaacgaaaaagcaaattccagtaaacagctgcatgcatgttgatggatgatgtgtttggaaagtaggtatccttcttttgtttctctttgacgcacccgtgagcactgaggaagaggtggggttgctgcacacatggatcctttttgccagtgggaggcatcgccatcacctggggtgcagggatgtgtcgtgtctcacagggacaccctaagtggacacagctgagatccttctctttcatggaccacagaggtttaattgcatcacaaacatctgaggaacacccctgccaggcccatgcttgttcagggactgggcagcccacgtcattctgaggaatgccctttgctgccatcctggggtcatctccatgcagctgtgcattctccgtcactccctctctccagccgctccccttcgtggccatccctcctcattgataaacgaggagaatgtactgctgtgttttcaggggctctccacaaacagccagaggtataccaggtatacctgtgatgaggtaagaccatcctcagcagacagaagagaaagattagggccccctgaataatccttctatgtcagtcctggacgaaacagcaagctgttactgattgagggttgtaggcttccatccgcctcatttgatgcccgtggtgttgatgcagagtgctgggtgctttagagctaagacagacctgtgcagtcatcgtgcgttgataaagcctgtagtgagagggcttcaaaatcacaccctttgaaatatcaacttagtgtatcagtggcttttactgagctttgaataacccataacttgtataatttttcataatgggttaaaaagatgttaacatgttccttgaagaaaatgtgaaacacagataagcagaaaaggaagatcaaaggccaawacattcccgctgcccggcacaaatgaccactggtaagtttcggggctgccttttctatcttccacatttacatcttgttttttaaaacttaatgtagcataaacctatttctgtgttaagaagtattaacctatagcattttgatggcttcatatattctaccatgtggctatttctctctctctgtctataataaactatttttcaggacagttttagatttactaaaataactgaaggtagaacagagagttctcatatcttcacatccagtttcccaattaacttcctacattagtacacagtttgtcataattaaggaaccaatgactgttatgtgactgttaactaaattccctactttatttagatttccttagttttcacctaatgaagtttctctgtcccaggatctcatccaggattctaccatacatttcgtggtcgtgtctcctggggtcctcttggctatcacattttctcagactttccttggctttgaggaccctgacagttttgaggaggcctggtcagtctgtagaatgtcccctggcctggatttgtctgatgtgtttgagttctggggaggaagattggggtgaagtgccttctcatcacatcagatcaaagccacacactcagtgtgcgccatcatggtggataccaactgtgctcagtggcttggtggggagggttgcggcttctccccctcaccccgcttccctcyttccctgctgcactctctgagggaaggcacagtgtaaacccacactcrtgagtgacgcgtcatgctctgcttccttgaaggcagaggatagacagaaattgtttggaattctgcacaggagatttgtctctttcttcccatttatttattcaacactttatgttatattttgggctataacataacacttttcattttgtttgctcacattgttccagcttcggctgccggcagcccgttccrtggcctcacacaaactgtccctttgaatacgtccatctttatggctttttgaaaacacttccttcctttctgacactacaagaggctttaggctcatcttgtgtatttcctgtctcagtcttagaattagccatttctccaagcagtcccagtcccttctatctgagaatggttttggaaatcaagtgctgggcgtggtgtgtgctcattactgcggggatgtccttgcctgtaggacatgtcagctgacggagcgagaagatgtgtgtgtgtgtgtgtgactatgcatgtgtgtgagtgtgtgcatgtgggtgtgactgtgagatctaggaatatacacatatttataaatatttctgttaccatctgtatctataccaagctaaccatgagctcttattcacgtctccaactccaggctcttaccatgtggattattccagacgctgcctcctgcttacctgtaacctccactccaatagggagaacttcctcctgccacctgccagctgttaacctcattgttcactttgcatgcatgtgtggtagagtcagaattgctagctggtacctcttgggaaacaagtttatcagctagagcacagtgcttatagacaggatcttttcctttcagttttacaggctctgctcgtttccagagctatgtaggtcagcactttttctcctgccccgttggtgtcagtggcttcacacatctgtgatgctgcaggattctgtcatcaccgtctgcatggcattctgtcccgggatctgaagcatccttgattttttttgttaaacttgcataaattaaggctcctctttgtgctgtgaagttcagtgggctttgataaatgcatgtcatttatccacagttacagtaacayagaaatagcctcactgccctaaaaaaatcatctatttcacatactcacatctcccttcctctcccggaatccttgacaaccactgatcttttaaatgtctctatagttttgccttttccaggattttcagactggctgctttcacttagcaatgtgcatgtgggaaccstggctctttccggcctctgtgagaacaacccgtttgtacccaaggagctgtgagcatgctgcctcccaccgtgtcttgcactggtgcccaggggtgtgcggggacatgacgcttagccggaaacatgggtgaagctgatgtgtgcgattgtgtgagaggcaaagctgtgcggccagggttgcctggagaagtttccattttccaagcaaggcacagagcatgtctacagagacaggtatgggagggatggcaccagcctgtgtggatggcctcctttttcgtgttgggacccttgttctttgttctacaagatgtggatggtttaggagaactaggaggaaaaagcccctctgtgagccgtgggttctcccttccaagttctgcacaggttgatgtgatgtgcacgttcgcatttccatagtctctgtccgatccacttaataacatcacaaaccacactgctctttaggtcttggcccaggacccaggatagggggtaaaacttgaagtgcaaatagcattgcgtagccatcctgaccacaccagcgcatccagctgcctctcgacattttgaggtgaggagggaaaggaaaaggtaagagcatgaagggtagacacggaggaggtttcactgccatcttatctcagaggtgcagggtcaaaggtgccagaaaatttcatctggcatttcttgccgtcaactcctgaccaactgttttcaatattttaacttgagaaaaacaaattcaaatcacctattgatgatagttctattactcaaggaaggttctttgccaaccccatgtgacctcacatgggtggcaggaatcccctgtgggaggctgggaaggtacattccttgggcctcctcgacgacagccctcccactgctgggaactcgacacatgtcgtttcccagcaagcggccctgagaagaatgtgatcctgcaaaacgccctcagtgtcctgtcggcttattctttacattcacatccgacctgtcggcttattctttacattcacatccgacctactcatagttttctctttctcttcttttcctcagtttttaaagaacatggctgtttctcttacatggaattacagtattttttatcaaataggagaatttctgatatctgtgaattattttgtgattacaatatgaaaataaaagagaacagggttaggaatagaagagggagttcaaaaggatgcaaagaagggtagaatctttttaagaaatgaaatcttggaaaagataaaaactgaagagagtgagatggtcttagcctggactctgggtgagagagagagagagagagagagagagagagtaaacacacacacttagtgtgaatgaggtttttgtggggtgcgaatttgagaaagcgtcattaattcactcatttctttagcagctgtctatgagcacctggtgtgggtgccgtgggctgagttggtgaaatgtttcctcggagcaccctgggcttctaagttgttctgtcattggggctcccccagracccaagagggagaagcygaggatgccaagttgtaacattgaaactatgttaaatattccctgatagaaccgggcccagctaaatgtgtccycgcacaccaggaaacaggtttaggggtgtggccttgaaatctggaaagtacaggctctgaggtgtctctctcagggtgtctccactgatccaagatctgcgaacactgtctccttagcagctctggggaatgggcagcttggttgtgtgtgcctgttcttctctgccgagagaatggctttttaaggcttgacttgtgtctcgtcctctatcttcgtgctcccctcatagcctggcctcaagtgtacatttgagggccatgaacatccttgagttggtgcttgccgggtggaatgactatctaagatgcaccaaatcacttacagccctctcggccatggaacagagcactgcaagtcaccatcctctgtgtgcatgccagccctccactgccactctgcccgtgtggcctcaggcctgggcaaaggacaggccctgctcccctgggccacctgcctgtgggcgctgacagacgtgtggtctcttctgctagtgtgttgtcagtagagcccatgacagagatggaaatgaggctgggggatcccggaacaaagcagatgggctttggggtgactacgcatctgtgctattctgattttggctgctaagctctggttctgtgtcaccttgatctttaacttgggtttctagaaagaagagatgaggactggacaccaagtcccagtgtggcctgaatggcagacttgatgccaggatgctgagctctttcctgcagggtgggtgcatggcttggagaggcctttagatgtgctgcctgagacagccccgctggccctgactgcagggtggaggggtctccggctccagccccgattgcacgttagggatcagggagcactattcattcttccgatgctgtgactgacgggccggcaaggaaaggaagtggatggtgcatttgctgccgcctttgagcaaggaccctgtgagctgcagcctgtccactggtcccgcctgctgggtggaggctgcgtggaggctgtgtgtggcgcctctctcttcaacagaagctcatccttctgctctctctctccctctcccctcccagtccccatcttcttcctccccttcttatctttagaaaccacccacctccacccgcatcagcttccacctctgaagagatcttgcaatccgaccccttgtgagctcagcttcctgcgtgctgaggccccctcctgagcatcccacgttgccctgacacccacaggagcagagccacttccgcacctgctccgagcgtcccacgttgccccgacacccacaggagcggagccacttccgcacctgctccgagcgtcccacgttgccccgacacccacaggagcrgagccacttccgcacctgctccgagcgtcccacgttgccccgacacccacaggagcagagccacttccgcacctgctccgagcgtcccacgttgccccgacacccacaggagcagagccacttccgcacctgctccragcgtcccacgttgccccgacacccacaggagcggagccacttccgcacctgctccgagcgtcccacgttgccccgacacccacaggagcggagccacttccgcacctgctcctctccagctccccacaggctgccttcaccacacccctggagctgggtagctcctgtgttctttcagttgctgagtcacggccacaccctcgtcctgaccctgacttcccctgttcctcctctgtcatcctggccctgatgatccatgcatcctcctcactcctgactctccttgttctaatcagcttggacaggtgccacatacaccttctcagatgtcccctcactgctcagcagcctgtggaagcccccgctgactggttcaattcatagtcctgccgaccatcgaaagctttcggatgaccacagtgtcatctcctgccccctgcccagcgtggggctgtcccctggacggtcctcactgacctccatgcctgtggtctcctgccgcctgcccacctgccttctgcccaccgtggggctgtcccttggatggtcctcactgacctccgtgtatgtgatttcctgcccagagcagggctgtcccctggatgttcctcactgaccttcgtaacactgtagcgctgtcccctggacggtcctcactgacctctgtgtatgcaatttcctgcctagcacggggctgttccccggatggtcctcactgacctccatgtgtgtgatttcctgcccagcgcagggctgtcccctggatggtcctcactgatcttcatgtgtgcagtctcctgcacactgcagcgctatcccctgggcagtcctcactgacctccgtgcatgcggtctcctgtccactgcctgttgcagaggctgttccctggatggtcctcactgacctctgtgtgtgcaatttcctgcctagcatggggctgtcccctggatattcctcactcaccttcatgtgtgtgatttcccgcccagcgcagggctgtcccctggatgttcctcactgaccttcatgtgtgtgatttcctgcccagagcagggctgtcccctggatgttcctcactgaccttcgtgtgtgcaatttcctgcctagcacggggctgtcccctggatattcctcactcaccttcatgtgtgtgatttcccgcccagcgcagggctgtcccctggatgttcctcactgaccttcatgtgtgtgatttcctgcccagcacagggctgtcccctggatggtcctcactgacctctgtttgtgcaatttcctgcctagtgcggggctgtcccctggatggtcctcactgacctccatgtgtgtgatttcctgcccagcgcagggctatcccctggatggtcctcactgaccttcttgtgtgcagtctcctgcacactgcagcgctatcccctggacagtcctcactgacctctctgtgtgcaatttcctgcctagtgcagggctgtcccctggacggtcctcactgacatccatgtgtgcagtccttgccccacatccaagccctgggtcctgagagatcctcatggatgcctgttctgacccatagcttacccacccctctccctgcctctccacccttcaaacctagctcagagcccattccccccagtaacctcctgatgttcctcagctgaccatgctggggcctctctagtcaggttggaatccctggtattggccagccatcaaaccaccccgaaccagagcggtgtccttcatgattggttgtggctgctccgggctgggctggccctagtgtctctgcccatgcacctgccatcctgctcttgcaaccatcgggctggcccaggtgtgtccttcctatggcgatggcggaggggcgggggagtgaggagacacccaggccttcggaggcccccggcatccgccttgtcatgtcacagctagccagtggccaagcctgggtggaggtggggttgggggaggatcggggcccttcctgccagtagccacactcctccgtggctgtcaccatcatcacaccactgccttggtggccaaaagtccactgttcatggggctcctgtagaccccgggcctgtagggctcccattcaaggagaagacggatgttaagcaaaataaatgaagtgtgggtattagatgcagtaggtgctaggcgggaggtggcctgggtgggttcctctcccgtgtgcttggctcaggaagcctctgaagtgctttgctctgcacaattgccaccacacctgtgtggccggtgtcactyagtcattctactgaaggaggacaaagctgggctcaaactcaggttcaatcctcagcctcactgtggagcccgcagccttggccatgttcttcatgattgctgccagtggcagccccacctgagtctggcacctccggggagaggggacttccttgtgtgtgtctcactttcctgtgttctcctaatggcccgcctgttccactggggttgtccgacgccgaagcctcccatggagcctctgctttctctgtgcttccccacagaactcgccctctcccagctgcacagtgtctcagcaccggccttgtgtgccctgtaccagagcacgtcccaagccctctggaaattccagctctttgccctcctcaccctctgcagccctgaggtggcccctcggccatcacatgtgaggacgcgcggtgggctctgtgcttcctgctgtacccggtgcagcgtctgacccactgtagctgccaggtggtactcagtgtgttgttaacagccaccacttgggattactggatgcctgcttatggcaggcactatttgggctcatgttatttagcaccacattgaaccccttaaggacgcagggcatggtgatggcatacacgtgtacggtggaagaatcagggttccaggagtgaggcgcgtgctcaggtcaccccacccccctcccaccccggctcctccgttccctcctacttcacactccttttcttcctcttcctctccccattccctcttctcactgtccagggcagaatgaagtcctctaaaccaaaaggcagaggcagaaatacatgctttcaaattaaatgtgcctttgtgttacagctcaggattttaaaactattgttatttaaccttaggagcctgttgacagccctgcattaatttttctctggtagtgaacgggggacttggacaccacacaggtgttccattgtgcatgattagatgtcacctttgtagagaaggaatggcctgggaaccagccaacagagagaattctgcacgctcatggagcacacacagctgcacatggaacgaaaagcttttactccgtcttggtggttctggaggtggcagcaaatcgcatcagcaggtcccaaagcatggccttgcctggaggcttcattttgccagaagtgtcccatgggtttatattattttatttcatttatgcatttttttgactaacagtggttcagacttatgcctcagtgatatagtgggaaaaaagaggcaggtccctgagtgatttatgatgcgatgataatcctacctgcatcagagttcatgttttaacttttgttagagccttggattttcccggcaaccctatagggtgaggaggggaacatagtttgcattttaacaaattaagaagctgaggtttcaaggttcactcatattctgttggtgacagggcaatttggcaagatattttgaaagtcttacatatatacctttaaaatatctagaattctttttatgggaatgtatcctaagaggaaaaaatcagagatctctccaaggacttacaatcaagattgygtattgcagtattatttttaatgggaaatattggaaacaatgtaaagtttcttcaagagggaattggttagctagatgatgtgcatgtgtagaaatagttattaagcagtgattaaaattcatgatgagaaatactaaggacagggaattgttcacaatgtgttataagtaaaaagtgcaggttataaagttgtgtgtacacaacagcagagacatggaaccaacctaaatgcccatcagtgagggactggataaagaaagtgtggtacatacgtacacaccatggactactatgcagccgtagaaaagagtgagatcatgtcctttgcagggacatggatggagcgggaagctgttatcctcggcaaactaacacaggaacagaaaaccaaacactgcatgttctcacttataagtgggagctgaatgacgggagcacatggacacatggggggggaacgacacagactgggcacctgttgtgggggtgggcagggagagcacaggaataattgctaatggacgctggcctaaatacccaggtgaggggatgctctgtgcaggaaaccaccatggcacacacttacctatgtgacaaacctgcacatcctggacatggaccccaggatgtataagttggacaaaaattaaaggtgtgtgtacagtatgaccccaggtctttcatatatgcaaagaaaagtagctgaaaaccaaaatattaacaaggaatttatctctaggtaatgagttaactggtattgtattattctttgagattttctgcattttcttaattttctaggcttttatgatataaaacaattcccaataattttttttccatttttttttttttgagacagtctcactcttgtcccccaggctggagtgtggctcactgcaacctccgactcccgggttcaagcgattctcctgccttggccccccaagtagctgggattataggcacacaccaccacgcctggctaatttttgtatttttagtagagacagggtttctccacgttggccaggctggtctacaactcctgccctcaaatgatctgcctgcctcggcctcccaaagtgctgggattacaggcgtgagccaccgtggctggccagttcccaataatgtttcaagtgaacaggtgcagacagagtgagtgatttgtccatggtaacatgactaatatctgtaactttttgttcgtaaccaggagctctttccattctctcagtagaatcatcagtgttcggtactgttacttccaagtcctccattcttgtggtgccggctctgcctcttcagagatgtgcaatgaacggatgcttccagtttgggaaacctggtggggagacaggccgggggaggaaggggtgccatccttccatccacctcttctgctttcttttttcctacttgtttcagtgagtcagatgaagacatcaaggacctgttgattaaacctgcacatggtacacagctgtgagggtagagagaagctggtattgtgacattagagtccagaaaggtttagactgggtatctgagtcaaatgtgagtttggaattacacatggatgagaagagagtcccatcctggagtcaaggggccagtggtgaaagtcatatggacacagtggctgatggacacagtagttgatggacacagtggctgatggacacagtagttgatggacacagtggcttatggacacagtggctgatggacacagtagttgatggacacagtggctgatggacacagtagttgatggacacagtggctgatggacacagtagttgatggacacagtagttgatggacacagtggctgatggacacagtggctgatggacacagtggctgatggacacagtagttgatggacacagtggctgatggacacagtagttgatggacacagtggctgatggacacagtggctgatggacacagtagttgatggacacagtggctgatggacacagtggctgatggacacagtagttgatggacacagtagttgatggacacagtggctgatggacacagtagttgatggacacagtggctgggggtgagggaaaagtggctcagcgtgaatttgacaagaaaagaatctattttctattgtaaaatcaggctgtggaatcaacagcgtggtgtgtggtgacgtccaggtttgggtgtgtccacctagcctcgctgtgtgaactgggggatgtgagaccacttgacacagccttttccgtgctccaggggactcggcaagtgcagccgggaggaaggcgtcccgaggagcaggggtggggctggtggccatggacccctgaggggtggctgtgtccagggctggtccagatgtgatggtgctgtgtggttgtgacagtgttctggtgggcacctgtcttgtttcctgcccatttctccaagtcagttttctaaccttcttttgatcttgtgaagaacctgatctccttctaataaatcaagagttggctaagtttttttgtaaaaattgtttcctttcaggccagtctctgtcacaactattgaattattataggacaaaagtggccataggcaatctgtaagcaagtgggcgtggctgtgtttccataaaactttattaatacagaaacatatggcagtggcagaccatggtttgcctaccccagagcaagccagttcttcttgtgcttgaagctgctgagatcaatttctctcacttttctcccggccctgggatggaatcaagctctagggagaggagcagagagtcggaacgaggagaggatggtgcgttttactccgtgacrgctttatcactcctgaggctttgtgttcagtgctgacactcgcctcaccttaaggcagttcggacatcgcaggcatccgcagagctaggaggatggtgacgcggttagaagccacgatgtgagctgggcgcggtgctggtggctcaggctgtctcactttcaggggtagaacttgactctatgacactaagtagatcgataatgaaagctccaggcgggtcaacatatcctcaataaataaaacttcaaaaaatccagggctgccgaaacacgcgttggcctccttggtgacttttctgcctggctacacagaaaaggccgctgtgacagcgcctttggtggtctctgactccaacacagggtggccggggctctggcactgcccctccctctgctgtgctgtctggaggcaggaggtccccccctgcgactgctgacagagctgtcttcttggatctgcctcccagactggggacagggttggaagattcacaagaaggcagcctcagcctcagcctggcgttgtgtcggggatgggaacagggcttcccagcagaaggcaggctgttctcccgttcaggattggcccattgatcacgtcctgggtgcaggaatgcgagcactggggcctcctgaactggggcgctccatctgctgaaatcggggggtacagaggctctgagacccttggagtccctgggcagtgctctgtttgcttggctgtagccccgggcggggagagggtctgaggataacttaaaacacaagagatgataaaactcatctttccttccaggaaggagtgatgatttcccctctgcggctccgcaagtgggttgttgctgctttgcctgggaaggcacgaaaatgtcatagttaaaaaagctttaacataatgaaaatagaaaagcaccagacttcataaagctgataacattcccattaccggaagggcgccctgagtgctccgagcctcacacatttggactccgagcgggaggcgggaagccgcagagcccagctcccagcggacgtggcccggagcctgtcacaccctcgcgtgtgcaagccgcttgcctgacccgccgcgtgaggagcgcggcccagcagcaccggccttgcctgggaactggttagatatgcaggttctctggcctgctccggacgcattaggtcagaaactcggggactgggccccgcagctttgttctaacaggccctgcaggggcttaagagcgaaaaccgttgggctggatggcgtttaacagccctggtcacgtctttcaacttcagttctgttgtctggtttgctgcgccccagtgagaggcagcgggtggacgtttttgtggctggggcgtttggcagcgtctgcaggatccttcctgggaagccagcgtggccctttggaatagtgaaggttcggagttccacagagaagagtgtgtgaaacttcaactcacatttttcaaatgtttttgagcccaagcctggttttgttaacgacccacagcacctgtgccctccagagctgccaccagctgagacttgctaattccctgggggacttttacagagttttaagtagtttttcttctttgttctgtgtcaattaacctgtatctacagtggacggtagtaattcccagcacactggaaatgtagcgagctcaagaggaagataaaaagaaattatttttcaaattcacctcagactatcctcctaaagtgtcagtcccatcctctgataaggtctcacgtggcatatccagttgcctgtagcaaatatcagggttaaaaggggaaactgtagtaacaattggatctaatttgtcttttcattattgtaagtgcagattcctctcacccacaatgcgagtggtgtttgtggacaggtgtctaaaggagcagaaggcaatattctttcctatctcatcacttaaaaataaagttttcaaaataaaccttttttttttttttttttagctcaagtgtaagagttctaatcatcagggccaggaagcagtttttgtcttttaaatcttaattaaattacaatgtatatttaaatatacatccagtcttaaaactgaacctaatacatttgtaaaaattagttgatgtatgattttccccacataattaatttaaaattatacacacacacacacacatacacacactggagggtgtgtgtatatatatatatacacacacacacacacacacacatacacacatatatttgagatggagtcttgctccgtcacccaggctggagtgcagtggcacattcttggctcactgaaacctccacctcccaggttcaagtgattctcctgcttcagcctcccaagtagctgggattataggcatgcaccaccatgcccagctaattttgtattttttagtagagactaaacaccatgttggccaagctggtcttgaactcctgacctctaggcctcccagtgtgttgggattatagacgtgagccactgggcctggcctaaaataatttgtataaggccaatcatttgttatccgggtgatgaagaatttggatccagaaaacaaattgtaaagagtttgttaaatttacttttaacaatttttataatgtgctgacccaagttttcaatttacggatgatttctacatgtgatgcccttgcttctcagtgtggtgggcagcccagcggacgagtcaccagggagtgctttggaaatgctgaatctttggctccgtcccaggcccagggaatagaaatactcatttaacagggcccagctggttcacatgcacatcaaagtgtgggagaggctgtttccatgatgatgatgatgatgataatgatgatataactcacatttcctaagggggtcttgagatgataaggtctttttgttagagggctttggtgctttaacaatgactgagaaactatgaactggatttttcctctttcatcagagactacaactaagtcagcccagtactgctaaaaagcttgtttaccttttaaattatgtgtctgaagtaccacatgtctaaagttcacgtttacagcagggtaggctgtgtggttcacgtgtgccatgtctcagcaatcctgagcaatacatctacctttcttcactttattctcacttttggtactgttctttcatgggtcatactatattttaatccagcacatgagagttaccggttgaagttctctgagattagcttaaccatttcatccccggcatagcctggctacctgcacctgcagtatttaatgttcaaggattttcatcagatactttttcaaagcttgtctttaactttttatctgtgaaagcaaggttagaaatgttttcttagtcccgaagaatgactcagcaaacatccttcttttgaaggtattatcccatttcaggaaatcgaggacaaaaaaccagagccgattaaaaaccaagagctgattaaaaccacgtgccatttagaataaatatagttgaggttgctgctcttaatgtcttcaaacgaatgaaggaggaatgtgtagcatggagagcgcggttcccaaaaagtaactcctggactttaaaaataaaacaaacaattctggtaggtatcctgaatttggtacaatttcttactcttaagagagtttaaataaatctgtgcaattaggaacctgaaataaggaaattaatcaaagtaagaggttttgtttttcctaaaaataaatgacaggacttgatggttgtcctggtacccagctcgctgcccttcttccagggtggagtgagctggttctttttctgtgggaagctgattttgtgaacaggaggatctgaaatcaggaactgccttagaattgtggccccagcttcaaacaagaactgactttacagaagccaaagacgtgaggaggaccttggccatttcagcctctgctgagcacacacatcaccgttgtgatggagcggactgaccaggcgtatggggtggaggtgaattggaggggcctgagccccaaggatccacctttgcagtaaggcacggtcactcatccatgtttgtgtgtgccctcccagctcctgctcatgtgtgacatctgtgcccggcagaacaggcccagcatggaaggagtgtgagcctcaggcccctcctcccagcacaggggacggacaggtgtccccgcaggaacagggcccagaggctgtgcagggggcaggccctcatgcctgcaggagaaaccttggcctgaacttgccagcggtcagctcccrtcgttcatggcaattgagtgtgcagcggcgcagagaacatgccacttaataactgttttggggtcctgccttgtaggtctaagatccaggccaccgtgcagtcctcaggatggggcacccatcttcctgctctctgaggcattgaggctgaagtttccagaatcttctgggtgattatccctcctcctgctaccaatttggctgtggaccctcctctgcgaggaatgcagccatgtgtgtcaacctccagaaatgccctgcgctgagagtgtggccaaggcaaggaagggacgggtccccaaaacgctgggctggggctgtgattgaaagcctcagaattggggaggacttactggggggctccatactctggatcggcaggtgaaggggactgagcaacacccacccctacgtgcagtgggcagggtggggctgggtcacctggccaaggtggggctgcatgtcacccaacggagccccttgcttggcagcccagggaagggggaggggcgcagggaacaaggaaggggcacagggaagggggaaggggtacagggaagggggagggggctcagggaaggtggannnnnnnnnnnnnnnnnnnnnnnnnnnnnnnnnnnnnnnnnnnnnnnnnnnnnnnnnnnnnnnnnnnnnnnnnnnnnnnnnnnnnnnnnnnnnnnnnnnnnnnnnnnnnnnnnnnnnnnnnnnnnnnnnnnnnnnnnnnnnnnnnnnnnnnnnnnnnnnnnnnnnnnnnnnnnnnnnnnnnnnnnnnnnnnnnnnnnnnnnnnnnnnnnnnnnnnnnnnnnnnnnnnnnnnnnnnnnnnnnnnnnnnnnnnnnnnnnnnnnnnnnnnnnnnnnnnnnnnnnnnnnnnnnnnnnnnnnnnnnnnnnnnnnnnnnnnnnnnnnnnnnnnnnnnnnnnnnnnnnnnnnnnnnnnnnnnnnnnnnnnnnnnnnnnnnnnnnnnnnnnnnnnnnnnnnnnnnnnnnnnnnnnnnnnnnnnnnnnnnnnnnnnnnnnnnnnnnnnnnnnnnnnnnnnnnnnnnnnnnnnnnnnnnnnnnnnnnnnnnnnnnnnnnnnnnnnnnnnnnnnnnnnnnnnnnnnnnnnnnnnnnnnnnnnnnnnnnnnnnnnnnnnnnnnnnnnnnnnnnnnnnnnnnnnnnnnnnnnnnnnnnnnnnnnnnnnnnnnnnnnnnnnnnnnnnnnnnnnnnnnnnnnnnnnnnnnnnnnnnnnnnnnnnnnnnnnnnnnnnnnnnnnnnnnnnnnnnnnnnnnnnnnnnnnnnnnnnnnnnnnnnnnnnnnnnnnnnnnnnnnnnnnnnnnnnnnnnnnnnnnnnnnnnnnnnnnnnnnnnnnnnnnnnnnnnnnnnnnnnnnnnnnnnnnnnnnnnnnnnnnnnnnnnnnnnnnnnnnnnnnnnnnnnnnnnaaggggaggggccacaggaaagggggacgctgcagggaagggagagggggcacagggaaggggagggggtgcagggaagatgaaggggtgcagggaaggggagggaaggctgaagggaagggggaggctgcagggaagggggacactgcaggggttgtccccagactgggactgggctttcagggaagcagtcagtccctctcatgtggaggtgggctggcttccgtccaggccgctgccaggtcccttggtcataggctctcagcagaggggctgagcgctgtctcctgctgccccctgctgccccccaagccctgtccgcaagccacagtcagggatgggcaatcaggcctggcaggagctgccagggctgcctccctcttgtcagagacagatctgggaggagccttcctcctccctctctccctcttccttttgtctttgaaattgcaatcacagctttcatttgagccttgggccacagaagccagatgccctgaccgcagggctgcctgagatgagggtctgggggtctctgtcctcccacgcccagcctggcagaggcagccccgcctccgggctgaggcgctttaatctctcacttttcaggctgattcctagaataggggttcttaatgtggaaatggctttctattcctgcctggatgccgccctggtttaacacgttgttttcgatccgatggaaacatttagaaaacctcagtggggtgtggggactccttggtcccaagggtctgtgctgccaggaggggatgctgagattggggggtagctatggcccaggcaatgcccacctgccagcaggcaggcgcttcactcttaccccccctgcagtgggcagggcgcatcctcatttacatctgagaatgcaagggagaagggaggctttgccaggtgcatggctttgtgtttgctgcagaggaggtggggttggagcctgggcaccctgctctctctccagaatgttaaaaatgaggatgatgtttaaaaagagcatctcttcaaacactgcaccttccttttctatgatgatgcgttcgttcctaggaaaaaatgtgatttaacataaccccagagcctcaggctgtcgtaagccctagcgttttctgcagggagaggtgggaaacatggctttgacaggaatcacatctgggatgggctctggcattgaaacccacggtggtgagactgccactgctgcaggtgacatctgtcatcaaaggacctgctccaggcagtagggactggggttcctggggtgctggcatggttttttttaaggctgtagagggggacaggacaaagacacagagtgactgacagtaacagggtcggattgggcgtggagtctgtgagctctgaagagcgggggaggctggcggggccagggaggaaaaggctgggtatagattacttcactctgcttcgttatattttttagatgaggaaatctgtgtgtgttccttgtaccaagtgagtggtgctgacacaggtgaagcccccgcatccccttctcaggggctgtcccagttcaggttcagcaacttccccaacagacctgcatctccatgtttgcacagccacggggtcctggcgttcccgttgctgtgtgtgttggtgctgtctgggaagatgctttcctgtttgcagttggatcccagggccttggtcattccagcctcaaagcagggtcttcagtgagcccctctcaggaagggtgattagtgagtggccagcagctcacaggcttctgaggagtcctgtctgcagcttggaggcaacaggtgccggtgctgagcctgctgtccaggaacctcccctcctccctctttggttcctgctgtgggatgccagctcacatcagctggattttatgggcctcagtggaaagtgtagcacacatttcagaaggcgtgtgcatcctgctgctgatgacagcctttctctgccctcatggcagtcaggcgagaagcctgaacccaggaagggccttccacggtggtggtagagacagggttgggcaggggccatggatttttaggccatgtctgccttggccacagcgacgcccagagatgggaggaagcagagcaggtgcaygtggtacaggatgtgccgagcttcctcccagccagtgagagaggtggtgggctctgttcacatttactgtatttccacaatgaacaacaaactctccataaacatctcttaggagtgattggggtaagagaggcagatccagcctgactccttgcaaaactggatccattttcatcttgagaagggtaagaaaaaaggggcaccacaatggtgacaagatactgcttagagttctgaggacacagtagggaagcagaatcagaacaagatcagcatgcatgagtgtacccatgtacgtgtgcatacgtgcacccatgtacgtgcatgcatatgtgtacgtgtctgcaggtgtatgctcacatgtatgagtgtgtgcatgtgtgtatgcatgcaggtgtgcgtgtatgtgtgcaggcatgagtgtgcctgtgaatgggcatgactgcatgcatgcatgagtgtacccatgtacgtgtgtgcatacgtgtacgtgtctgcaggtgtatgctcacatgtatgagtgtgtgcatgtgtgtatgcatgcaggtgtgcgtgtgtgtatgtgtgcaggcatgagtgtgcctgtgaatgggcatgactgcatgcatgcatgagtgtacccatgtacgtgtgtgcatacgtgtacgtgtctgcaggtgtatgctcacatgtatgagtgtgtgcatgtgtgtatgcatgcaggtgtgcgtgtgtgtatgtgtgcaggcatgagtgtgcctgtgaatgggcatgactgcatgcatgcatgagtgtacccatgtacgtgtgtgcatacgtgtacgtgtctgcaggtgtatgctcacatgtatgagtgtgtgcatgtgtgtatgcatgcaggtgtgcgtgtgtgtatgtgtgcaggcatgagtgtgcctgtgaatgggcatgactgcatgcatgtatgagtgtgcatgtgtgtatgtatatgtgtgcacatgcttgtgggtgcatgtgtgtatatgtgtgcacatgcattcatgactggatgtgcttgtctctgtgctgaagcaggagggataccctgtgaatacagagtgaggaggaacccctgagcaccacagccctgctatagggttcagcagaggagcaatttgagaatttggggaatgtcacatgttttcatgcaaaagggtggataatacattgaagtgaaggaattccagttttaagtgctgggcacacaaggttaagggccccacaggccgctgttggctttccttgtggatttagcttcttggcctcagaatgacatctggaccttagtgtatgcagtctgtgagccgacagggtacacaagtccaggatgccacttgccgccacatggcgggtgtggagcccactcgaggaaggcgtgtgcccgaggcgcctgggctgggttgaaccagtgtctgccagagaaaatgtcttttctctggatgatttatggtcataattactattagtaggtggctgatacttaaaatgaaatttgctctttcgtaattttagaacaaataacttagcagtcaaattagcatatccactggctgggtgaaatatgcataacatttgcagctctggtaatcatgtgaaatgctgctgctgtgtttgcctctcaccaaggagtgctgcaggttttccactgtcacttctcatcagtcctctggagtaacgaatcaggttgggcacatgccagtaacaggtggttttccaaggtcaggatccaagagatcatttgatgcacatctcattcagatcacatctaactgtcagccacgattaaggcagagatgggaagaaaacaggggctttcttcccggtgcctctcctagcagagctccgtcatctgccatttccacgtgacaaacatggagttagaacgtgagctgtgtctgcagcatccctgcatctgccttcccccaaggtctctgttcctccacgctggagatgcaccctagaatcctgagcagagtcctgyagctcctgccagagccgkgaccagggacgttccacgacatcggactaacctccagcacatctccggtgtggtcacatccttactgctcccagctccttctctgtgcgcctctgtgtgcctggggcgggaggggccctcacagctgaggctctccctctgggaggcagtgaggggagccttggaggtcactgcgtgaggatctgagaggacctctaacctccatgctgaccttttcaaggtcactgcttttgtggggagtggtgtctgcctctcctcctgctgttcaagtgccaggtgtgtgtctctcagaacgttccctgccacgctcctgtaggccgttcacctcctctgcctggctcagacacttgttgaatgaagaaataatgcagagaatgcagactgaatgtggggttagctgatgggtaaatgggattaagaaatgaaatgctggccaggcgcggtggctcacgcctgtaatcccagcactttgggaggccgaggcaggtggatcacttgaggtcaggagttcgagaccagcctggccaacatggtgaaatcccgtctctactaaaaatacaaaaattagttgggtatgctggcgcacgcctgtagtcccagccacttgggaggctgaggcagggggattgcttgaacctgggaggcagaggtcgcagtgagccaagatcacwccattgcactccagcctgggtgataagagcaagactccatcaaaaaaaaaaatctgtttttcatgagattgttatttcaaaacaaaacaaacaaaaactcccccaaaccaaaaacaatctctgcttggattggaggctcccgtcaatgggtggggtgtccacccgcctgtgactgctggcaggcgatggtggtgggcactgggctgggcaggcactggctgggcaggccagggctgcacctaggccacctcctgggaggaagcagatcccagccaggggccgccctgcaactgtggaaggctcgtgaagctgttgtgagacgagcgaggctgcctcctcctgtgaactcccagcgttgggtcctgctaggctctgtgctgccttaggtctggaatgacgtttagttttaaagcctccgcacgtgctggtttaaggcaaccaagggcttcctctgtaagggttttaggccagctccctcatgaggaagtagtgactggaaactttaacgtgaccctgggggtgaatccctcagtaattcataactttctccagattcctcagtttctttgttcacccatttgctcctgggcacctgccctgtgccagacacacagagggcatgggaggaaacagtagagggtggaaacaggcgtgtgcccggctcctgaactccaggagagggaaatacacactcaatccacagtcactgcacagtgtggcgagtcccgaaaaggacgcctgggcagccccgggagagtctggggcttccacagggatcttagcggatgaacaggcgtttgtcggctggtgaagcagcattgaaggcactgtgctttgcaggaatgagtgaaagacactgcgcgttcacaccacacctggcctttgctggcggtgcgactcccgcctagtggccctggggccctcccggttctggtgtccagggtgctcacgccctcgcgggagccgctccctagcggggtggtgctttctggacccatctctctgtgtttaagacaggcgtggacgtggagccgaacgccaacctttgccagcctgctcggccgcgggggatgcgtggcttggggtcgcctggccacccaggcaccgcggagcttctggagccccttcctgggtggggactgaggcgctgcctctgccccgcgtctcctccagggcctggcccagccgcgctggcctttcctgcccgtcttcgtctctgctgcctccgctgcctcctttcctctcccgaccctctcctgcgtctcttgtctgtggccacggacgccacggtttgcttcccacgcagccgggctccccgcggagctcgttacctccctggaagcctccgctccccggcgcccggcagccttgcttccagggacgcggtgcgtgcggtgagcacccggtccaggggaggcgccgggcccaggggaggcctcaaggggaggccccggccccgctgctgctcccgcggccagagagtctcctgtgatgacgccggcttgaccctcagcccagagctgtgggcctggtccaggtgagagctgggctccgggactaggccaggaggcctcgcacgtggccgggtcaggggcgcagcgttctggcttcagaataatcggccccatctcggaaaagccgggtcggaggagcctgcttgaccggcggtttctctgaaattcaccagggggccaggaaggcagcctcgggggcacccccctcctcccctccagctgaccgcgtctcttctctgtttccccgcaggctgcctgctcgaggagggcctctgcggagcgtccgaggcctgtgtgaacggtgagtgtggggtcctggctgctgcgccctggtctgcccctctcctgcccgccgtgcgcagcgcccagcctggtgagccccgccgctggcctggagctggggccgcccggggcgcgctgccgagaggaggcggatggaaccccggagccatgggctgcggcctcggtgggtggggagaagaggttgcccgggttctgggcgcccatcgctcgcaccaacccttgctttctgattttgttttgctctgtccttcggcaagtttttcatccttttttaaaaaatttttttgagacagagtctcgctctgtcgcccaggctggagggcagcggggctatctcctctcactgcaaccttcgcctcctgggctcaagcgattctcctgcctcagcctcctgagtagctgggattacaggcgtgcgccactgcacccggctaattttttgtatttttagtagagacagggtttcaccatgttggccaggctggtctcgaactcctgacttcaggtgatccacccgcctcggcctcccaaactgctgggattacaggcgtgagtcaccgcgcccggccaggtttttcgtcctttaagccactgattttcctctcttatcaggcggataagaaaacagtgcaaacgctgtgttttcaggttgggctgaaagcccatgaggacggcagttattatgaaatacggcgagcagcgggtcctgcagagccccttccctccagcgcggtcaggcagagggcatctcccagggcagacgccacccgggcctgtcatgctggtgaactgggcgctgtgcgctctgaacgcgcaggggagggttaaactccagtatcctcagaaaagcgctgggcggagccgcctttctccaagtcaggggctgcgtgtgggcccggggcgcactgagcgaggccttctctttccccagctccctgcgcatctgtcctcagactgtgggcaggagcggatttaatcctagcgaggatggcggggcctgcccagaggcccctcgcacccactaatctctgcacagacgtgggtgccggcgggggactgaggtgcagggcagggcgctggcctggggtgccgccctcctggggcctttcaggacaggcctcccctgcactggtgcatccagggggagccgaggtgaatgcctctgagggtctgagaagcgaaaccgaggagctcgtgcgccctgaggtgggaccagccctgggttccggatggaattttggggctgggggcacctctgtgtctgtgcctaggcagcttctggggtcgggaagggaagccacggtggaggcgccaagaggagagcaggtcctcagcggcggcagcttctgctgttttctcttctttcgggagattcctgtgccgagtgtgacaagtgggaaccggcagctcgtggggtgcagtgtgggtggtgggtgaggttctggcccagcctaggaccccctggggctccctggcatctactccgtgcagctttaatttggaggcagccttaagaaaaatagcgatattgaaaatcctacgtcgtctgcctggactcaacagcttttgatgataatggaagcaggtgtgtgtgtttaatttaattggagccgtaagtagccccagcagaataaaagccgaggctgtctccccggctccttgacaaaggccggcctgggtgtccgactgtgatcattctcagacatttttctcctcaaccttgacttgcctcccagacatagagtcgtctcaacatcatatccagataatgactgtggattccttggaaaggaaaagcaatttaaatgtaaatacacatattcaggccttgatttgtagaaacagatgatatttgattttttttttttatgatgcactgaaggtctaggaaacagcgaagccagtggtgcccagtcttagaaaactgcgctttgcgaggctgacggggagcgataggagaagtggttcctgtgctggctcagatttatggttgccatggtgactggtttagcccgaggctggcgggccaggggtgcggcagcccagggtgcggtggggggcggctgcgagtctagaacattctgtcaccagccgcagggtctctttctctccctctggctcactctctctctttccccctctcttttcttaaggtacgtgtaggaatatataatcttatcaagcttggatatgttttttaaaagcccaacagaggttattaataaaaagaaagtcaaaagataaacataccacctcacacccattaggatggctagtattaaaaaacccctgaaaatcggtgttggtgagaatgtggagaaattgaacamttgtgcgctgctgatgggaatgtaaaatggcgtcgttgctgagggaaacagtatggtggtttcctaaaaaattaaaaatagagtttttaatttgcctcagcaaccccacttctgggtacgtaccccataacacaggaagcagagacttgaagagctgtttgcacacccatattcatagcagttaatgcacaacagccaaaggcgaaagcagcccagtgtccactgatgggcgaatggacaagtgaaacrtggtccatccacatgatggaatagtacgcagccttgaagaggaagtgagtgctgacactcgctgaaacatggggggagcttgargctgttatgctgagtgaaataagccagtcacaaaaggacaaatactgaatgattccacgcatgtgacgtactaaagatagtcaagttcatagagacagaaggtaragtgayggggccaggggctgggggacagttggggtgtcagtgtttaattggtggagtttcagtttgggacgatggaagagttctgggaatagacggtggtgatgactgatcaacagtgtgaatgtaattaacaccaccgaactgtacacttaagaatggctaagatggtaaattttaatgtgacryatattttaccacaatatgcaattggaactatgaaactgcagcctcygcacatgctcatytaacgtaatcgaatgcttcagctgtaagggttttaggccagctccctcaggaggaagtcrtgattggaaactttaaagtgaccctgggggtcaattccttggtaattcataactctggagtaactttggttattatagaaaaaactgtaagggttctggaagagaaagcttaagataaagcaatcacataatcctggaacagcttgtagaaaagagagtttagatgctgttacatgggcatcctaaatatgaggaaaacaggtttcaaagaatttttaaagyggatttgatttcatggttgataactttaaatgggacayatccaaacacaggtggtatgtcctaaacattctaaaggyataataatcaactactccacaatagaaaaaaggaaaacaaatctatgaagattaaaatagatcacgcttatgtcgggaagtgagctggtcgctttcacgccctgctggtgggagcatggcctgacgtgatcgtgatggacgctgactggccagcacgttcacgccacataagsgaggtggcccgtgacccggcaatctgatgtgtgagaatatgccccaakaaaataatccattacccaaaatactaaagaaaacttgaagcacaaagctgctctctgcagtggtgtttgtattaattttaaaacagtagacaaatcattaatattaaacaaaggagaatgcttctttaaagctatgttatggtcacatgattcaaatgttaagcagacattaaaagagaagtgttcaaaaagttgttaataacgtcggaaaatgcaggtgggagaaagtaaatgaaaaactcaggatccaaaactgagcrtctaatacgatgacagccrtgcgaaaatgtggatagcagaaaaagctcaaagaaatacaccacactgtgaatagtggctctctctgggtagtgacttttattttcttcatatttctctggttttccagtttttcacgtgagcatgttcctgctaaaaggacaagagaggtgggaaggaggcacatgaaggaaccaccattccctttgagctcagaaaggaggagaggcctgtgcaggaggggygcagagaggggtggccgagcaggmggggcgcagagaggggtggccgagcaggaggggcgcagagaggggtggccgagcaggaggggcgcagagaggggtggccgagcaggaggggcgcagagaggggtggccgagcaggaggggcgcagagaggggtggccgagcaggaggggcgcagagaggggtggccgagcaggaggggcgcagagaggggtggccgagcaggaggggcgcagaggggtggccgagcaggaggggcgcagagaggggtggccgagcaggaggggcgcagagaggggtggccgagcaggaggggcgcagaggggtggccgagcaggaggggcgcagagaggggtggccgagcaggaggggcgcagagaggggtggccgagcaggaggggcgcagaggggtggccgagcttctaagagtgcgtcaggacgaccacaccatagcgctggagcccaggggcggaaatcccggacgtccaggagggcaagaggagcaagtcgcgctctccgtttggagggaggtggaagaatggtgactgacaggtgggggaggatggctcagctacacacctgtcggctccgtgtctcgtggctcaaggctgaattatgctgtgacgacccacaagccctgcgctcggtggcccaggtgacacgggcctgcgggccgttgcagggtgtctgccttccctccgcaggtgccctcccgggacgctggcggccggggccacagcaacagcggctgggaggggtgcccttgcgctcgtggctcactccgccggccacgctgatggtggggaggctcctcctgcagccgactccccgtggcggcgtcacagccacagccttcacgtctccaactgcagcttcttctattccaagccctttctccactgaagagggcagaaaaccaccaggaaccgaggacgtctgtgatggtggagtgctgtccggccgtggaaagggaggcaggaagcaccggcacactgacgcggaggaacctgggaatcgccgtgctcagaggaagaaaccgagtcacaaaagtcacgggggacatgatttcatttatacaaaatgtccaggaggccagggcggaggctcaccctgtaatcccagcacttcaggaggccgaggcgggcagatcacttgagatcaggagttcacggccagcctggccaacatggtgaaaccccgtctccactaaaaatacaaaaattagctgggcgtggtggcgcgtgcctgtgatcccagctactctggaggctgaggcaggagaatcgcttgaacctgggaggtggaggttacggtgagccgagttcacaccattgcactccagtctgagcaacagagtgagactctgtctctaaataaataaataagtaaataaataagtaaataagtccaggagaggtaagtcggtagagacagaaagtaggttgtggccgtgtagggctggggaaagtgttgggggcatgggaagtgatggcagaggggcaggttccctttggtggtactgagaggctctgaggtggacggtgaggtggtcacggaactctgaacattcagaaaaccgttgactcttacagttttttgttttttttaagacaagcacttgttctgtcgccaaggttggcgtgcagtggtgcaatcctagcctaacgcagccttgaactcctagtctcaagtaatcctctcacctcagcctccctagtagctgggactacaagcacacaccatcatgcctggctatttaaaaaaawttttttttttgcagtgatggagtctcactatgtttcccaggctagtcttgaactcgtgacctcaagtggtcctcccacyttgacctcccgaagtgctgggattacaggcatgagccattgcgcccggccaactcctatactttaaaaggctgagttatgtggtatatgaattatgtttcaataaagctgttttttaaaagaaagaaaaaagaactgaggatacagttaggcaaggaggtaagcatagtgaaggatatagccagagaattgcatttctttaataaggggttacttccctgaccccagacagatgggctccctcccaggacattcaacccaacacaaaacaagatggttgaaaatgctggctccaccatctgggcacaaagcagaacaataagcttgtccctctcagatttgggagtttttccagcaaacaatcacctcccattgcaacttaggtactaaaagcactagcgttgtccccaaagtggaagactttagaatattcaaatccagagtgtctccctaattctttgaagctatgtgattaaccctatttggattttcggccacagcaagcagcaaaggctatcagtgggaaattatttattgagtgagtggatacaagaataaatgaatcatgctttcatggcacaagagacacccccatagccctcaaataaaagatttatataccatagtggggaaaaagtaatttctcacccctctccaggttcatggctgagacttgtaacaaaagacagattaataagagaaaaccctacccacttatttaataccggttttctatgtcacatgggagccttcagaaatgaagacccaggaaacagggaagcctgtttttatggacagttgtgcagaagtgtgatcggagggcaaagggcgtgctctgatgtcataggctgaagggctcagcaaggcctgtctggagtcttctagctgcttctgtgtcttcggagataaggacattcccctctgggcatagggaggcccctctggaatgagggtcttatgacctgcctccgaggagaaggggctgggggaattctggtttctgtggtctgcttctgccgttttctcgagggccaccctgccatattttgaggtagcgtgttctgaatccagtctatataaacattgcatatcaattcccaaaagtgtgcttcagaaattgcccaagaaaaactagtgaatgggctcatttgtgaatataaaaaaaaccactgatttagcatctacaggcagacctcggagatattgtgggttcaattccagggcactgcaataaagcaaatatgacgataaagtgagtcacacagattttctagttttccagtgcatataaaagttacattttactaggctgtggtctattaagtgtgtaatagcactatgtctaaaaaacaatgtacaggccttcattaaaaatgtttttgctaaaaatgctaatgatcacctgagctttcagcaagttgtaatcttcctgcgggtggagggtcttgccgcagtgttaatggctgctgattgatcagggccgtggttgcttgaagcttggggcaactgtgttaatttcttaaaataagacaaataaaattgactgcatcagttgactcttccttcatgaaagatttctttgcagaacgcaatgctgtttggtagcattttacccgcagtagaacatttttcaaaattaagagtcaatcctttcaacccctgccactgccttatcaaataagttgatgtgatattctgaatcctttgttctgattttcacaatgctcacagcatcttcaccaggagtagattccatctccagaaaccactttctttgctcgtccctaggaagcaactcctcacctgttaaagttttatcatgagattgtggcaatttggtcacatcttcaggcagctctgctaatgctggttcccttgctgttcccaccacatctgcagttccttcctctactgaagtcctgaatccctgaaagtcatgcatgagggttggactcagcctcttccaaactcctgtgaatgttgctattttgacctccctccatgaatcgcaagtgttctcaatggcatctagaacggtgaattttttccaggaggttttcaatttactttacccagatcagtcagaggaatcactatctatggcagctgtcatcttacaaagtgtgtttctaaaatataagtcttggctgggtgcagtggctcatgtctgtaatcccagcactttgggaggccgacgcaggtggatcacaaggtcaggagttcaagaccagcctggccaagatggtgaaaccctgtctctactaaaaatacaaaaattagccgggcatggtggcatgtgcctgtaatcccagctatgcgggaggctgaggcaaggaattgcttgaacctgggaggcggaggttgtagtgagccgagatcgcaccactgcactccagcttgggcgacagagcaagactctacctcaaaatatttgtatatatgtcttgaaatggaaattattttttgatccctgggctgcagaatggacgaggtgtcagcaggcatggaaacaacacccacctccttgtacagctgcatcacagctcttgggtgactggtgcactgctgatgagcagccatattttgaaaggaatcttttttgagcagtaggtctcaatagtgggcttaaaatattcagtaaaccatgctgtaaacagatgtgctgtcatccagctttgttccagtgacagagcacaggcagccatagatttagcatgattcttaagggccctcggatgaacaagcattggctttgacttaaagtcctcagctgcatcagctcctcacaagagagccagcctgtgctttgaagctttgaagtcaggcgctgtcttctctctagctatggaagtcctagatggcatcttcttcaatgtaaggctgtttcatctacattgaaaatctgttgttagagcagccaccttcgtcactgatctcagccagatcttctggagagcttgctgcagcttctccatcagcacttgctgctgcaccttacactgttatgttatggagatgactcctttccttcaacctcatgaaccaacctctgcgagcttcagagttttcttctgcagcttcctcacttctctcagccttcatggaattgaagagtgagggccttgctctggattaggctctggcttaagggaatattgtggctggcttggtctatccagaccactcagactttctcaatatgagcagtaaggctgtttcactttctcgttttctggagtagcacttttaattttctccaagaacttttcctttacattcacaacttggctaactgttttacacgagaggcctcatttttggcctattcttggctttcggcatggcttcctcactaagtttaatcatttctagcttctgatttaaagtgagagaggtgcggctctttctttcacatgaacacttagaggccactgtagggttgctaattagcctaatttcaatattgttgtgtctcagggaatagggaggctggaggagagggagcgagatgggagaatggctggtcagttacgcagtcagaacacacacagcattgatcagttatgctcactgtcttctatgggcacggttcatggtgccccaaaacaatgacagtaacaccaaagatcacggatcacagctcagggatccaacactgtggaaattaccaaaaggtagcacagagacaggcgatgagcacgtgctgctgggaaaatggtgccgatggactcctccatagggttgccacaaggcttcagggtgagacgcaacccccgcgacgtggaacaaagctggaacgtgctcctaggaaggtcgtgctcctcagactctttatttaggtttgatcaagcagtgaattcaatttgtgctgcagaaacagttgccagaccctaccttcttggaatctagaatcccaattgggaaattcctgccaagtagagaaccagtggctcagttgttgcatggtgctgctgtcattacccaaacagcagtcgatctccagagcaggagcccccgctcccacagcagcgaggatgacgcccactgcgccgcagagctggcttgcgcccgccaccccgtagtaccctgtgagctctccgagaatcagccttcgggcactggagggtccgggaatgcaaggctcattctgcccacccccacaggcagcagccaggacctggtctctccgccatgtggcctcagcatttccaggctctctgagtggtttgtgattcacagagcgtagatctctcagttgctacctcatctgtttttcaaacccattgtgcttttccgcagcctcccaggtgtcaaaagttattattctattttttgccagttccataaaacagaacagctctgcgtctcagagttgctgctgcactctgggtgtcccccagatcacagcaggagctggcagacgcagcctgtgattgctaatcatgaaaatggagaggaaaaaaagttctgagctcatccaacggaagcgttcactctgcttcctccagacttcaagaaggctttagtcaggaaagaagagcggaggagagagggagggaggctgtcggcgagtgggtcaccattcgggagctccaggccgcttgcagcaacgtccaggctgttttgtattgagcgctcacagaaagtccaggctgagtacctcctgtgccacgccgccccactcacattgagtaacatgagccccattcacagccttagggtgaggaaattggaattcagaagagttcggtgacttgttctaggccgcagctctcaggcagccactttgcacctcggtctgtctgcatctccggcctctgttctttacctcttctgcccccgaaacactcactcgtgggtcctgtcctgtggcatgtccacagctgagaaacacgggagccactgcccccaacaatgtgggtattgttagatgtgtgtttccccagtgactgtcgcrgtgacacgtgttttcatgtcctgtggggccactttcacctctgcttctgtaagttactgctcccatctttgccccattcccactgagttttgtctttttcttggactgtgtaggagctccttgtcattgagaatatgaacgtgtctgccacacaagttgctaattaaacagccactgaattacatctctgtacggcgtgtacacaagtcagagcccacttttataagttgtgtttctcgtctgccccccacagtcatcctgatatgaaaccttcagtggctccctctttcccacagaatcaagtcaaaactgaagggcagccttggggtgtgtggtccttctccatgtgggtccagctcagggatgcgttgaaagcagcttccttatcaggttaattttggcgttattcccactccactttctttcccatgcccttgtcacggctccgcatcccacccgttctttgagacgcagagcgggcctctgcctcctcattcgttacygacgtgctgagccttcctttcccactcttccccagtggcgtccattgctcaccctacgcacagcaccgaatgccaggagaatgatcaagaccttgtgctttcacgmcccttccagtytgcagttttccgagtgtctgtacggcgctgctttccctcctctagccgtccactgcagtgcacctgcaggagtgctggctgatttctggacagtttgggtcctggggaccagacgtagcagtcatgggctgagccttcttcattcaagcagcacctggggccgcggctcccgtgctgtgtgatgacccaytcagcccactctctttgccgccgtgcctgtcccacgctccgtggtgactctgcagcatggcctgcctaccaccccttggctcttcccactcggtttcctgccccacaggctctcggtcctgtccctgctccgctgaccagcgctctctccccttctctgtcttcaggtgcctccctctttcctggccaagggtggatgtgtggaggcagagttgtggacaccgcctgtgcttcctgcctgttggggcagcttggtccccatgggggctgaaaagagcaacctggccgtggcttggctgagctttcagttgctttttccagaaaggcagcagggggcctatccacatcccaggccaggcygaaaacctggggtgaggggtgggtgatgctgccttggaaatagacatggatttcttgaacttacaggaagcatacactattggggtgtcaaagagttttttgctttaatagaaaattcagcacattctttaaaatcaaattctcggttgcctctcttgacccacttcggtattattttaatagtggatgatggcagcaaagtctgattttatgaaaagggaagatgttggccattacagtattacccacttttctctttcaggtgtgtcaattaaaatcaattaaaaaatgaattatacrtatatggatatattcaaaatgaacagtttggaactatctagaataaaaagtaaaaattccttttgtgtcccttcaccaaatctcactcccactcggaggtaacagacatttcctgtttgctgtgtgccctgttttctgtgcgtgttaaaatgtcagacaggactgcatgatatgtgcttaatgaagaaaatctagcagccagggccctgaaatggtctaaccatctttgcattattggttagtaatgaaccggaccatctaagatgtcccagccaccttgtgggcagggccccgccccttcatcctctcagaggggctgaggcaacrggaagacccacagctgtgagacacgagaccgcatcactccgtgtgactggcagtctcattgcactcccaaattccaatgaataaaacctaaaaggagatggaaacgaatgactgaattgaactatgtgaagctcagccttatttggtgtattaacagaaaaagtgacgtgatattgagacttcagattagtgacttgaggtgagttaaaatcagttcagctcagtttgggtctcacacacaygtgagctcagatgtatgcatgtgaccccacccaatggctctgaagatgcggttcgctcctcaaactttccagrcttttctctcctcagaagtttgctgggaggaaggagaagcgggaggaacagaaccagattgacgttctcgcgtctcttcttacttgggcgtatttatagcatccccgctaaggacgccctcgttttagaggaacaygttttacattttttttccagcctccaggctgcctggcagcctcaggcggagaagcagattgactcggtgtcagggtcacactctcaggccccttggcggcacagacagggtgagggtgcctgctggggcccctctctctcctctccctcccgagcggcgtctgtgctgtgaattttcacggagacacaggctgatccttcgtgcgtccttggctggcagttgttggtgacttacagtcattcatgtgctggcaacggatggccctgctgtcttgtgttgggacagctgtgcgcatcggcgtcattgatatgatttgaatttggtgctatctggtgtggctttgtaactaaagtcataaatagtggagaaacgatgtgtctggttctaaattaacagtgggactgggtgcagtggctcacgcctgtaatcccagcactgtgggaggccaaggcaggcgaattgcttgagctcaggagttcaagaccagcctggcaacatggtgaaaccccttctctacaaaaagtacaaaaatcagccaggtgtggtggcatgtgcctgtggtctcagctactygggaggctgaggtgggaggatcacttgagcccaggaagaggaggttgcagtgattaagcctttgcactccagcctgggcaacagagccagactctgtctcaaaaacaaaccaacaaacaaatggcgggaggaacacaaatcgtagtaagtatgatatgcaggtttccgagcccagatgtgcagccctggattttcaagtcttccctcaagtcaggactttaaggaragaactctgggttttgtgtttctgcacaatgaagttctaatatctgactcccaaacttcttccccgtgagactgccttaatgatgcttatgtagactggactggaatccccactaagagaataaattacccgttaaccaagacggtctccaggtgtgtgtgtgccttggcttggaagttcaatttcacagtagttagaatagctgcttgaccccacaggcctgagaggggaggtaggattcaaggaagctggagagtgagcccagcaggggcatgtcctaaaaaccccgagaaggtattggagtgcccggctggggtgtgggtgtcagctgggggtggaggcgggcgtgccctcccgagggtgttttgctgggggttcctctgctgagtgggcccgtccttggtgattgtccctggtgcacggcyggcttgttaagcaggggcgaagcgtgcacaaggtcacctttctccagcatcctcatcttcatggtctcgctgggagagtggccgggggtgcctgaatcaagggaactagaacaggtgctgaagctgttcccactcgcaggaggaagagcagcatctggccccagacagggggagctggggagtcctcagggcccttcggggcctccctagacaggggaagccggggagtcctcggggcccttcggggcctccccagacaggggaagccggggagtcctcggggcccttcggggcctccccagaactgtgctcgttggtggcatccacaggctgctcctctgggagcttgttgcttttcgggtcctgagccctcccgcytgccaccgtggcgtcagggaaactggtgcctcccaagcacccccagctcttctgcrtgagaaggttggagactgtgctgcagccggggttcttatgatcaccttcctccctcgccagcatctgccctggagctgaaygaggaccaccaggctcctcagggcctgtctccgtggggyaccaggaggcgcaaatgccagtttgcatcattgccctgttttcagctgtccaggatgcccatgtctgcagaacgcagtgtgcacagtcccacagggcacccygtggcatcacccggcctctctctttgacttctctcccgctgaacagcgagtgcttccccaaagccatgggcagccccactcccgactccctcagtggtcagayggtcacccgcctcttagccgaccttgggaagagggtccctctcagatgggcacccgcctcttagctgaccttgggaaaagggtccctctcagacgggcacccgcctcttagctgaccttgggaagagggtccctctcggaggaggggtgcccacattctgctgggcggttgactctggtggaggtggcccgtagttygggcgggcacatgggcatgctctgtgcaacctgcagcatttactaagatgctcttgaaagaccgttttcccttttatctgctgggttgactttcccatttatcaaattaactttctaaacccttaaatttcagagatttgagaggataaggaattgtttagtagatgaaactcatttkcatatttccagaggcatgtccaaaaactaaatggggttgagcatttctcagggaaaagttractcggggtgccagttacacgcagtgttttccagaggtcctggggtccaaggccttcccatggctgaatctcccggtttactccgctttttgatgaaggagcaagttttgaatgtggagtcctgtagagttcgctgtgcctcttgggttggcctggcttagctgtggctgatgaccagctgtgaggggacacagtggggccgcacgggggctgggccagtgctgcacccgcccagcgccagggctgacctcatttgcttatagcctgcttttgcttttggtctcctaagcgcgagatcttgatgtctacctagaaatgtcactgacgtaggagaaagggattttttttttgcttttaccatgaagggttgtcatgggcctgtgtgaaagamattaagtaaattagatatcagccccaaggaatgttaatatctgagatttatactggagtagttttcgcttcccaatttattttcttttaaatacttamaacatttggtttttaagctatttatagccaaccttttttttaaaaattaatgtttaaaatgttttttccccccaatctatcatggtygactgttagacagttggatggctgtgtggttttcaaagctgaggtcaagtttgaatgagctcatttcagatcactctagattttctgaggctgacagtgtccttgggacaccatgtttggggaatgtgtttttgcagtttacgaagcacccgctgctcagagagccgggaaacctttccttctcttttcttggagtctagttgccatggagattgtcactaaattatggacgagggagaggcgagccggcacttggaggtctctgatacgcaggcttctcaatcagggtgcacagacacagcagaggccgtgcagaggctgcagcttgccctcccggctgtcctgggcgtggatgtagcctcccgaaacagctcgtcagaggggtttattcagagaacggaagtgtgcttatggcaggaagagcttcaagggttctcacatatgtttacagctgctctttctccttagcaggactctgagtggctgcagtgtttagagaaatctgccaaatcctgatttaattttggttcatttgctaacaggattggaggagataggaaattgatcttggggaccgtgaagctgctgaggttcagccacgaccaggagtttggagggataatgtctgtgcgtggccataccattttgaaaagcacaaaaccttttatcattaaagcagaaatatcgaaccaaacgtggattctaaagattatgcatacaacaaacacatgtctttcggtgcaggcatttctgcacctaatttcaggcctaatctcagtggctcagcagtgcagtgtgggcaaatgcttaaccaccagcatttgcagcatttgggacctgatttgcagccgggttctctagtgtaaggcccccgccccgccgccactgctgcctcccagttactgacgcagtgtcactgaaggtggagttgggaggaaatgtggacggccagctctcgggcccttgcatgcaacggccttgttatttyagaggcgccgtctaatcattcttgggacgytggtctgctctgtcttttgaggcagtttccatagaggtggggtctgtgttaagagtgcattgaagggtgagtgatttccctctaactgatgggtgatgttcatggtctgagtctgtgtgcaaagcttagcctggggctgctttggaacctgctctctctattccaggcctgggtgctttgagatattcttgrgctggaataacacccagcacctgctcttgtgactgaaatggcrtaaagtaataatagtgcactgcatgggggttaatgcctttctgagtgttttatatgttatcgtgttagatttctgcaccgtcactgacaataacagggcatgtatttttgttctcatttaacagatgacaaacttggtcccttagtgttaaatgtgggtgacacacaggcagaatctgatctggaaccacamtgatcgggcgtcttcccatccttcctccaatcagctcacccttyggcttctcaaaggcccacggaatttatggtggttcatcgttctttgccttaagatgcaggttctagatttgctactgggacccacggtgactttgatttgtctcttgtgaactctctatgatgctggcaaaagagaggaaatggtcacgtattggtcagatgaatgttgcagggaagaataattgcattacatgaaatgcctgcaggaaccgtggtgggaatggaaccgtggtggggcaggaaccgtggcgaggccggaaccgtggcggggccggaaccgtggcggggccggaagcatgattggagtcaggtgggccacatttcctggctgtcccatgtcttctctttgccctgacagtggtctcagccgacagaacgggcaacagacacgcacccagcctgagaggggccctggggccggggcgcccgccaattgtcagagtcttcttggttgcttttcaattcagaaatcagasaaatgatttgtagagagttttccttttcttcatttagcttgaaatcaattttgttagtaagkttttttttttgtttgtttgtttttgtttttttgagacggagtctcgctctgtcccccaggctggagtgcagtggcgcaatctcagctcgccacaacttctgactcccgggttcaagcgattctcctgcctcagcctccctagtagctgggactacaggcacctgccaccacacccagctaatttttgtatttttagtagagacagggtttcaccatgttggccaggttggtctcgatctcctgaccttgtgatccacccgcgtcggcctcccaaagtgctgggattacaggtgtgagccactgcgcccagccattagtaaggttttaaacttgtcctcagaattagaagaaatcccagagactggagaccagcagtgctgtgtgtgggtgagaccctgttgaagatcccttggtaagtccagtgggcgtggtccataggagggggaggcgggaggggagctggctcaggagaggctggctttgcctccaaagaagagccccaccctcttgtgctggcctctcgtgctggccttttcctattgtccttcagagaggaggaagctttgctcagcttctcaccaattaaaagagcactgtgaggttggacaggagtgcaatttatgaaaacaaaacaaaaaaaacctttgacatggtgaaaccccgtctccactaaaaatatggtgaaaccctgtctccactaaaaatataaaaatacagaattagtcgggcatggtggtgcacgcacgtaatcccagctacttgggaggttgaggcaggagaatcgcttgaaccttggaggcagagkttgcagtgagctgagatctcaccaccgcactccagcctgggtgacagagcaagacctcatctaaaaaaaaaaaaaatccatgtgatctataaaatctcacggaaacacacacctaaggtcacgcatttcactgtaacatgagcgggaagatgtactgagcctgttctccacctcggtgaatgctccgaccccctcttgcctcacctcccactgtatrcatttgttcctttttaattttttgaagactggtcaagtgcagtagwgagaaggsggaargggtacaacaaggagctagattgggaactgactgagcagccggtcggggtgacgcaacgctaccttcctacccccaccctttgctcctgttgtcgctgagtcgtgctccgtcgagggacacaccacgtcttgcttgtacccacacaggttgttcccagcatttggctgctgtgagcatcctcgcgtgaaccttttcaggagctgagctcttagaggagaaggcagcgctgtgttgagcacccaccgggagaagttccgtcaaatccagggtacttgagattctggaaagatgcagaaatgtaaaaaataaaaacaagcaacaagcrgtttatcccacaagtcactaggaaaatgtattgttgtctctctaacagtcaaatcctattggtcggccttagtttttctgcaaaacagaataaattttatgtttttttccccagttgttgaaataaaatgctataaccatatttgcttataaactatgtccaaatgagattcttttatttctacttgacgattttccaccatgtcaggccctgttatgatggcagcccgttgtgatgcactaggacagatcccagctcccaattcttttatgaggcactaggacaaatcccagctcccaattcttttatgaggcactaggacaaattccagctcccaattcttttatgatgcactaggacaaatcccagctcctgttatggcaacagcccgttatgatgcaataggacaaatcccagctcccaattcttttatgatgcactaggacaaatcccagctcctgttatggcgacagcccattgtgatgcaataggacagatcccagctcccaattcttttatgatggcactagaacaaatcccagctcccaattctttgcatttttttttttttttttttggccaggttttctctctcacttgctggggcacgaacagatgctctttggtgtttttaatgattgaggagcatcttgctgttgtcgttctcatttgttttcaaggaacagaaacgctctcgagcgagtgctcggtggagctgggcaagctgctgaccacaggggaagatgactcaacaattgggattttgcttcttctttctttaaaaagatgcaaaagaactagacccacactttacacatttttttggtgtgttcattgtggactagtgttgttgttgttgttgttgagacaggggagatggtctccctctgttgcccaggctggagtgcagtggtgctatcttggctcactgcaacctccccctcctggggttcaaacgattctgctccctcagcttcctgagtagctgggattacaagtgcctgccaccaccactggctcatttttgtattttagtagagacaggatttcaccatgttggccaggctggtctcaaactcctgacctcaaatgatccacctgccttggcctccctaagtgctggggttacaggtgtgagccactgtgcacagccaaaaacagtgttttcctttcctcagtctgaaagcctgacactgttgatccaccaggagtgtgcatgrgtgtgcatagtgttgatccaycrggagtgtgtgtgggtgtgcatagtgttgatccaccgcgagtgtgtgtgggtgtgcatagtgttgatccaccgggagtgtgcatgggtgtgcatactgttgatccacccggagtgtgtgtgtgtgcatagtgttgatccacctggagtgtgcatgggtgtgcatagtgttgatccacctggagtgtgcatgggtgtgcatactgttgatccacctggaatgtgcataggtgtgcatactgttgatccaccaggaatgtgcgtgggtgtgcattctgttgatccacccggagtgtgtgtgagtgtgcatactgttgatccacctggagtgtgcgtgggtgtgcatactgtttatccacccggaatgtgcgtgggtgtgcatactgttgatccacctggagtgtgtgtgggtgtgcatactgttgatccacccggagtgtgcgtgggtgtgcatagtgttgatccactgggagtgtgtgtgggtgtgcctactgttgatccaccaggagtgtgcctgggtgtgcacactgttgattgaccaggagtgtgtgtgggtgtgcatactcttgatcgattgggagtgtgtgggtgtgcacattgttgatcgggagtgtgcgtgggtgtgcacgctgttgctccaccgggagtgtgtgtgggtggggggtgtgcatgcctgtatgcacaatagagtctcgatctttgtgggacaagcataggggactgggcatcagtcaggaagcttgggcttgtcttgccctgccaccaccctgcgcacccctctctattcaagccacagctctgtgcacgttggatttcttacgtgcaaaacaagggggtcagccatgccggtggtaacacctggaaacacctggaagctttgaaaaatastgatgcccagacataamctggcgccagtgaatcagaatgtcagctgagggcggcraggggcggggtgggggcgggacccaggctttgccgtcctttctttttctctgaagcttcccgaggtgactgtaatgtgctatcagagttgaggakctctgggcaagacgatcctgatgaaaccctcccaccctgaaacgccagctgtgctttgtgtaacaaagccaaaggtgcggtgagggaattcagtttcctcattattacttctatggtttgttagcaaaaacataattagcatgaaagatatttctctgtggacatgcaaatcaatgcaaatgactaatttgccatttaagaatttgcaaattgcaatgcaaaattgtcttaggtaaataaccctagtctaattgagtgacaatattctgtgttttgttattaaggctattagctgaagatgtaggaagactgtaaaaatgccacaatttttgcttatacatgcagtgtgagttataatttmcgggagattttaygcacattgtttcacttgagccccacaattccagttgcatcctagactagctacygtaaagtagcacagggtaaatgggtggcggtgaaagcaagaatttgaacagcttgccacagtgtaacaaacgcaacagcaacagaaacatcaasagggccttccccrggggctcccaggtctttggcagcagaattacccaagttttggccagtgacttaaacacacgccatgtaaaaggatgagatgggaacagaacaaagagcccagaaataaacctgaccatatatggtcaactaggtgtgaagcagactctggggtaagagccgtctctttaaatggtttcggggaaactggacatccacactcaaaagaatgaaatgggaccttaycttacaccgttctcaaaaatctgcccaaaattggttaaagacccaaacacaagatctgaaactgtaaaactctgaaaacatacaggaagagctccttgacattggtctcggcaagaagttttggacaagacccaaaarcacaggcaacaaaagcaaaataaatgagtgggactatatcaaactgaaaagctgccgtgcggtaaaggaaaccatcaaaatgaaaaggcagcctacagggcgggagaaaatgttgaaaaaccatagatctataaggtgttaatatctaaaatatataaggaactcactcaactcaatagcaaaacaaacaaacaaacaacacacacaaaaaaacccaaaagccaaaaaacccccaaaccctccaattttaaaaagggcaaagracctgaatagaacatttttccaaagaggacatacagatggctgacaggtatgggaaaggtgctgagcatcactaatcattggaaacgcacatcagagccccagtgacttaccctctcacacctgtgagaatggcttttatcaaaaagacagaagataacaagtgttggcaagtgtgtagagaaaagggacacttggaygctttgtttgagacagtctcgctctgtcctacagtggcacgatctcagctcactgcaacctctgcctcctgggttcaagtgattctcctgcctcagcctcccgagtagctgggattacagacatgtgccaccatgcctagctaatttttatatttttagtagagatggggtttcaccgtgttggccaggctggtcttgagctcctgacctcaagtgatccaccygcctcagcctcccaaaattctgggattacaggcgtgagccactgcacctggccaacttgcacactgtttatggaaacagtgtgtaggttcctcaagaaattaaaaacagtgctaccatcaacgcctcttttggttatagatccagaagaaattaaatgggcagaagaggtgtctgcaccctgatgctcattgcagcactattcaccagggcatggagacagtacaggtgtttctgatggatgaatggatagagcaattgtggtatacatacacaatggatactattcagccttaaaaaaggagatcctgtcattttcaaaacatggatgaacctggaggacatgatgttgtaaatagtgtgaagtaagtgaaataagccaggcacagaaaggcagatactgcatgatctcacacatatgtagaatcttaaaaaaaaaagttgactacatagaaacagagagtggaaagctggttatggtttggggggtgggagtggcgaggaatgagaagatgtggatgagagggtaggaagctgcagttttgtgggaggagtgagcccaggggcctaatgcacagcgtgaggactgtatgtagtaacaacattggattgtttactggtaatttgcccagagggtgcctctaggagagggtggaggcagaggtgttaactcttgaccacagtggccacctcagtatgcatgtatgtatccaacatcatgttgcacgcctcaaatgtacatccaaaaattttacaaaatgatgagttggattttgttatctgctttaaggatgtccattttattactgcatggatgcrtcatgcaacaggaagtggggtgtgtgaggcgtgaggcagggatctgggttcaaggcctgaaagtatgtaaagctgctcagcacrtgtgactgcgggtccccaggcaaagtagcttagcccacatgactgcacccataactgctggctttctgggttctaggcttacgtgatcagagaccaggtttgtttttgcccagcccaagtccagcacacatgtggcaggtagctggcttttcccaagcatccactggaggcccctggatcaatgcattcagggcagtgtcttgggaaggatataaactgtgcagtggttaaacagctggtacttggactgtgagagctgagcctttcagtgcttccaagtactgactctttctaagcctcagtttgcttgtctctaaagtaagcatagcaataatgccttctttgtagtaagatttaatgtgatactgcaaataaaatatttagtacagtatctactaaagattagatggcatagattagatgctcaggaatgttagtgaaaacagttatcataatgaaaaaatgccctcatgagcttctgtctactgcagggataaagtggtaaataaatgatgtgtacaggagatacagtaagggagtaaggggtgtsgtatgaatgaagaaccaagaaagcattttaagaattcaaaggggtcacggggtgggaaagaagagacatccagtgggagaatcragacagtctctgggggagtaatcatgatggatcttgataggactggatttgaaggctggagagccaccagagtgtcacttcgcacaaactctgcaagatgggcactcttagtatctccacatacaaggcccaggagaggaggcccagcatgctttaggaaatgtccacagccacacagctgattggtgctggaatctggacttgtatctcagcagcttagctccagtctgcgataagaacaccatagcctctgtaactagctgtgttatcctaagaaaattacttagcctttctgaacttcaactcccttatctctaaaatggrgataatacattgatctgaaggtcaatgataatgagcataagggtgtagcacagaatctggcactggtgatatttactcattggcatggcaatgatagcgatggtaaggatgatgatggtgatgatgaagtgattgtttactaaatggcatgccaatgatggcgatggtaaggatgatgatggtgatgatgaaggattatttactaaatggcatggcaatgatggcgatggtaaggatgatgayggtggtgatgaaggattatttactaaatggcatggcaatgatggtgatggtaaggatgatgatggtgacgatgaagtgattgtttactaaatggcatggcaatgatggtgacggtatggwtgatgacggtgatgatgaagtgattacttactaaatggcatkgcaatgatggcgatggtaaggatgatgatggtgatgatgaaggattatttattaaatggcatggcaatgatggcgatggtaaggatgatgacggtggtgatgaaggattatttactaaatggcatggcaatgatggcgatggtaaggatgatgayggtgatgatgaaggattatttactaaatggcatggcaatgatggcgatggtaaggatgatgacggtggtgatgaaggattatttactaaatggcatggcaatgatggygatggtaaggatgatgatggtgatgatgaaggattatttactaaatggcatggcaatgatggtgatggtaaggatgatgatggtgatgatgaaggattatttactaaatggcatggcaatgatggtgatggtaaggatgatgacggtggtgatgaaggattatttactaaatggcatggcaatgatggcgatggtaaggatgatgacggtgatgatgaaggattatttactaaatggcatggcaatgatggcgatggtaaggatgatgayggtgrtgatgaaggattatttactaaatggcatggcaatgatggygatggtaaggatgrtgacggtgatgatgaagtgattacttactaaatggcatggcaatgatggcgatggtaaggatgatgacggtgatgatgaagtgattacttactaaatggcatggcaatgatggygatggtaaggatgatgatggtgatgatgaaggattatttattaaatggcatggcaatgatggcgatggtaaggatgatgacggtgatgatgaagtgattgtttactaaatggcatggcaatgatggcgatggtaaggatgatgatggtgatgatgatggtgaagatagtgatgatatggtgatgacgatgatggtgatgatgatgatratrgtgttgatgataacaatgatggtgataacaatgatgatggtgacggtgatattgacaacaatgatgatgacaatgaggatggtgataacaatgatgatgatatggtgatgacaatgatggtgatgatggtggtgatggtaatggtaatgatgatggtgatgatggtggtaatgataatgacaacatgatggtgatgacaatgatggtgatggtgatgatgacaacaatgatggtcgtgatggtaatgataatgatgatgagatgctgatggtgatggtgatgatagtaatgatgctgatggtgatggtgatgatagtaatgatgatgatggtgacaatggtgatgatttggggtgggggacagaaatgagaaaagatggagttaggggatgatgggctcacctgcccttttggccctccagttctgtacttgcatattgaggggcttggtctacctggtgttgcccaaatgactagaaccatgtaggaagcttataaaagtacacagatccagatcctataccagactgaccaagtcggcatctcccatctggggctttggggtttatggttttagtacagttgactgtaatgtgcagccaggctggggaaacatgaaactaatgatcttttaagactcaagctccaatagcttgtggttctgagttcaaatcatcactgctaaaatgagcacaagggaatagaaccagttattcgtgctgaataaaataaatgtaacccccaagttgttgcactgctatttgaaataatttatgttattgattttcttcaataaaactgagctgtgtrtggatttgcctgaaggggtctgtgtcccaaccttcaactcatcctctgttttcctggatccccacacaatcgtaggcagcttagcttgtagttttgcggactgtgagctggacatccttcctgtgtttgaaaatgaacctgtcatcagcacaggttttacgtgagaaacacagggcctgaggcagctatatgacacgtctcagggtggaaggaggggagaggaattcattgaggarccactcctttttgtcttagttttaaggcagtaaatgacttgtcatcctcaggaaagctaacaggcaggtgttccctctttctctaccaccattttcatggccgagacaggaccaggcaccccttaattttcacatatcatctctaggactctgtgtgttttctgtcaaatgcaagtacggtatcrcatcatgtgagagcagaaggtgtgacagaggccgggtgtggtatagatgatgccagcacaccagacaaatgccagatagtagaagccacaggggcctccggtgcatggcgtctgagggtctttatgggcctgctgggagggaggtggtcaggagcatcagcccgctgtatgaggatctgcactgcctttgagaagtgacatcctgggataaacaagctcacccaaactcctccagaaagaacccaacaatttatttttatttggagatatagggcgagtgttgggatcaaagcctggggcaagatggtcccagagaggggccctggtgtgtggacctagaaagcagagcagcacagggcgtgggcgggtcacgcgggaggaagcacagagggtctgaaagcatggaaggagaagtacgaaccgaagcacccaggcggttctatgcaaggacgggaggcgttcacccaagcgccggctcctgcagcacagggcgtgggcggaagcacagagggtctgaaagcatggaaggagaagtacgaaccgaagcacccaggcggttctatgcaaggacgggaggcgttcacccaagcgccggctcctgcagcaaggcagggattctctgccatggggtgagtatgggttgtttccttggaagtcacaaatatgccagtgtctttaggctcagtaactcagactgtaggaacccacactaaagacgtgtttttaaaatgtgggtgaaaaataattgaaagcacgtttgttacagctttatttataatgttgaaaaactttaaaacaacccatatgaccaagcatagcagggaacagtgcagtcagcctctacagcaggtggccaagaggctctttccatggttccgggaaatgctcgcgtgtagtacccagtgggagtggcaggagacagccccgaggctacagaatgaatttgagtgctttggaaaaagtacgtaattatgctttggaaaacactggaagaaaatgcacctagaatgatattttttttcaccattttctgtatgcttcagtttttatgctgtaagattttttttttttttttgagacggagtctcgctctgttgcccaggctggagtgcagtggcaccatctcagctcactgcaagctctgcctcccgggtttatgccattctcctgcctcagcctcccgagtagctgggactacaggcgcctgccaccacgcccggttaatttttttgtatttttagtagagacggggtttcactgtgttagccaggatggtcttgatctcttgacctcgtgatccacccycttcggcctcccaaagtgctgggattacaggcatgagccaccgcgcccggcctttatgctgtaagattttattgytcatagaaccaagaaaaaaatgaaagactgggaatttggaaatttgaggtttcttctatgcttcttgaccaggtcacttctgatcttaagtgaagccacatgactgtcgggcagaatcctccatagtagaaaggaagagctgttatttctctgcagtgtgtcttgggtttgaggatgttgtagtttgtgcaatgatggtctgcatctctagaagatttttcctaaccaactttatgtggatcagctgacttttcagctagctgccagcgtgcacacgtttctctctgtaatgtcttctattttgaggtactctgtgctttactggaactactatctgttcttgtatatttctaggcaggctttgccagccaaaggtgggtggaacatttcttgcatcaacatcagaataagctcgatcatgaacgatggttgaggaagggagctggggccrtggcttgactttcccatgggaccgtgcaggacagagcagatgaattctcatcagatggcactgcgtatgcttggtgactgtgagytttcatttccggacagctggatgaccctcctgtgctgacggcacacagcccccgtagcaggaacatgtagatagagtcccatcctggagctggatgaccctcctgtggtctcggcacacagcccccstaggaggagcatgtagatagagtcccattctgcagctggatgaccctcctgtggtctyggcacacagaccctctagcaggaacttgtagatagagtcccatcctgtagctggatgaccctcctgtgctcatggcacacagcccctgtagcaggaacatgtagatagagtccgatcctacagttgaatgaccctcctgtgctcttggcacacagaccctgtagcaggaacttgtagatagagtcccattctgcagctggatgaccctcctgtgctgacggcacacaggcactgtagcaggaacttgtagatagagtcccatcctgcagctggatgaccctcctgtgctcacggcacacagcccctctaggaggagcatgtagatagagtcccatcctgcagctggatgaccctcctgtgctgacggcacacaggcactgtagcaggaacttgtagatagagtcccatcctgyagctggatgaccctcctgtgctcacggcacacagcccctctaggaggagcatgtagatagagtcccatcctgcagctggatgaccctcctgtgctgacggcacacaggcactgtagcaggaacttgtagatagagtcccatcctgyagctggatgaccctcctgtgctcwcggcacacagaccctctagcaggaacttgtagatagagtcccatcctgyagctggatgaccctcctgtgctcacggyacacagmccctctaggaggagcatgtagatagggccccatcctggagactgtggatgttgccatgctcctgggtttctcggttgcctcttggtggttctatgatggagaaacggcagggcccagcaccatgatgtgggcagccacagcggctggacaggggccactggacatttagggagatcctgtgacacayaggctgtggcctttctccgagtcatgtgtgtgtggccctcagggtagtgggagaaagagaagctatgacatttggactgaggcgtgcatgggtttgcggctcagtatagagtaataggtaggggtggtgcagagccgacgtccttttgcgggcccctggagcccgttcgtcccaggcaggggctctggattctggatcccgttcgtcccaggcgagggctctggattctggagcccgttcgtcccargcgggksctctggattctggagcccattcatcccaggcagtgggggctctggattctggagcccgtttgtcccaggcagtgggggctctggattctggagcccattcatcccaggcagtgggggctctggattctcatctgggtgttgtggtgcagcatgcatgtgtgcttgtgcaactgtgtgcacttggagccacagcctcaagccttggtgtcttcctctggacagtggagacatcagcacgtgtggtcccaaagtcctcgtggccctgtgtgtgcagcaagtccagcccagggcagccacaccaaggctccggtgtcaccctgtgatggccgcggcaccctgtcctctctctcctgtgcccccacagatgttgccrtctcctgcctctcgtgtcttccccacrtgtgtcctttgccartgctccctgcagtttcccttgtctggcctgtgctgygtggagggtgcacctctgaasatcacgcagtcctcagggggccctgggatcaaaggtgtgtccacggttagtgtgctgaggtctcactctgtgctkgttgctgggactagaaggggaaatgaggcagagtctctgctcttaggcagcgtggagcccgcccagcctggtgttatgggggtaccrgcttcacagtaggatttggatttgaatcccaaatctactcagtaaataactgtgcaactttcagctctccgaggtgtgcagtggggacgatcatggttctggctctgcagggctgttgggagaccgcacgagagggtgatgctggtgtcagggctccggcggtcgacttcgtgggacatcatggggctgttgggtgggggcgtggttttgcattttgctgactattagagcttttaaaaaccgggggagctttaaaagatccgggtggtcaggccacacctcttgacaaatcagaattcagggaatgaggccagtgtcaatatttctaagacatggcagcttttcccccaggtggccgtggtaagctttgggagctgggggccgagcttctcagcctgtgtcagcatctcctggacatcccgatggactgcagatcactcgcccggcccacttyctggtgcactggtctgagcattgtcctttgaaaaccaccagatgtcggggaaataacgtttgctgtggcgtctggggcaggaaaggaggaagcggagcacaggccaagctcggaggatgggggattttgctagaagggtatttaataaggtttgctgtgtttcacactgagggacgcataatggaaccctgggcactgcagagctgtgaagtgcccaggagacaccaaattaactttctcttagagctttcacctcagttttcaaccacgtcttctcactcccaatttctaaaactcccaggagacccggaacccttccaaatggatgaaaattcagtcagaggtgtgaagttttggccctgctgagaacactcagggtgtaaataatgaacttggaaggagttttgacggtggctttactgcgactctccccaggccaggctcgccctggagggggaggtctggtgttaacgcccctcaccgtgygctgactggggccgcgcatccgctgtgktcccgcaggccgaggtagcacctttgctaatgaacttggaaggagttttgatgctagttttactgtgactccccccaggccaggctcgccctggagmgggagktttggtgktaacgcccctcaccgtgtgctgactggggccgcgcatccgctgtggtcccgcaggccgaggtagcacctttgctttcagggctagtggtgtctgcttatcaaggccagggtagacacctgcccgctggaagtgtccagagacattgcacccgagatgctgaggagccctgggagggacacggtttcttctcattggggattctggggatgttcattggagttaggaggaatgcagagcgtggatactgtgcaaacagataaggacgctttcaggaaataagcatcaggaaaggggtcagaagactcagcctggattcttggtggctcatcagattcatagcaaaccacaaacactgaatccaccctgcgtgcgccattgctgtgtagacgtatgatggaccctccttggatattaattcaaacaaattaactacaagatgactttttttttaattaatggaatttagcactgaccggatactagaacattattaaagaccagttgctgttaactaatgttgctggtgtgatactgggtttgtgatgacattttttaaagccctcatgtgggtgagttgtggtgatcctggtgctgtgggagatggaggcgggggaatcattgagcccaggaggtggagrctgcagtgagtcgtgattgtgtcaccgccgtccagcctgggcaacagagtaagaccccgtctcccctaaataaaataaaatgagataagtcctcatttgctagagatacacagaatatggtgtagtagattttctctaactgactccaccctcaaccctggaaaacagggaggggtggcaggggagacggatggagtgaaacatgagccactgcagagtgatgggtggccatggccgatggcgtccgtgccgttatcttctctgcggagcaatggggggccgtggccgatggcatccgtgccgttatgttctcygcagagcgatggggggccatggccgatggcatccgtgccgttatgttctctgcagagcaatggggggccattgccgatggcgtccgtgccattatgttctctgcagagcgatggggggccgtggccgatggcgtccgtgctgttatgttctctgcagagcaatgggtggctgtggccaatggcgtccatgctgttatcttctctgcagagcgatgggtggctgtggctgatggcatccgtgccattatcttctctgtggagcaatggggggccgtggccgatggcatccgtgccgttacgttctctgcagagcgatggggggccattgccaatggcgtccgtgccattatgttctctgcagagtgatggggggctgtggctgatggcgtccatgcygttatcttctctgaagagtgatgggtggctgttgtcttctccgcagattgatggggggccgtggscgatggcgtccatgtcgttgtcttctctgcagagcgatggggggctgtggctgatggcgtccatgctgttatgttctctgcagagcaatgggtggccgtggccgatggcgtccatgccgttatcttctttgtagagcgatgggtggccatggccaatggcgtccatgctgttatgttctctgcagagcaatgggtggccatggccgatggcgtccatgctgttatcttctctgcagagcgatgggtggccatggccgatggcatccatgctgttatgttctctgcagagcaatgggtggccgtggccgatggcatctgtgccgttatgttctctgcagagtaatgggtggccatggccgatggcgtccatgccgttgtcttctctgcagagcgatgggtggccgtggccgatggcgtccgtgccgttgtcttctctgcagagcgatgggtggccgtggccgatggcgtccgtgccgttgtcttctctgcagagcgatgggtggccgtggccgatggcgtccgtgccgttgtcttctctgcagagcgatgggtggccgtggccgatggcgtccgtgccgttgtcttctctgcagagcgatgggtggccgtggccgatggcgtccgtgccgttgtcttctctgcagagcgatgggtggccgtggccgatggcgtccgtgccgttgtcttctctgcagagcgatgggtggccgtggccgatggcgtccgtgccgttgtcttctctgcagagcgatgggtggccgtgsccgatggcgtccgtgccgttgtcttctctgcagagcgatgggtggccgtggccgatggcgtccgtgccgttgtcttctctgcagagcgatgggtggccgtggccgatggcgtmcgtgccgttgtcttctctgcagagcgatggktggccgtggccgatggcgtccgtgccgttatcttctctgctttcgtgtatgtttgaacatttctataataaaaacttaagtgaaaagcttactgtgctggctgcctggaggtgtggtgtttctgttcattttgtttttagggtgggaagtagtgggattgggggtccatgggggccatttcttgggttttcctgaagtgggttctgtgcttggcatcatgaagcaagtggagcgtgtgtttgctccatgcctgtgggctgcgtggaggcagcctgacaaacacatttcgaggggcccccggggggtcgctgaggctgtgtatgtctgttccatgcaacagccgtcatctctgtttttgaacacattgacagtgtgtagtctgcttggggggatgttcgaggtcaacagagtggccaaaagaggctctctcgtcattgcaatgatccacactccactctgctgtcactgaacctgcccccaagcctgcaccctcttcatctcttctttgtctrtagcaaccatccccaatcctgacatcagtgattgtgtgtgttgtgtcttgtctgtcctccatagcaaccrtccccaatcctgacattggtgattgtgtgcgttgtgtcttgtctgtcctctgtagcaaccgtccccaatcctcacatcagtgattgtgtgtgttgtgtcttgtctgtcctccataacaactgtccccartcctcacatcagtgattgtgtgtgttgtatcttgtctgtcctctgtagcaaccgtccccaatcctcacatcagtgattgtgtgtgttgtgtcttgtctgtcctccataacaactgtccccaatcctcacatcagtgattgtgtgtgttgtgtcttgtctgtcctctgtagcaaccgtccccaatcctcacatcagtgattgtgtgtgttgtgtcttgtctgtcctccataacaactgtccccaatcctcacatcagtgattgtgtgcgttgtgtcttgtctgtcctctgtagcaaccatccccaatcctcacatcagtgattgtgtgcrttgtgtcttgtctgtcctccatagcaaccatccccaatcctgacatcggtgattgtgtgcgttgtgtcttgtctgtcctccatagcaaccatccccaatcctgacatcggtgattgtgtgcgttgtgtcttgtctgtcctccatagcaaccatccccaatcctgacatcggtgattgtgtgcgttgtgtcttgtctgtcctccatagcaaccatccccaatcctgacatcggtgattgtgtgcgttgtgtcttgtctgtcctccatagcaaccrtccccartcctgacatsggtgattgtgtgcgttgtgtcttgtctgtcctccatagcaaccgtccccartcctgacatcggtgattgtgtgcattgtgtcttgtctgtccccacctagaatgtgagtttcataggargagacttgtctgctttgctgagtttctaagtgtctccgtcggttccctgcacatggtcagtgcacaacaaatgtcagttgaatgcttagtacttaggagacatgaggctttcaattttcctcagttaatttgtrtgacagtaatgcatatatatggttcayttaaaagccgagtaatatagggcttaaaataagaagcaacagatcctgcccctctttcctgagctcaccccccacacccaggggcaacagtagcctctcccacgttgaggtcctgcggcagctgccgcttttccatatggttccacmccatctcatcaggagttgactcagtcctcctctgtgtagcccctgtggtgccccctgcactgtagggtgaggactgtcctctttcaattcccctaygtccaggctgtgttagccaaccctgtggtgccccctgcaccgtacggtgaggactgtcctctttcaattcccctacgtccaggctgtgttagccaacatttagttttcacactgtcaagttaaaagcatcatgcccagccctgcagctgcagtgatgggtggatcctcggggtgctccctgtgttgcagctgtaccagcgttgattgcagacaagccgagtggggccctctgtgcccctgagccacggggcaacagagtaagaccccgtgttactctggaggagaagactctttgtgcagttccaagagatgctcctgcttcatcctgcaacagccgccccaaatgtgccacttctaactgtggtgttgggactttctcttcttgcatagtttttctttgtgtttcccaaaggttctggtcacttcctttcctttgtgtctccctcctcatcccctcctgacctcactcactccacctgtcttatcgagccccccaagcccagaggtgtccgctggaatcctggctctccagcccaaggtcaccttgagatgccacagtctgtgagtgggaggggaaatcggtggggtggcaggaggccgcccgggacaaggttgcaggggcaggtgcgtggcgtgctcagagctcctgggtgaaccarggagaatggggaaggccttgaggagcctggcgacggtgaacccggcaggtccatggtctccactgggagatggggaggacccgctgggcaggggagacagtgcttctgggtgagaaggtttaattctgtaaggatatgaattctctctgaataaacctatacatgtaagttatcacaacagcatattaacaattttttttkaaattaaacgaactagctttaaagtccaggttcagacacaaacatgagactaaacagaaaagttatgaaaaagagaagttgtgtgtggggcgttgagtcttgcacactcagtgctttgcagtgatgggacacttaagccagagtggggaacagacgggcagattgaagggaaagaatagaaagtctagaaatagacccaaatgcgtatgggtatttggtatatgataatgatgacattttaaatcggtggggaaaagatgtattattcagtaatgatttggggacaactggccagacatttggaaaatacatagctgggtccctcccaaactccttaccccaaaataaaatccagatggcacagagacttaaaaatataatggaattttacaagtactggaagaaaacgtgggggaatttttaataattttgcgatggaattaatttttttaaggaagacagcccaatatctaaggaaattaaaattcacataactttaactcaccagcctgactcctgggaagttatgtgatggatgttcaggcctgggtgtaaagaaccaaatgcgcaatgattctgtgaaacattatcataggaaaaaaccgcgagcgttctaaacacccttcaagttgtggttcatcttcaagacggagttaggtagatgggctgacacagaaggacctcaagacattttgaaataaaaaaggaagatgagaacagctggaatccatattagaagaagatgaacctggaccgaatttctttcggagacaccaactcctgtgctcatgggtgtgaaaggcaagactataaaggttttcaactgagaatataatgtttcatgactttagggcggagaggaaggttttgagacaggacacaaagagtgctaattgcaaaggaaattactgataatttcaactatattaaaatcaagaataactcttagtaaaaaagacaccgtaaagagaattaattaaaagacaagccacagaatgggagacaatattttcaacacatgtaaatgacatgtaaccgacaaagatctcacgttcaaaacagagaggaccctgacaaatcactgagaacaaggcaacgaaggaaacatttgcaaaacatttcagaagttctaaggagaaaattcaaatgactgagaaatacgtaaaatggtcttcaacctaattattaaattggagtgatgaagacggaagccgtatgaaattcagcagctcccctactagacgggcaaaaaccggaagcaccagctccaggtgcagctgcgacgtggggcggggagttcctggaagcacctggctgtgatacacaacctctgagctcctcgggggcttggacagcaggtgggcaggtgtgctggaatgtggagaggtgtgtttgctgcggctgaggtttcgctccttgccctccacgcagcagaagcacacgtacgcctggtcagggagatgcgcaaggaagcgcgtaggtggcatcgtttacagtctccccaggctggacgtgacccacatgcactttggtggtggaggagaggaagattattttattttcatacaatggaacagtggaatttagccatgacggggcgactcggatcatctcacagacatgaagctgagtgaaagaaggaaggtgtgaaagacgacaggcccygtgaatctggtgcagaggcaggcgcggccrtgagcacagcttccatcaagtcggcggtggctccccatgaaggtgcagcaggggtgggggttccagctgctggcgggactatttcttgagtgctgtttggatgaatattcacttaatattgtttgctatacgatgcgtttttgtgygcatttctctattatatctatgaggttaaaaaaagcaagaatgaatctcagttgtgtttcaccagtgtgtgtgtatgtgtccttgtgtgtgggaagacattctctgaggcagcggttatggactgaatgtgtctcattgaactcagtgtgtagaaggccaaacccccaggggatggtgctgggaggagaggcctttgggccgtgattgagttagatcacccgtgagggtggggctcccacgatgggataggtggcctttgggcggtgattgggttagatggggtcttgagggcagggcttccgtgaagggaccagtgctctcgtaagaagaggaagagtcctctctcctccaygtaaggacgcggtgagaagccaggcggaggccatcaccagagcagactgtgctggcacccccatcccagacttccagcctccagaccatgaggacgtttctgtgtgagtcacccagtctgtggcaccacggcatcctcaccaggttcatctgtgctgtggccaccttggattcgtctgtactacagcaacgttttgtgttgtagctttgcctttgcttaactttgtaaaccaaatattttaggaagaaaaagaggtttagtgttcctgtttgccaggaaaatcacaagggattatgcgattgtgaatgaactaagggtcaccagtgcaggggctgcgggaaactgatgtgtgacrtgctctccactcatcctggctccattaccacactgaagtggcatccatgagtttggaaatcactaaggcaaagaagtaagggctgaactcctccaaatgttcctgactatgaattaagcctcacgggttcacttctgcctgttggtgtttggtctcggcccgcgctatgtgtcttgcttctgcctgttggtgtttgtttggactcggcccgcgctgtgtgtcttgcttctgcctattggtgtttgtttggactcagactgcgctgtgtgtcttgctgttgtgggaatctgtgcatcgtcctctcttggtgactcctgagccaaggctgacactccactcttcgagcaaactgaactatagcatgattgtatctgctgctgctccgggagggccctgtgggccgaccaccctcacctgcccttgggccagcccttgcttcctctggaagcttcttgagcttgagttgtgggattgacatgtacctggaattgttggttttggtatctgtcattggagacaccatccctaccccacgcatgacctgggagaaaacggactttgacgtttgattgttttcagtgttcactgggagggaagagaagtcaggattacttttcctctggtgtgaaagtccctggaccctaaacacaccctgttgtccacaggtggtgccgagtcccacaaaggaacctggaatccagctgagtgggcacgtgctgcctgtcacggcccttcatgtcctgaacatctgttgagaggaggcgggggtgtcaccttaattccatcttggacaccacagtgacacaaagtgcaaagtgccgtgcccctcatccccacagatatgtggcatcccactggtctcctaaccacccaacgccgttgctcctgaccattggaaacgctggtggggctggagcacctggacagtccagtctcgttctagtggctggactggagtggggttgccttgaacccgtcttaggctggaaatgcccccagcagcagtgccaggggaactctcactggggcctgccctgggagccccggggaacacttgtcagttcagctctgaccttaaggtgggactgccccatgcccttggcccaggagtgggagctgcaggaggagcccctcatgctacggccctcccgctgaggggctcccctgggggcctcaaattcagcatcaggcgccagtgaagactcagctcctctggaggggaccccctccccaccccaccctcctgcactgcagcgctgcccagacctgggtctgcggagacttctgtttgcctctggcctgatgaaagcagtgtggaaaccaacctccctcctcctccccagatctcttctctttttggggggttttcatgctaacttactattttctctaattaagaagcaatacatggctattatgaaacatttagaaaatgtataataaatactaaaataatgttaccgttctgatttatatccttccaagtccacttctctctgtgttctaaggatgattctcagacacccagcctgctcctgtgtctgggccactctgctgggggcatgttgttgccgacctggcctgtggccttccctgtgagattcatcctgggagtggtcccagaaagcagccctggcggtggagtggcyggagtggggcacgccatgctgggcttggcttcaccctcagcagtgaggccctcttgctgccctgctgagtcggcacctggcctggcccagcatcctcgggctgacgatgatgccgggctgagggcctgtgtcctgctggcatttgccctgtgccgtgtggctgggtagcatggccaggagccggggtggggcaagaccgtggcttgtcatttccaaccctctgaggcccctttgtggatggcagcaggggcttcagcactgcccccgctctcggctctgctggtgctcgtaccccggcacctgcgcagagaggtcagctccctggctacggggcagccttcgtcttcactgcccgcttggctaacagcttgacgcagcccaccactggcccaggccttggagggatgtttgctttccaggggcctggcaggacgcaaggcaggccgggtacccgtgcaggtggctttgtttcctggagaggtggggaagaggctctggcagcgggagcaagctgggcgggtcggccttatcgggccgcgtgggcagcatgtgtggctgagccaccgggctccctggggccctgctgcttctgggctgcccagctgggcaggtggtgccgccctggcctgagtccgtcagggcctaattatggagacgggtcttgtgctctgtagtggttattagctgccttcctctttttttttggtgccaaagaattccatttggggaatttatacagccaattaggtatttagctcaaggcaattaatggctggaatgcaagcattagctaaaacctaaattggaattcatacatccacgcttttgcttaacggtggaggctgcagggaggcaccgagtgttgtctggggagctaggagaggctgcccaggcccagagaggaactccagattggctgtggattcatggctctgtccttgcttgggaaggaatgtttcagtgtttcagagcaaaaattttaaatctgtttgacaatcagaggccatcctggtcctgcctggagctgctgttggcctgccccacctggcatcctagctgcgtccttactgggcacgtatgtcaccgccttcatctctttcaaagccacccgtgggcttctggtcatattgtgatgaccctcgaaagtgacggatgccgtgaggccgtgggaacaggagctaggaggctgcaggccggccgccttcagtccacagaagccagatttgaggtgggttccggatgtcatgggtgccctggacaggtggctgtgtgacagcccagcgtgcctgatggtggacagaggctggggctgccatggggctgggcttctccccagacagggagcagtggagaattctcaccaaaaatccagatagatgaaaccaaacaacaaaacttactgcttttctcatcaaccaagtaatctctgaggaaattacaccagggaccattggattttcaagctgctccgtgtgtccatggcagcccaggcagggtccaggtggggtctgcccgccgggggcggctgtggcccaggcagagtccgggtggggtctgcccgctgggggtggctgtggctcgggtgggtctccgtgtgtccattgcagagcctgggtggggcctgcctgccgggggcagctgtggcttgggtggggctccagctctcacgacagactccatcgtgagtgggcccagcgtggtccgaccacagcaacacctcatactggcctgggaatttccacattaaaatatagttgaaagtattcaatttaatgtaaaattaaaatgtactttttcttacctatagcttatagattgggggtaatttttctctgtctctcacacattcaggcacacacccaccccataaacagtccctcaacctctaagtggtttgcaaggacagaatgtgcccaggaagacctggggcgagctgggaatccggactttgggcaactgtgtgttggtgggctgggtggggcaggagcctggggtgctggggcaccagggtttacctgcccacgctgagtgtcctgggttctcacgtgtcctgagttctcacgtggggtggtccgaaggctcacctgggcgcccgggtttacctgctcatgctgagtgtcctggcttctcacatgcggtggtccgagggctcacctgggcgccrgggtttaccttctcacatggggtggtctgagggctgacccggaggcttctgagcactgacatggtcttgccagtgtccactgatgatgcgtctgctgctctgtggctcacggggacaggaggaggtgggagcaggagccatctggggcaaaggagggacaggctgacttggggcagagcrccctctcagggtctcctggccccaccaggcagcatagaccccaagatgcggcaggaagctgttcccttgatgagcagcaggcggctgtctgcgttcagccctgcacctttgcccactcattgttggaggacggccccgttatgggctggggcagaggcgaggggtgggtggagattagggccagacgaacctgaaggccctccagagcctctgacctgttcccgagaggccgcggggtcactggtccggctcaggctctgccaaggagcctccttggggtttctggcgcctgcactcagggacggcaccacctgcgatggaggctgctgtgcagtgtagagtgtggtggaaactccctgcctgggttgcagacggggggatttaattagggaagggatccagggtgaggacagtcagggcagaggtgagcaggtgggggcgcttggctcttcctttggtggtgagaacaagctcagggccgagtcagccacacaaggcttcaggctgtgcagataaggaagggctggccagcctcggggacagggcagtggggctgaggggctgtgtcacccagggcctgccccctctggagacaaagccctgaggctgggacatgcctgggaggaggctcttgcccagcgagggtgaagggcatccagctctccccagccctcctggttaagcccagctcaggcccttttggggagaagtcacggtggcaggtctcacggtccacacgctgtggtgggcttgctgctgtgcagagggccgtggtctggcatggtgccccgccgggtgcggccgcgttttcaagaggatgcagggggagaattgttgatgaaagagagcgggccctgagcaatgaacttggggtgtaagctgcacagcagtgaggggacactgggggctttcttgggatcccaaaaatggccgtaggagaggacctggcttctgtgcatgtgacgcaggccctgtgggtcttggggtctgtgaggagcactgaggacgaggaaagggagacaggctgaggccatctcggttggattccacaggaaaggccgcagccagttttcctgagacgttctggcgagcagctgcacggtccgaggctttcacttgcttttcattttaggctcactctgggtctaggggggtcttggtgctgtgtctaagctgctctaacagggttttggcctgggactctgaggctcggcctcttctcacacaggtggtagagagattcctgcccccagccgggagggcagcgtcaggtttatcaaactgacgtttgcagcaggtgtggagattttgagtgaagtcaaatcaggttttcagrgagaaacaaacactggccgtgggtggggacttggggacccagtggggctgcaacaggggaggaggcgcctgggcgctggggctcacggccggctggggctcacctcagcttccyragcacagtctgtgatggcactggcgtggcctggcctctccaggacctgttaggaggtgacggtggacaggcctgtgaacattccgctcttgctggagccaggcgaggctgccggaggggtgctgggctgcagcatccctggggcaggtgcctgtctccctgcctgttggaggggtgagtggcagtgcccacaggccccctcccttctctagcacctccccgtgcagtgggagagggcaggaccctgactgaacagggccatcctgaaaggaggagaaggtgctgctggaatgacacccagagacgggtatgagcccagacacccaggacttggggtaggccagagatgggtgtgagcccagacacccaggactcggggtagggtgccacatgggagcagctctgcccctggccgtcccaggcagccccgttgctggtggccaacagtccactctgacaccgtcacccagacaaggacccccagagcctcacatggtagaggaagctcctgtgtgattcacctgctggccacaggccttggaaccctccctgctgagtcttacttttaggaaggacctcatgggcacccctggtaggaagaggtggctcgcccaggtggggacaagcagctcgcacgcttggcaggaagatttgccccacgccgctcccccatcaggaagatttgctccacgctgctccccctgttgggaggagtcgccccacgccgctcctcctgcttcctcccctccctgaggcatcctggtagccagggcagcccaggattcaacctaagagctgcatagcgtgactgaccaggcggcgggcagcccccaactcttacagacccgtcagtggggaaacagtctcgtcagttctccgttgattcattttagcctttacccagaagtcaagtttgtctgctgatttgatataaacctacccttggatttccggcaactcaggcaagaggtggcaacttcggagccttctgtgccttcggggagaagccatgcctggcgctgccctggagccgcgggagccsctgggctgagccacggaagatgggcttggagcgtcctccgcagcctccgctcctgcctctgcccacaaagacccgctcgcccagtgacctgtggccacctagtgggaacaagacatttgcaatgtgcttgttgaccaggttaagagtcattctggtttaaagggaacaaaaaaggtgtttttttgcttttttttttttttttaatacttatttgtgttcctgaaaaggcttctgtctgctttagtaccgtctttctaggccaaagactatgctctagatttataaatatttcttttaactcactaatgtgctcatttgcttggaggccctgtcctcctcttgtccgtaaggcaagaatggtggcaggagataaaatctgttttaacttctccaaaaatggaaacgtgtcattttattttctgacaaaaaaggaaacatacattcccttccgtgcctttttcatatgcatgtttcctgtaactagaattaaagcacacaggagaaaaggaagcaggcggaacgctgcatggctgggtggtgcagaagggtacaagccacaaaatcagaatcacctccttacgatcctaaagccccaaaataatcatggtgaagaacattcgggtaaatgtctgtttagatgctcttctgggcacacacataacaaaaatggaatcctgtagttctgcaaatttttcttatcacttaccaaatctcttactcctgaatgctgagtgggcttccactgttgaatactgatacgtagcatccatggcatgcaggtgccattatctagtgaaccaaccctctagtggagaaaaggtaggttgcagtgtttcttcatcatgcagatgataaccatgaataggtaactggtcactttcagctctcgtacgtttgcacatagagaataccatgcatttcagggttctcaggctcagcttctttacacattgtatgatgacattctcagctcatctttgctctcagatttttaaccatgtcaggtaatcagagaatgatttccttgctgccaccatcaccactgccatgaccattactatcaccatcaccaccactgccaccattgccatcaccatcaccaccactgccaccaccatcactatcaccaccaccaccactgccgtgaccatcactatcaccatcaccaccactgccaccactgccatcaccatcaccaccactgtcaccaccatcactatcaccatcactatcaccaccactgccatgaccatcactatcaccaccaccaccactgccatgaccatcactatcactatcaccaccaccactgccatgaccatcactatcaccatcaccaccactgccatgaccatcactatcactatcaccaccactgccatgaccatcactatcaccatcaccaccactgccatgaccatcactatcaccatcaccaccactgccatgaccatcactatcaccatcaccaccactgccatgaccatcactatcactatcaccaccactgccatcaccatcgctatcaccatcaccaccactgccaccattgccatcaccaccaccatcactgatcaccatcaccatcaccatcaccaccattgccatcaccatcactatcaccaccaccaccactgccatcaccatcactatcaccaccaccaccactgccatcaccatcactatcactatcactgccatcaccatcactattaccatcaccaccactgccaccactgccatcaccatcactatcaccatcaccaccactgccatgaccatcactatcaccaccactgccaccactgccatcaccatcactatcaccatcaccaccactaccatgaccatcattatcaccaccaccaccactgccaccactgccatcaccatcaccaccatcactgatcaccatcaccatcaccttcattgccatcaccattactatcaccatcaccaccaccaccatcaccatcactatcaccatcaccatcaccatcaccttcattgccatcaccattactatcaccatcaccaccaccaccatcaccatcactatcaccaccactgccaccactgctatcaccatcactatcaccaccatcactaccactgccatcaccactatcaccatcaccatcactaccacccctatcactaccaccagcaccaccatcactaccacccccatcactaccaccatcactactaccactgtcaccaccaccacgactaccaccacccccatcactgccatcaccaccaccactaccaccaacaccactactaccccatcaccatcatcaccaccaccatcaccactatcactaccatcatcatcaccgtcaccaccaccaccttcaccaccaccaccaataccactgcccccaccaccacccccgtcactgccatcaccaccaccactactactaccaccatcaccactaccacccccatcaccatcaccactatcactaacatcaccaccaccactgtcaccaccactgtcatcatcaccaccaccttcaccactactatccacccctatcaccatcaccaccaccaccaccctgtcactatcactaccaccatcactactgccaccatcatcaccacgaccacctccatcaccagtattaccaccatcaccaccaccattgttaccactatcattatcaccaccaccgccgccactgccaccaccaccatcattaccacatcaccactatcacccctattaccatcactaccatcaccaccatcatcaccaccacacccatagctactaccattaccaccatcatcaccaccaccactgctttcactatcaccaccaccactaccatcaccatcactgttgttgaggaagtctgcctgaagctgtgctagaaccctactgcaccagtcctgagataccacagccaccacagcctctgatttgaagcccgaatggaacggacaatccatctagcttttgggagctggacctggagcatttggtatctgaatgtcaagtctttggagggtgtgttcgaggtggcgactttgcctaccagaaggcagctttgagcatgagtctctacctttatgggctgtggccacacaccatctgttgttgcaactgaatttgggagaaatgtccactcagaaatgaggactcattagggtgagaggccaggaggttgtcaggacccagtaagactcatgtgaggatagggaaattaagatattttctaactgatttagtacagtgtgataggaaatgcagatgcctcaacatgatgtcacagaaccccaaaccaatgcctccctgggtttctcatcaataaatcagtcagccccaggcctcagtatttccacgttgcaaaattatttccacattgcagaattatttccaaaagatctagcttccttgtgggcactacgaggtgcaccccgtaaataagcctggagctccacagactgggccatcttgttggtcgttcagagacttgtcttacaatcagtacaaactgattttcatatctttactttctatgtctatggaagatgcatttaatatgcaatctttatattaatacacatcatgacttgatatttaaaagaattagagatggtcatgaacttgagttggcaagctttatctgtaaaggaccaaatgataaatatcttggctttgaaagccacaaagattactgtttcctcctcctcatcttactccttctcctcttcttcttctcttccttctcctcctttcttctctcttccccacttcttctctgtccctgtctccatctcatttttcctacaacccttaaaaaaatataaaaaccattcttagctcaaaggcttgtgagcacaaaatatctgagaaaggtctcagtcaatttagaaagtattttggcaaggtgaaggatgcatccatgatacagcctcaggaagtcctgagacttgtgcctgaggtggtcgggggctgaggcatgtgcaggaggtggacgggggcctgaggcatgtgcccgaggtggtcgggggcacagtttgcttttatacattttagggagacatgagacgtcaatcaatatgtgtaagacatactttggttcagtccagtaaggcgggatgactggaaatggcggcttccaggttagaaatagataagagacaaaagtttgcattcttttgagtccttgaccagccttccagtgaatacacaattgagcctggctcagtgaatctgcatttttacataagcaataggggagagggagcaatgagatgcatttgtctcagggcagcctcagaggggtgactttgaacagaatgggaggcaggtttgccctgagcagttcccagcttgacttttccctttagcctggagattttggagtcccaaggtttgttttcctttcccaggccctacatgaaaagacaggtggggtaggtcccggggctctggtttgctgacccctggtcagagtgtctttgaggaagtcactatcagtggaaatgtcactaaaccctatatgctaatcagctgggcatcagcctaaagtgtattttcacacagcacgattcatcattagcaaattccaggaaaatcaacaacgatcagaactgaccttctcttggctataatgatctgtttgcatcggatcagatttcctgtggggaacaactagaagtgctgggtaaaatccacagaatgcctgctttggggagctgcggaggcaaccgggatttgagaggccaagatcctgttaattagcctgttttgatgattccacaatgtatatatgtgttgaaacatcacaccgtagcccataaatatgtacaattatttgtcaattaaaaataaaataaaactttttcttttttttttttgagatggagtcccactctgttgcccaggttggagtgcagtggcactgcaacttctgcctcccaggttcaagcaattctcctgcctcagcctcccagtagctgggattacaggcatgcaccaccacgcctggctaatttttgtatttttagtagagacggggtttcaccatgttggccaggctggtctcaaattcctgacctcaggtgatccgcccacctcagcctcccaaagtgctgggatgacaggtgtgagccacagcccctggccaaaaaaacttaaaaaagacccatcggaggggcactgttagggagcccactccctgcgggctgcctgtctcctgggggcatttgtgattcctgtcgaaagaggctgagaaaccaggcaagggctgtggagaagaggcagtgaaacccacagagcacttggcaacctcatagggtcatcaacacacaaatagatgtttgcattgcaaaggttaccaggccctgaggagactggatcccaaagagaaagtaggtacagaggcaatcagcacctgtggctttcacctctgacacatttgccaaattcttgagttgaatcagaggctgatcagaaagctatggaaaagcagagcaggatttctggcagtctcataatgctgaagagatgaaactggaattcaggaacttctaagaaagaggggccatcgcacacatcccaggtcccagccccggatgggtcatgccataggtgtgaggataaaccccaggtgactgagccttccaagaatgatgggtctgtcttcttgtctcaggcctcccttgagttaaggggatctaccctcgatctggctgtctagtgaggaggaaggtaagaagatagactcacccagagtctctgcagtttcatatgtaatgtctgaatttcagttgtcaagaagcaagaccaagacacaaaaacagatgacaacagtacacccacagatagttattatacttgttgcagtcaaattttaaaataactgtggttgatatgttcaagaaaataaagggtaagtggaaaatttcaccagaaaaattgattctataaacaaagtaatcaaatggaaattctagagctgaatctaataactcaatagatgggcatcacaaaacattgagtatgaaggaagagcagatgagtgagctggaagaaggtccctgggaaataatgaggcagagtaacagatcaaaactgagagaaagtacaggatggagtgtatgaggcagaggagatctgttggaaaggtctatatgtgtaggtggagtcccagaagaggagaaggaaaacagcttagaagcaatgtttgaggcgatgagagctatgatttttttcaaacctgaagaaagacaccaaagcttggattttaaaaaatctattatatagctattttaaaggtaaacaacagttgaatattggcagttttgtgtggttagttcaacctcacagaatgaacacaaagaaaaccctacctctgaacatcactctaaaattagtaaaaaccaaagtttaagagaaaatctggaaagcaagcagagaaaaatcataggaaattaatctctattgatgaattgtttcaccagaaaccatggagaccagaagtgtgatgaacctcgcatgtgatggaagaaaacaccccatcaattcaagttctctactccctggaaatgtttctcaggtataaagatgaaatcaagacgtgaccagacagacagaacttgagagactccatcaacagatgactcttaggaaaagacagacagaactcgagagactccatcaacagatgactcttaggaaaagacagacagaactcgagagactccatcaacagatgactcttaggaaaagacagacagaactcgagagactccatcaacagatgactcttaggaaaagacagacagaactcgagagactccatcaacagatgactcttaggaaaagacagacagaactcgagagactccatcaacagatgactcctacgaaaagacagacagaactcgagagactccatcaacagatgactcttgggaaaagactgcaggggcttctggcaggaggaaagtaaacccacatggaaaccaggaaacaaggcaggcagggatagcagtgggaactatcaatgggttggtaaatcaacacgaatattggtggcacagaaggtaaaggagttagtgttctcaggttttggcattatccaggatgcgataatgcgtgttacactaataagtcagggatccatgttcttttttgtggaaagaacatataacatgagatccaccctcttaacattttaagtgcatggcacagtattgttgatgacagccatgatctgtaccgcagatctctagcactcgttcatcctgcagaactaaaacttgatacccattgattagcaatacctcaccctgccccgacccagcccctggaaaccaccattcttctctctgggtctacgcattggactattttagatgcctcgtctaagtgaaatcatcagtgttatcttttctgtgcctggattacttcgctcagctcatgtcttccaggttcatctatgctgtcacttacagcaggattttcttcttttttaaggctgagtaatgtttcattgtctagatataccacatgtaaaacatccatccatctgttgatggacatttgggttgtggccacatcttggatattgcaaataatgccacagttagtgtgggaatgcaagtatctctttggagatcttgattttgactcttttgggtaaaaacccagagtggggttgctggatcaaatagtagttctatttttaattttttgaggaacctgtatactgttttccataaggaccttttgcattcccacaacagtatacagtcttcaccaatactcatcttttttttttctgataataggtatcctaacaagtttgatatgatagctcattgtagtgctgatttagattttgctggcgattagtgatgtcgagcatttttgttgtatacctgcagtccatttgtatttcttcttgtgagaaatgtctatttaggtccttttgcccgtttaaaaaatcaggttattttgtttttggttattgggttgcagcagttccttatacattttggacattaaccttttaaaaagttatacgatttgcaagtattttatcctgttctgtagattgccttttcactgttgattgtttcttttgcagaaactttagtttgatgtagtctcccttgtctgtttctgcttttgttgcctgagcttttggtgtcatatccaaaaaataattgctaagaccaatgtcatgaaggttttttcctatatttccttctaggcggtttacaggttcaggtgttatgtttaaggcatgaatccatttttagttgatttgtgtgtgtgtatggtataaggtaacggtccaattttgttatgtgcatgtgtgtatccagtttttctgacaccatgtgggatgtgatgtgtgttgcaccatgataaatcaaggacccgtgttattatttctagaatagccacaaaaagaatagctaacaagctaagaaagggaatcaaaataataataaaaatactccatccagaagaaagcaataaaggataaaaggaaaaataaaacagatgagacaaataaaaaaacaaggtaagatagtcgatataaatcccaatatattagtaatttcattgtaaataaatgagataaatattccactcaaaaattaaagattgtcactaaaaaacaaaaccacactgcttgcaagggaccaccttcaatgttgagatataaaagtttgaaacgctggaagagaatacaatgaaaacactaccctaaagaaagctggtatatctaaactaatatacaaagtagatgttaaggcaggaagcattttccgagataaaaagggccataataaatataagggttggtctatcaggaacacacagtaattataaatttgatgcacctgatataattttcaaatgtataaagcaaatattgagataattaccggagagaataatgcacatttttatgcatgtttgtttttattattggtgtgtgtgtcctgtcatgtatttagagagacaty

SEQ ID NO: 97045 - DNA, 17816 bp, Homo sapiens
taagaggaccaccaatcttgaacccaaatgtggtcaccaaagctgtcctgtgacttggctctagccctgctctactgtggtctggaggcagtcctgtcttcccatggacctacctagtaaaccagcaggagctcaatctgggacccacagggagctataccagtccatgcccttggtaataggcctgatatctgaagacttgactgtagaactagaagtggccccatgacctggctccagtcctgttcaatcagggtatcagaggcagtccagttctcctgaggatccagcagaaactgcatcaccaacctatgccttgatagcggcctgccaatcagagattcagctgcagaccaggcagcagccatgtgatatggctccaggcccacttgactgtgatccagtcaagggatccagcaggaaaaggtttgtacctgctgaaaccaatctataaagacagaaagagattgggcatggtggctcacacctgtaatcccagcactttgggaggccaaggcgggcagaccacttgaggccaggagtttgagaccagcctggacaacacggtgaaactctgtctctacaaaaaatacaaaaaaattagccaggcgtggtggcacatgcctgtgatcccagctgcttgggaggctgaggcaggagaatcatttgaacctgggaggtggaggttacagtgagctgagatcacgccactgcactccagctgagtgacagagcaagactctgtctcaaaaaaaaaaaaaaaaaaaaaagaagaggtatttgcttcttcatagacattaatgaaagtctgtagatcatgaagaatcagcaaatatgacactaccaaaataaactcataaatctcctgtaatcaaccccccaaaaatagagatctacaaattgtctgacaattcaaaataattgatttaagacagctcagtgaaatttactagaatgtatatatcaactcaataatatcaagaaaatagtagatgaacaaaactaaaagttcaataaagatacagaaataataagaaccaaacagaaattctagaactgaagaatacaatgaataaaatgaaaatgcaagctgggtgccgtggcggactcctgtaatcccagcactttgggaggccgaggcaggcggatcacttgaggtcaagagttcaagaccagcctggccaacatgccaaaaccccatctgtattaaaaatacaaaaattagccaggcatggtggcatatgcctgtaatcctagctactagggaggctgaggcaggagaatcgcttgaaccgggaggtggaagttggagtgagccaagatggcaccactgcattcaagcctgggtgacacagactctgtctcaaaaatatataaaaataaataaatgaatgaaatgaaaatgcaatagagaatttcaattgcagacttgatcaaacagaagaaacagaagaaagaatctgtgaaattaaagccaggacatttgaacccggaaggcagaggttgcagcgagccgagattgcaccactgcactccagcctgggcaacagagcgagcctccatctcaaaaaaaaaaaaaaaaaaaaaaagacagaggttgctctctgaatgcctgagggattcagggctgagtccaccaacattgtttcatgaaactctactcagccagccagtggaggcatcatgtatacagtcagcactccacatatcctcacttcctgagcatctacagtgcaaaccgacacactcatcacactcaaacagcacatgccgcacgtcaacccgagcctccctcacaggttgctttcatctctttttctctcttcactgcaagttttttgcccaaatgcaattagacacttttttttacagagacagaaaccaaagagttttaactaggcaccactacagcagtggctgttgaccatcgtctcctggctggaaccagggaatcctgtgggtgagggaggagcaatgcagcagccccagctgactcactctggggtggatggatggatttactcacttacttacttatttattatttgattcttgttctgttgcccaggctgcagtacagtggtgtgatctcagctcactgcagcctggacctcctgggctcaagtgatcccacctcagtctcccaagtagcaagtagctgggacttcaggcacatgccactatgccagcgaattttttaaactttttgtagagacaggctctcaccctgttgcccaggctggtcttgaactcctggcctcaagccatctgcccatcttggcctcccaaagtgctgggattacaggtgtgagtcaccacactcagcccactcagttttgagtggccatttgctttgactcagcaaacacttctgatggtaacaaagcaccaactgggtggctggtttcaatcctactcttgccacccaacaccgcaacattttatcaacctggagcaaatgctctcgggtcctgaggagctggccacacagcccattttgctggtgggacagtgggaagccccgccctcctcccatcccacaccacttaggcaagagctgtgcctaggaaatgtcacccgtaactggtccgcacagaccctgtcttctaaaagggtgctgtgcctccaccagaccccatgagcaatacatttgtcaagcacacgcaagacatgccaaggccaaggcctgactgatttgacagtaaagacacaatgagcccctctcattcagaccttattactcacagagtgaaaataagagaagcctgaggtggcagctccctgctgtcctggtgccacacactaaaaaggacaacactgaaacaaaaggggtcagagagcatgcgttgcgggacacccactgtggaggagccccttgacactgcagctgggtggcgtcctcatctgcagctctgttttgagggccgggggcagggagcctcaccctcaccagggccagtgaggcaggaagtgaggaacagtctcgggagacagacggagtgagcggtggcctgggtgcagcctgatgttctgggaggagcaggcttaggtcaggtgctgtgtgcacctctgcatggcctatggggatcctgcaatggctcagggccccacagcagagctgtttctccgcccacacaacagacatacaacctgacacatgaaaactcacagagaaacacagaaaggcacatgtgacaaagagccacacaaaaggcatgcagcaaagccttttgacacacgtgcgcgcgatgcggcgcgcaacacacacacacacacacacacacacacacacacacaggcacccactccttcaaaccttggtgtttgcccagacacagctgtgtcagagacaggggacctgcagctccccaacacacaccagtcaccccacactaacccaaggtgtcaccagccagcctggtggactcgggaggccaagtggaggtggacagtggccgcagagcaaaggccttcggtggataccacccgacgggaagagccatggggcccatcgtgtccacacacacaggggaaacgcacgtctgcgaaccagctcccccattcctacacatatatcacccatccctggggctctggaggatgagacccctccttccagaccaggccctccctgaagacccagaggtggcccaggagtccccatgcctgagtgacatactgctcatgtccatgaaaaagaaaaggaactttgtgtgtgtgtgtgtgtgtgtgtgtgtgcgcgcacaatggaagtttatatatatatgtataaagtatatatatatattcatatatatattcttttaagttctggggtacatgtgcagaacgtgcaggtttgttacataggtatacacgtgccatggtggtttgctgtgcccatgaacctatcatctacattacgtatttctcctaatgcgaaaggaacttttttatctgaggaatgtgagctccctttaattatctggcccagagaggcactggaatgaaacagcagtcacatcccactcctacttgagctaacgacctcttgaagccaattgctctgtgggttccagactgacaccaagtaggcataaaaagccatacgctggacaccataactcttacccagtagtccaacaccttatagccagtcactaagggttctctctggaaagcagtcagaattcctgctgacttcatatcagcccactccttgtccccttcagtctttaaaaccttgcttgtaataaggctgaatgaagcactcccagggcaacttggtgtgtcctgggcagctctctcagccttggcccagacaaactctctatatgaactgtggttcagtttgtttctttaggttgacatccacattaggggagcagtgttgctgggctggggaagctggttcaggtcagacgttgcaccaagggttggagaaggggccttcctgcatcagcacccggacaaggcagaggagcaggtgtccaaacccaggcctggcctgctcctgctgtggctcacagcccccaccccacctggcagaccccggagctggcgacagtgttgcccagctggccacagacatatcatcacgtggggctgccctatatcctcccagtctccacacagacactcttcatggactgggggactgagggcagggacactggtgaaacaggcaggcgtcttcacccagctaatcatcccactcaccacctccgggggaggtgacagtgaccaagcccagccccagctggctcctggtcactcactacagactcagctcccacaatctcgagtcccacctccagctcctgccattctgagggacctggaggccagggtgcccggcgcatgaccagctctgggttgtggaccgccctccacggcagtggcctgagcgcttgtcattattcactttattcatgcctggtttctgtctggaagggaccacaaggacatggcgtgcaggggagccaatcctgccagggactgaggaaacagatcctggagaaaaccagacactttgctggcacttcagggggaccccagttggttggctcaacgccccctcttccccatagccaattactaaccaatgttctctctggaaaccagtcataattcctaacctggtcaaagcagggtcatctcacacagcccagccacccagcaggcagctaaagagtgcctgatgaaatgcaagtctgatcgtgtctgcgtccccaagcccttccgtgccccctgctgctctatggacaagcccccagcagcctctgtaatgcacagcacccgcccttgtctcctgtgctggcttccgcagcctggccacactggtcctctcgcccacccacctgacctgactctggcagggcctttgcaggagccattcctccacccgagcccctcctattaaagcctgttcctagacggttcagccccagccaccagaagccccccagccccggcccagcagctggcctgtggagcggggagagcgcagtctgggctcacgggctgggggccacggaggcccagatggggactctggctccgactgtcctgacccagaggctctagggcggtcctgtctgtctcaccccgggggcggggaggacgcagacagaccccagcgccactgctcggccgcggatggtgccttagacccaggtcctgtgggctctggcccgagacccctgcctctggggaggccggtgaccgggacagtccacctcgcaggcgcgccggcgcggagcccggacctcggcccgcaatgactcagcaagggccggtgggattctccgtggtcctgcgatatccagacggcggagtctcgcctttaatgtcgcgcggggagcaggcaggtgcgagcctgggctgagcaaaaccctccttggagtctccgcagaggagcggggcgcgcctcctgaataagcaggcggcggggcgcggggcagggcggggcaggcggccaggccctctcgggactgtcgtaaaagggggcggagcgcgccgcgcgtgggacaatcgtaaaaggggcgggacgcgccgcgctcgggatgtcgtgaagctgggggagctcgtcgccgccgccggcggctagcgggcgtccgcgccatggagcgctacgcggccgccttggaggaggtggcggacggtgcccggcagcaggagcgacactaccagttgctgtcggcgctacagagcctggtgaaggagttgcccaggtacgcaggcggggcgggcggaggcctgcggaggcggcttcgtttcccgccggggctcaccgcgcccccctacccgcagctctttccagcagcgcctgtcctacaccacgctcagcgacctggccctggcgcttctcgacggcacygtgttcgaaatcgtgcaggggctactggagatccagcayctcaccgaaaagagcctgtacaaccagcgcctgcgcctacagaacgagcaccgaggtgcgcgggggcagcgggatgaggtgccgcctcctccgggtcggcgcctccgggcagctcttggtatctgtgcagatcagctccttccttggaagtgttcggaagaggtctctaagattgacaaaatcaacgggcgcagagactgagacagcgcctttttggtgatcartgggtccaaccagttttgttttcagttgcgcagcacccaccttcttagcagaaactccctgttcgggcttccctgtgccccacgcgcttccagacaggatggccctaggcctcggtgcctgattggcctgcaggcagactctggtggtggcgctgactgcagcagcattgcccctcagtagttggaagtctgttgacagttgtgcagcaagcgtctttcagggtcagttccctctcaggcctcgcagggcctcattccagttgcacatcaaattccwaagcactgtctcctgtggcgccctcccaaacccgaagagcttcccacttgagccaggcctgcttggtgggcttgggagccctttcctgcaaattatatagggcaggtccccctgcaccatcagtttccacctttgttatttttcccaaacttcttattttagaagttaaaacatttagaaaagctgaaaagatagtatagtgcatacgcttgtgctcttcactaaagttcaatagttaacgttttgctctagttcttgacatcccaaaatatatacatgtgacagcatagcattcaccaagagtcttcagcattcctggagaccaggattttcaacccagccatgctgacatttgtggctgggtaagtctttttggtgagatgctgtcttgcgcattgcaggatggcaggggtaccctccctagtcctgaaaaccaagaatgcctccagacaacctgggtggtggggtcaaccttggccttggattgggagcaagtgctctagaacaaaactggtctcctacacagctgcagaaggtagccccctgagaaattaactgttccgggtgtctcctgactttcagtgcayggccacatcatggtacctaacttgtggcaaattgttgctttataagtaaggatccagtccaagttcatgtactacaattggttactttggtctctttgcttctgraacagtccccaacatttattgtggcattgacttttttgtagagtcyarkkcattctaatwwtatagaatgccctgctctkgatctatcagacgaaatgcttcctcktgcatttaacctgcttctccactctctgggtttmctgtacactggactgctggtagragcctgattagaagcaggtttaatgtggcaaaaatttctcctagcrgtgcaaggcccccttccccagaaggcaggcagtgtccatctgctccaggattggtgtgtttttatcaagaatggatgttggattttggcagttcccttttyggcagctcttgagatgatcacgtggtgaatcattttctattactacagtgaattacagtcacttgaattccatcctactgggtcgtgctgtagtatcctttttatgtatgctggatttgatttgctaaaatcttaagaattttttggtctatgttcatgataaactgtggtctatagttttcatgtaatatctggtttgggtatcagggtttttgccagccttataggatgagtttcgaagtgttctctcctcttcagttttccagaagagtttgtgtagaattggcattacttcttcccctaaatgtctgggcgattgtctttttaaaattttttattgagctgtaagatgtatgyagtttactaatcccaagcgcatggctcattattccttaatgcccagactgtgccatgtgtggccagttgggggcgctccaggcacctttagatgccgccccatcattctgtgagcactttcttgctttctggttcaggtatgtgttcaggctcatcttttcttgttttctccgtgtctcagtcctggaatcggccatttttccacagagctatagttccttatagcaggatggggagttttagtaactgcctgggcccaatgctgtttgtgcttcagaaggtttgggccaggccctggttccaccagcagcaggcatgcctgcattgactttctgcttctcctgctgatttggcaggggcgactggctgctcctgcctcctttgtgttccctggtcatgtctaaggccaggccccttctgcccaggcagccagcgtggctctcttcttgccttttggttgymtatctagtggaatctggtagtggacctggcacttgtagcaatgtttgatcagtagagtgaaggagatgacatttccctgcttccctgtgttatggagctgtcttgaggggggcttttggtaaataccatcgtcgaggtgtgtacagaatgtgaagagacaggagatcggggaagsctgyaggcacagcgggagccaggctacctgcaggggagcctcaggggccctggagttccctggggactggccaccagagaagagctgcaacatcagggctcttcccaggaacagagtgttgggtttcaccttttcttttggccagggacccctccctcctggggagctgtagccatttggcacttactggtcactggcgccagctgtggggtgctgcatgttctgtttcatggtggtttatgtcccatgatcgcttcctctgtacattcccttcagaccagacagtttgcacacatctgtgtttgtgcacagtttagcaaggaccgtggagctttacttgatggctgagggtgagcccctcagagccacacaggcttatggcaccccaagctcatcccaaacttgggcctcccaggtctgcccacccttctccctctggcgctgtgcgggggctgggagctgcaaatgagggaggggctgtctaccctgaagggcagcactgagggtggagggcccgaccacacccctggtaggcagaggccccacgctcagggtcagsgaccccgctcctcctgctcctttcccatgcctttgcctgaggtggtctctgacacttgagtagatgtctcatggcctgtggccatgggggccctgaagccctcagactgcagcctccctcccgcctgcctcctccagctgccctgggtctggggctgcagctttggccccacctggccagtcttccccaccccactctttcagtgccccgcaccttctggagtcccctggagacttgccaccagataagggcccggccctgggtgacagtggggtgggaggatggaggaggctggcatcctccccattgcagacacccctttggcctggctgctctgctgggctggcaaggcaggtgcccatgggtgagggctgctgccgagtcccaccgcctgctgacgggctctcatccctcccagtgctcaggcaggcgctgcggcagaagcaccaggaagcccagcaggcctgccggccccacaacctgcctgtggttcaggcggctcagcagcgagaactagaggtactgggggcgcaggcagggtggccggcccagctctcctgtgggcaccacctggctctgctgactgggctgagctgaaggggtgtgggggctcaggcatgggtggctgtcctgggcctgagtgggacactggaggcctagtgagtcccaccaggtggctcctctttgcggataccaagtgtgctggggctgggtggaggttgagaacccaccagtgctcccctggatagcagctcctcgtgggtttgggcctccacagagcaggtggcctcaggggggtacaaaggcaatggtagggtgttggggccaggaaggggcccatccttctcccagggagcacagggacaaccagagactggcatgtaaccaacaagccgtggggcagggtgtgcctgtggagatgtgtgtgtggtcctaaggcagtcccaagccagggcattcgtggaagccccttggggcccccttcaggggttcacatggccgaggagaggcctgggtgtggtgaggatgcaccggtggtgtcagagctgctgccactggggacggcagcaggagcatgtgtttgagctgccctcacctccccgccccctgatggcagagctgccctcacctctccccctccgcgccctggccccatggcaggccgtggaacaccggatccgtgaggagcagcgggcgatggaccagaagatcrtcctggagctggaccggaaggtggctgaccagcagagcacactggagaaggcgggggtggctggcttctacgtgaccaccaacccacaggtcagtgcctgggcctgctctgccctagcccgagtgccccggggccccattccatctggggttttactgctggtccctggggagccaggctcagggtatgggggtgaagtggaaggattgaggctctggaaaggatttctgtgccattcccagcacggaggccaggcccattccctacaggagggtgagccagccagccatgggcactgcccaccctctccaggcctgctgtgccacacagggccctcttctgctcccctcccgcatgccattccgagtggccctgctgggggcagaggctcagattccgagtggccctgctgggggcagaggctcagattccgagtggccctgttgggggcagaagctcagattccaccctgtcctggcaggccatgaccaggcttcacaggatggtcgcccccgtgggctcactgcctggcacccttgggccgggatgaaaggggcctgggggtcactctggccttcatggggcccctctgtatcccaggagctgatgctgcagatgaacctgctggaactcatccgraagctgcagcagaggggctgcygggcagggaakgcagccctgggrctrggaggtccctggcagtygcctgctgcccagtgtgaccagaaaggcagccctgtcccaccatagccacaggcagcagaagtctgggcagagttcatcttcttgacctttggccactgccttcccagctgcccgcagggggttccccctgctgaggagagaccaggtggaccccagctgcctgtcacccttcatctgggacttgctgtcaaaccctaggatagtctcataaaggggaggctgggccagcctgctgctgtctgcttcaggaccaggcagagagtgaggctgggggttctcacaccttactccaccgggcacatcccaacctgcactggggcccacccgagcgcttgttctggtctcagccgctcccttggcagctgcagcccccatgcagaagaggctcccaggcccaagctctgtgtgacccagagaaataaagatgcctcagtgtggcccamatgtggcttgtgtgatagctgcaggttctgccataaccggggccctggtagggcccccacctctgttgcagcagaggcctctacctgggggccccttcctgggctgtgtgcccagcccaccacccctccccctgcctggagactgggaccctccagcctttcctgccccagccctggtcccaggatgctgtcactgccatctgtacaggggcccccatccaagccccagggcatgaggaccacatccagcctgctttgtggggctgggggctggagagcatgggagaaggcccggagtgcaagtatgcgcctgccgcagcctggtcagtgtcctgtgggaaccactaggaggagcctgatgcaggtcactgggatagaggactcagggtggcaggaatggcctgaggaggagccctgcggggaggcatgccagggccacctggggagcttggcttctgcatctgcatgagtcccctccgtgctggcctgggcccatgggccctgctgggtccttgtggagtcagggttgggggtgtccagcaccctgggtggccaggtctgcgcagggcctggcctccaggaacagatgatgctggaagccagagtttgggatgagacttctctgaccctgtctgagccactccctctttgttgcccagagctgaccctgtgtgagggcaaagggctctcagctgcaggaacagtggtttattgaccaggcaggcctccccagcccggccactgctccccgaggggctcgggctatgtgggctggccttgggagaaggtggacaatcctctaggtccaaggacatgggggtcacagaggtgggggccttgggcccacacatccgaggaaagttcctaacagttaccagcggctatcccaggcaggtatcagggtcagcccacacctgagtgcccccaccattggcagggctgggaggcacctgactccacctccagcagctctgcaagtgtggggtgaaaaaaggtgaatctgtgtgaggatggggttggctgcagctgtggtgatggcctgggcgggggcgggggggtgctaggtggggcaatggaagaggttgccagttcggagccacctcaagagctccagccacagcagctgccgctcccgacgggcacccttcacgaggctgctgttctccagggcgtggcaggacacgtatgacagcacctacagccctatacttgtacacagggtagccagcctggcctgcatgggggcagataatgccatgaggcccaggcccagcaccacactccatcgcaccagggagggccccattcacccagcgggaagctgatctggtcacacatgcctagcagctgtccaaagtacagtaggatgcaagcgcagctcctccatcctgtgcaggtaaagccaggagctgagggctaattccaggacactgtccccggtgcaggggtacagggcccctgtcccagctctgaccctgtcctgccaccccaggtcccccatctacactctccagactttatcccctttgaagtggggttgggatataggctctgtccggccctctcccagtgaggcctcttcccagcaggactctgctgggctgccctactcttctccctggggaggcctcagcccttagccaacaaggcccccctcctgccttccctaccctcctctctcccacctctcctctacctcccttcttggaggtgcagcccttctggggctttgacccacccagcagcctgccccacagggcagagaagctcctcagctctcctgccatcccttcctcaagcccctccagggttctgtggtatgactggtctccggcccctgccctcgccctctgtgggctgctgctctgccccatccccacagctgctgtgtcccacacagctgccaccagcccccgagtcctcggaaggcggctgctctgaatcgagatgtgttgcaaatgtcaaatacacacgggatttaggagactttctagaaaaatgcacgatgccgcattgcttttctaaaatcaacttgaatacaatttgaagtaatattttgtatattttgggttaattaaaatgtattcttgaaattcattttatcttttaacgtagctaccaaaaaactttaaattacagatgtggcttgcattatacatctattagcactgctcagatactggggtggggcctccactctgtcctgtcttcacaccaccccgtatagggtcttacaaagattctcagggtttgaaatatccacgcagtgacagttctcaagtttcatctccagcttactatatccaggtatcccgacttcgctggtctgcacagcactgggtcccccagcctggggcgagttccgcctgctgctcacgcatcacccgggtgactggcagtgcctgtgctgtgcttcccactccctccccgagggcctcacctcccctgttctccatctgccccagccctggctcccagagtacccatcggccagaggccctttccctccatccctgggctgggctccagtgtcgggaccacccagtctaaagcaggcacccatctctgccacatcgccctggcttccatcttgtgtcttcctcaaccccaggacatgaacccgagagccgggtgccactgctggctgccccctcccctgctggtgtgcacagcctctgccatgtgactgcggctcctcccagcacaggacagtggctcactccacctggcatctgggcttggcctcgtgaggcactttggccaacagggaggtaccaaaggtgacacaagcagaggcttgccctctccaggccttctggaagcctgagcccaccacgtgcccaagcctgggctggcctgtgggacgctggacccaggatgtagtctcctttactacaccagccatgaatgagctcattaggccccaccggccccagatcacagacgcaggagggacacaggcacagccagcagcagaagcatcagctgagccagcccacccctggcctacagaacatgccactgttccagcctctaagtttggggctggtttgttccttggccaaagccaactcgggttgtttgagggtgggtggtgtggcagtctgggcccagcacaggacagagcagctgccatagtctagaaccacttacccatgggaggggaccccagctccccagagctccccagccacccacagcaggggcagagctgaagcctgcaggggtccagcctctcaggcagggatgtgagcgtggtactgggggagcctggcacagggcccttggggccaagaggagagagcccggctgccactcaggggagggggaagctgtgtccactggggaagccactgccacagcaagatagtagggacagacaggtgccgggcggaagctggagagaggaagccctgctgagggcaggctgtcctttcggagttggatggtgatgtgtctagtcaggctgtgagtccaccagcattgagagtccacccagaggctgggagtcctgattacaagctgagaggaacccccaccagctcccgagtgctgggcagtgctggccaccaggcctgtgcgtgtggagaaagtgagtctgtcccatcaccgacacatctatgacaattagcagaggatcagggcacaaaaatgggtgtgctgcaatttcaggccatgaaaaagtagcagcatcgtaaacaaaggctgaatgtggacatcactgaatgatttcagagccgtgagtcagctcccgagcagcaccaggatgtgtcctgttggctgcagccctggccccaagcctggccctgtggcttcacagcttcttggggagccccttcgtgccacaagtcatggatctggggcaccctgccctgctgagagtggagctcctgctcagctcctaggaaggcgagagccagcgaggccactgcccaggcctccgagggttctagggggtcccatccctgggaaggcggaatctgggaggggagggggacctaggaccccattgtgtgcatagcttgggctaaggcatgagataagaccagggtgacagtacaggagtatccaagaactgacttcacctaacttctgcatttgacttgttagaattctaccgaagttgtgctccatgggacaaatgtttaaagagaaaacaaaccgttacattccagatgtagttaaaatgttaagggaactgcttataaatgaggcagcgctgtggaggcctcctgagggactgggctccaacactacatttgtacctttcaggagccatccgaataccctgatgaaatttagttttttaattgtgaagtttaataagtcaaatgttaatttttaaaaggctgggtacagtggctgatgcttgtaatcccagcactttgggaggccaagaagggaggatcacttgaggccaggagtttgagaccagcctggccaacatggtgaaaccctgtctctgctaaaaatacaaaacattagccaggcgtggtggcacatgcctgtaatcccagctacttgggaggctgaggcatgaagaattgcttgaacttgggaagcggaggttgcagtgagctgagaccacgccactgcactccagcataggtgacagcgagattctatctaaaaaaaaaagttaattttaaaaaccaacgtaactgcaaagagccattgtgctctcacagtccgatgtccagaatgccagcgggcctgggcctgcccactgaagccaccctccagctcatttcaccagcctttccccacaaatgcccgaccacccagcaggtcactctgcccaccctgagctctgcactgctgccacctctccccagctggaggagacaacggctcaggttggggtttcggtgcagggtggggcacacctacctgcgcagtgcgaagcgcactgtgtcctcattgtgggaggccaccatcaccttggccttggcgttgtgcttcagctcctccagcacgtagtccaggcacctgtgaagagtgccatgtgagcccagttccaggcctgtggtcgcctgcacctctcattaccagctgcacagagaggaggccgaaggcagacccagatccatccagtgagctggctctttccaagggtatccacaggatcaggaggaacaggagcagcatctgcccctcccagcacctcatgaaaaagaaagaccagcaaccaagcaaaagcgatgtctgggaccagacaattcacacagaaccagctggggcacagcgtccctgcatcaaacgtgccgtgactctggggaccagcccaaacatgcccataagcctcatgacagacacagctttgcgtctggggagggatcgtacagtgcacccctggccctgaaaggaaataaaagggaagcaggtccctgtagggcacagtgggggtgggcatcccggtgcaccaggaagcccgagcagtacggccctcctgcagcgaggacactcagcaggcttgaccatgcgcacattctctctgacccagcaattccatttccagcaacctaggacagctgcatcctcagacacaaaacccctgacggcccgtgtgtaccacagagggtgacggtatgtccagcgagtccctgttacaataaccagactgaaaaccagtaagatcaaagatgctggacacatagccccgggcactccatgctggctgttgacagcaccactctgcaagcccacacaagaggacccagatggaacgcgaaatgaaaaacacatcgggcagaggacacgctacagcgcaaacaacaatggcggagatgtgtgcgctgtggcacgacatgcacagcggctgcaggaggggagctggagccaaccaggaggcacttggggtctctctgaatttgcagcatgcacacacgcctctaagaggaaaagcccatggttggccagcctgtgctacatgaaaagatcaccaagaaactagagcagtaaaagcaggtgcagaacagctgatgggcgatcccactgtgtga

SEQ ID NO: 97046 - DNA, 12725 bp, Homo sapiens
gggccagcacgcggacgcattctgtctcccagcacagctcccttcccgcagcaccatcgcatcctgcagtgtcaacaagctgcatcctcaaatgcaccctgcaacacagccccaccacaggatggcactgtctcccagccattccgaggggccttctcactgctggggactctcccttggagacatttctcccatccccagatgaaggaagtcagcctggaattttattggaaccccaaatcaaatacagaatgctaaacatcctttctgtgctggggggtgcctgtcctagccaagggcttctctcctggaagctccagccagtgcaaggggccctccctttcacagacatcaaagcctccaactgacacctgtacccgacctggggccccgggtgtcaccaagagtgcagcacagcaaggcaccatctgcagtggacggcgtcaccctcccaacacgaggacctcactcggcacagggcatagggcacaggcttcacctcttcttgggtgcaaagtgcaccactgtccccctgccaacctgctggaggcaagcagtccatgagcatgagggccacagctcacagaacacagtcaagatgccagtgaggagtcatcagttgggctttttctagagcaaagaccataccttcagggaccatttccatagttcattaccaaagacgtttctctgaacatgtagggcactggaaaccatgaggagtcggcacagccttctctcctgagctggccttttcctctgcaggggccactctgccacagggacccaccaaagtcagccttggctgatgctagagaccataaagtggttcccatttatgtaaaaataaacaaacctgagagtagttgactttggaagtacatcccccagagcagcagtccccaacccttttggcaccaaggatcagtttggtggaaaacaatttttccatggaccaggggtgggggagtggtttcaggatgaaactgtccaccccagatcatcaggcactaggttctcataaggagtgcacaacacggattcctcacatgcgtagttcacgttagcgttcgcactcctataggaatctaatgccctgcttatctgaggggaggcgctcaggtggtaaagctcgctcgcccaccactcacctcctgctgtgttgcccagttcttaacaggccagacttgtaccggtcggcaggccagggattggggacccctgccccagagagacaaaggactggtgtttaaaccagcaggcagtcaccagacaggacacagcacacggaggtcagagagaacagggcccaggcccaggtggagggcacgaaagagcaagtgatggcagcaggcagccagcctcacagtaagcacgtctggtaggtgttcatgacaaacggtgacagggcacgttatggcagttgggaccacacacttaagatggtatttgcagagacaatccattacacatgacaacccccaatggcgtactggaaaatatctccttatttaaagttactgcagatgcccataactccaacactgccaagtgtggacttcaagtccaggaggccaagaccccagttttctccaaggccagggtacaataggctttccaaaagaagagctacagggccgagcccccacccccagcacaccagactggcctttccctccacaggggccactctgccacaggggccaaagtcagccttggccgatgctagagactctgctcagttggctactgcctccctgctccaaagccaaggtactccagtggtcttcctttctctcctcaaaacacagaaagcccacccctcctcaccatagaaaaaaagcagtagctgttcaggccataaggcacagtggagcctgcctcggcagagcccacgctgcccagcccacagtcgtgcatcagtaccacacccggcaccagacacccctggccaggctccctcaccagcgccagctcagacacctcagcttcaaggcccacagcaagatacatgcacgacctcagacaccagggcgtctctcccaggaacccaggctaccgtgaggtgcagcacccacctgtgctgcggacaggcctggacatacacccgggaggcttaggcgagcggcgctcacagcgcaggggcctgtacacacacagtcctgccatctggcccaggttccaaatgtgttttttattcactatttttgatgactataaataagtgtttccactatggaaaagaaagttagcacagtacattttcatgactggggaatggattttctgaagtcatcttcaatagggcaaaaacttagaaacaaaaaaaaaaaacaacctgaatgttgagttcagttctttatataacgtcccttgtaaaaatgaaagaataaaaacaaaccgaaaaagaggggcagggtaaaattttttaaaaaaaggaaaggaaagagaggaaaagaaaataaaataagacgatttattgcttctcctcagcatcctccttggtctcctccttcaccgagagagcttctagcttttccgccactttttcggcatgatcatttttgcctgatcctgctaaaaacacaagcagcacagtgagaaaacagaagcacggtgcattcaagcacatggccctcgccaggctggtcccaagtgccgtcacccacccacagcggcttgcccgccctcgggacagactcctgcctggccaagccgcctcctggagtctgtcttcttgaaattcagtgacgaaaggaagccaggtggatgcactcaagcactgcctagaccatggtcaggctgctcagtgacatctggtcacttgccaccacagctgcagtccagcctcatggcagaggtgaccaagccctctgagagacaaaccgaggaccatcataaagcaccttctggtgagctccaggcagtgcccggactccaatgcctgcccaattggactgaggccagcaacactgacaagtgctcagggctccccaggaagcacctgtgtccccagggagctgcatcactctggatacgtgaggcggccacagcaccctggaatgtttatctggcagacagaaaaagcacccgcctggaagtatagtcagatgcagagtgagtctgcaaagaagccccccaacccatggcaccacgtcacctttcttttctctctcttcgatctctttcctgcattcttcaaactttgttttgaatttctgtgcatctgtggaagggagagcgaagacttcctaagagctgtgagcagtggaagagacatgccctgccgggtctgaagagtcaggattcacagaagacccatttcatggtaattgctgacctaagaaaggactggtccacctgacatcggccctggccttctgtctccttcatctgactgcacccatttgggcagagcggtagagcacggaccctcaggcaaccaaggggcatgggcctctttgccacaggctcggctcccaaccgtgttggaaaggctgctggggcagccacgcccacagcaaggacaaggtcacttggcaccaaacggccagctaccaggcgccaggccacagtacccactgactcctccaggagccactggacgcagcttggacgatctggactggaaagacctctgagcagggaagagatcagcctgggcctgtggatctctctgcccagcccctgctggcacccaggcaaccatgaggggcccctggccccagtgaaccagaagcctggcacgaggatcagcactgggaggaagccctgggttgggcctcaggctccgcaacaactaatgggaaccggagcttggagagcaaaccaaagtgccagccacaaggcggctgagcgggcactgctgttcaccagctacttggcacagctttgagtttaagggggaaggcgctgctcatggcttcagtctgggcatggcccccaaacagcagggcagggcagcccacacgacacacttcccagttactgccccctctccccaaaaggcaacagcatttgttgcacataacccgccacgctgccacgcaggtgagccccaagtcaggcaggtccccagggcccttggctcactctcagcattcaggaagcggatggccagcagctctggcttggggcactcgtcggcgaagtcagcgtgggtgttccagacccaggcacggtcgctacctgcgttgggcttcagctccatcatcggcgtgactgaagagagagaagctcgtgaagatggtgagatgactgcaaaggccagcccacccagccctcggccacagagcaccctgctcaccaacctgaggggtctgcttcagacaacacggggacagtctggggttggagaaccaggcttagacaaagtaccacggcgcctgagttttattcaaacctctttgaaaatcctccatattcacttaaaaccaggaccatcctaaataggaatgggcacctgttccctgaccgtaaggccatctccacgaggagctcctgagctgtgttcaagatcacttggcacacagacccccacctccagaaatgcagagaagcagagctggcaaagcaggccccagctgtatcccagggctgcactcaagcccaaccctgatccccttgattctgaccctggccgtgaagtcagaagcccagggtcagatatcagggcacaaggcccagggggcccagtctttcctaagggaacccaacacatagagccagcctatctgaaagtggggggcagcagaaggctagaaagtggggcagttgccagaagggagcccactgggggccgtggccatgcatccccatgattgatgcaggagtgcccacctgcatccccatgactgaagcctggagggcacaggagacagagccacggcctgcaatggacgcctccaccccaactccccaggcacaggcagccccaaggggagatggccctgcaggtgaccactcttcagaacagctccctgagaacccagaccatcccaggtgcccatgcccagtccaggccacatgcacccccaggatacccctacacgtcactatctgaactgggagctgggggggggtctcgtctactgcagcctgccacagcggatgccaagccccctgcatgcccccttcacaccccgccccgacccagcccacagcctcttcgacaccttacccagaagccagcctctacccactgccactttccctgtctaccaagggcccatgatgggcacaagacactgctggctacacagatggctctgcccagatgcccaggagcccagaaccaacttatgatgcacacacaacaacccacaacctgacccaggctctgggagcagcacagggcatcagggaagacccccaaggaaatgattcaaacggctcgaggaggaggaccagccagagtgcaagcttccccaggactagacatgctgagcagggagggaggggaacccaggagccagttcccaaggaagtctggcaggccaggccgtgcagtgaggtgcccatggcataggcagaccaccacccacccctctgcatcgccctcaagggctgagccactcaggctcctgccagcagtcatcctgcacctgggatgagggaccctgccccgccggacacgcatgacactcagcaaacgacactaggaagcttaccaagggacaccccaggacaagtgtacttccaaacatgccaacaagctgggcagtgcaggttcaatctaaagacagctggcagccagccatactcaggacaacctactgccacttctttgcaggccaggctggacccctcacagggtggctggagctcttggctgaacctgcccaagggcctctacttatgtagcttcagaggcgcccaggacctggccaccttctcagccccgttcccctcccgtttcctccccaggaagatcctggtgagggtagaacacaccataactggggaggctggtgcctgggcacctcacacatctgctcttacactgcccgaacacccccaatctctctcacacacacccccaccgcgataccgcaccccctcagacaccaaacmcccccagacaccacacaccccccccaacaccacacaccccaacacccccagacamcacacaccccaacmcccccagacaccacacaccccaacacccccagacaccacacaccccaacacccccagacamcacacacacccaaccacacccctyagacaccacaaacccccctagacaccaaacaccagatgacccctacasacaccccggataccacacccgcccccyagacaccacacactgtacacctccccagacaccacacaccttcagacaccacacatgccccgacacaccttcagacaccacacagccccccagaccacacaccttcagacactacacacacccccagacaccacatacacaccccaaacaccaaacacccagacaccagacccccaaccacacacccccarccacccccgccagacaccacacccaaccacataccccaccasaccccccagacaccagaccaactacacacccccaracaccacacccaaccacacaacccccgccccagacaccacacaccttcagacaccacacagccccctgccccagacaccacacacaccgaaccacacacccctatacaccaccaccagtagacaccacagccccctagatactacacataccccccattaaccccccccagacaccaacccccaccccccagacaccacacacacacacacacacacacacacacacacacacacagcaccccctcgccctgcagcactcactcctcgtcccgagcccagcctgggcgctgcgtcctcccatcagggcccgtctggctgactccacacccccgtgtgctctaagcttcgctgcgggcctgctctgagttcagaggcacgtctgaaaaacgtatttctggttttaaattcaacaaacacaccacaaacttgcactccatgaaataacacgctccccagttcccaatcagccctgaatcttcccaaaggtcccaggccaagctgctggggactgtcgaggtggtcgttcatgccacctactgtagtggttggcacagatcttcagggtcttgtccctccgcatgaggaggcggatggcccctttctccttgtgcttcaggagcttgacgtcaccagtgcctcgctccttccattctgggagatcgttctcagaggcaaatcggaacagttttgcccgcctgcaagaaaagccgtgaggttaagagtgcagacctgcagcccacatgcagggcctgcgcaggaggacacaggacaactctgcactgcaggaccccatgcctccacgaacgccccagcccttcttcaggctccaagaactgcccgtcacaacaccaccagaaagcgcagcagcccaacaaactccaggtcatcttgaattccggttccacaaccaagagaattagacgaccgggcgcggtggctcatttgtaatcccagcattcggggaggccgaggcgggcaggtcatctgaggttaggagttcaaaaccagcctggccaacatggtgaaaccccatctctactacaaatacaaaaatcatctgagtgtggtgatgcacgcctgtaatcccagctactcaggaggctgaggcacgacaatcacttgagcccaggaggcagaggatacagtgagtggagattgccccactgctcctacagtcacaatatttccctcagtggggaccagcctgggcaacatagcaagacactatctctacaaaaagataaaaattagctggacatgatggctaacacccgtagtctcagctactcaagaggcagagggaggaggatcccttgagcgcaggagttcaaggctgcagtgagccatgataccactgctgcactccagcctgggtgagagtgagaccctattttaaaaaaaaacaaaacaaaacagggcacagtggcccacgcctgtaatcccacactttgggaggctgaggtgggtggatcacctgacgtcgggagttcgagaccagcctgaccaacgtggagaaaccccctctctactaaaaatacaaaattagccgggtgtggtggcacatgcctgtaatcccagctactcgggaggctgaggcaggagaatcccttgaagccgggaggcagaggttgcggcgagctgagatcacaccattgcgcaccagcctgggcagcaagagcgaaattccatctcaaaaaaaaaagagagagcaggcgcgggggctcacgcctgtaattccagcactttgggaggccaaggcaggtggatcatgaggtcaggagatccagaccatcctgactaactcggtgaaaccccatctctactaaaaatacaaaaaatcagccaggcatggaggcatgcgcctatagccccagctattcaagaagctgaggcaggaaaattgcttgaacctgggaggcagaggttgcagtgagccaagatcgcgccactgcactccagcctgggcaacagagcaagactccgtcccatggtcactgtgcaagagcaccccagccccagagatctgcagggacaacatggatcaggtgcaggccaaggacctctgtcacgacaccaccaggaagcacagcagcccaaaaaactccaggtcatcttgaattccacttccacaaccaagagaattagatgaccggacgcggtggctcacacctgtaatcccagcattttgggaggctgaggcgggcgggtcatctgaggtcagatgacccagagaagaggcccaggcctctaatcaggcaacaggccctggccaacacctggccctcctgcccaggagcagcccctcccgctggggaccagggcacccagaatccagcagtgcactcagggctcaggctggcgccctccctctgtgcacagctctgcctgcctctctcagacgactctgctctctgccccaacatgattctggcaagagactgtctcacagggttccccaacaggatgcccctggagctttactgcaaagacccgggcccaccctgctggcctcacctccctcaggaagggcctgggcccaggccaccaggagcacctcccacccgacatgggcagtgagggaacagaggcaagcacttcaccacagcaaagagctactcccaaacaggggctacggcaatgcatcagcagagtggagccatggccacccagtggtttcagggagatgtccatcaccctctgtgaccaaagggtgacacacagctctcctttcccaggtatccctcctggcccccttccttggataggaaactcacagtaggaatgactctctctgcttccctctcccaccccagagcaacaaaaccttaacctggactcttaaagcaacttcaaggatggggggattccatgaacttgaacagggaaaaactacaacctcattttcactgaggtgtgtaactaaacatgatgtttgttgcaatcctgagtgtaggcgacaggccacagtctctgtggtgctgtgacactgtcacaagacacaaggctggtacccaccactgtagccagctcttaactgaaagcgtcaagaagcacatgtacagaatttttttaagtggttttaataactaaaccatcacctattttcatgtgttatcgcaagcatcatgttgtatattaagggtgggccgggcgcggtagctgacgcctgtaatcccagcactttgggaggctggggtgggcagatcatgaggtcaggagatcgagaccatcctggctaatacggtgaaactccgtctctactaaaaatacaaaaaattagctgggcgtggtggcgggtgcctgtagttccagctgaggcaggagaatggcgtgaacctgggaggcggagcttgcaatgagccaagatcgcaccactgcactccagcctgggcgacagagcgagactccatctcaaaacaacaacaacaacagacaccgggtgggggatttataagcttcacgatgccaaagaagtctatgctgcaaaaacttaaaaccccctgctcaaccaagggactccctggatcctcagaagccagtggcaaaaaagggcagtggggccgccatgccagtggacagagcagcaagatgggatgcccttcatgcaactggctgcagggcagcaagggcatctggtgaagattcatgaaaggaacgggttaaatttccacatgggattagtcaccaactttaggccctttctttaagcagcctcagtctgattaaaagtcaggccaaaacctggacacccataaaagttgtaacctcaaccttaaagagtcctatttctgggacatcagcctacttacattttaaaaagttcctcttcatcttcttccagtgttttaatttcttgctcaggaagagaaactattggctcaaactgagggtcatggttggactcgtctgtattctcagtggaagtatcatggtcctcatgagtgtcctgtggagatacaaagaggttacactgctggcctatggatctggctcacaaccagagcccaaccagtgcctgcagtggtcagccctccgacaatgaagggacttcagatacaaggatgggcccaaccccaaagcaagaaattaggcccactcttccacactaggaaagctctgcgtttatgcccagctccatgtgagcacagagtgagacaccagaacttggggcccctcccccagattcacagacatcaatcagatctgtgcacagactgatgggggaccctacaagccgccaacacttgcagagagtggcctggcagaaactgcctcatctctttgagcatcagtttcttcctcatccataaaatgcagatgatacctgctgtgtgaagatcaaaggacacaatgatgggtcgaaatagattttgaaatattactttaaagcaaaatgtaactctttcagttttgactaattaggaaatagttgtgctcttgcttagtaaaacgaaaaaagtcgctacaggactgctagtatttacactggattcacagctctgccagcaattttttcacagttcagaaaactaagttaataactagataaattgtaccggtgaaagtcatgaaatcctggcccaatttagaggataagagagcaccaataatcatattttaggttcgagtcttccagaacacatgccttggtcacccagaagtccgtaagagacccaagacttcaccactagactcaaactggaaaagaaaacataagcttttcgctgctcttcactgttccccacagcactgcggctctgcagcggcccgcactcaaccagacaccgcagccaacaaagccgccgcctgggtcggcgcatctaggacctgtgccccacgctggaacgcgagcttctgccacagaggccagtggcggttccagacgtaagaaccgaatgaatgaagtgctgcgtgggcgacggaaagaataaatgcaccgtactagtggggagccccaagtgggccgagccggaggaaacccgccgcccgcaccagttcctggaggctggggccgtcccgcgtggcgacggccgctccccaacccaccccaaggtcacgcgggggccctgcagcccccaggcctctgcagagcctgcacccccaaacgccccaactccgcaggcctcgagcccccaaaccccacgcgccccgactccgcgccaccgaggcccagcagacggccgagcctgcaggccggcggaggttggtggcggcggcgcgggccgcccacgtggccgctgataacggccccggccccgcccgcccaccctgtccccgcttgggcccggcggcaccttggcggccgccatgggggcgcggcggcggcggcggctcggctgggtcggtcgtcgctggctccgcggcctctcggcggctactcgtagctccttccctccgcgtctggcgccggcgcctcccgcccgcccgctcttccctccgccccacgacccgaacctcgacccctgaccccagcggcgggaaacgcgccgcgattcaaaaccagtacagctttattggctcaggaggcggacactctcattgtccggcccgccccgcgcttcccgccaaaacgcccgcggcgcatgcccggcccgcccgtcagccagaggagcgcgcactcccggcgacacccgcgcgcacttccgtcccggccacgcgcgccgctagagctggctaaagtggttgggggttggatccggcgcgtgacgatgacgttgccagaagccaggatcatagagacgctcggcctccgccgcacgcgctggcggactaagagtggctggcgaagcgagcggccggcgcgggcccctggcgggcgggcggtacagccccaagcctgagacccggacctgagcatcgcaggttcgagtcccgccccgcctggggcgaagccgggggtggcggcgacctcgcggcgttgcaccggctctgtgagcacctcccctctgagcacttcccttgtgacaggccacttcccttgtgacaggcccaggacgaggtggccaggcggcccccatggcgtccctggtctaggcggagaaccgcctgggcgatgagtgagaacctcgacaacgaggtagagtgcggggagacgctgggtagagacggggatggggtgggaggaggcggggtgggtcaggaaacctgccagagaa

SEQ ID NO: 97047 - DNA, 43704 bp, Homo sapiens
tcccctcttcaaagagagcacctcagtccatgctagagactctctcttccgggtctgcaaactgatatggcaaataaaactctcctttctatcatttagccatgctggtgagtttttctttgttttttttttttttgagatgcaatctcactctgtcgcccaggctggagtacagtggcgcgatctcagctcactgcaagctccgcctcctgtgttcacgccattctcccgcctcagcctcccaagtagctgggactataggcacctgccaacacgcccggctaattttttgtatttttagtagagatggggtctcaccgtgttagccaggatggtctcgatctcctgacctcgtgatctgcccgccttggcctcctaaagtgctaggattacaggcgtcagccaccgtgcctcgccactggtgagtttttagacgacaacactaagtgaaaaaagtcagtcccctaaactacatattataggattccctttatacaaagtgtccagaataggcaaatccagagacagaaagcagattaaaggttgcaggcgctgaagagacggggaatggggagtggctgctgacaggtatggctttctttggggatcaagaaatgtcctggaattaggtagtgatgacagttgctcaactctgtgaatgaaacgaaacctactgaatgatacactttaaatgggtgaactgtgccgctagtcagtcatatctcaataaaactttatcaaaaaaaaaaaggcaatgtggaccaggtggggcaggctcagggatgaggcaggatgtagacagaaataagttctacagaacaacaactgagcagaaaataagcatctccagccacggaggtctcagcctctgagaaccgagggtgccacgtggatggttacagcgactgccccagaggccgctgggccaatgttcacagtgagggggtggtagggagtctctgactgcttttgcaccttttagtttccaattctctcctgggcagtcacaggctcagcatggcccaactccactgccacagacctacttcgccacacattccaaccccacgaccctcaactgatgcggaggttctggggcaggtggaacagcaagagctggctgagacagccagaacaatcctttgcaagctcaggaccttctggggccacatccctgcctcgctggtagtctctgtgtctgtgccactgcccagctcttgggagctcaggtgggctgcccacagttgtatccaaggtagggaggggaagaccagggtcacagagggtggccggaaggataagccccaggtggaggagagggcaccagctggtaggcgtgggggcagtgggtgggacacactggaagccaccctccaggcagatgcctcctctggagatcccaactagcccaggggttcgggtctgggcaccaccctagcaaatgggggctgggcctatctgtggatgaaacatcactgggcagacgtgggaagctggaagccagctccagtgtgggccaggcaaggaccacaggactcatgatgagcccgtcagcaccaccagccccctaagatgcaggtgggatggggccactcagctgtcctggggactgcttatcatctccctcgggcccctccagggacgcctggggcttcagttccaccgtgtacacccagtgggaaggtgtgcacctgtgacctgcaacctcacttggtgatttgtgccaaatgcaaaagaaagtctgtgtgacgtgggcatggagcttcagaggagccaggggtgtgagggagccccctcacagaggggtgtgggtggcgctaagggcactgacacactccccaggcgccggaacaccctgtgtgagccagcagcttgagtagagggaccagagcgggcgtttaaggcacagagttccacgatgccaccagcgaggagtgtctgtgggcagcgagtgtgggagtgagtgagccagcagtccccggaacctaggctatggtccctacagttttgtgcacccaggggaaatgccatttcccaggagtgctgctttgtcctggcaccagacctgggacaagatgcagacctccctcccagaacatggctgcagaggggggcaatgtgacacattctctccaggttggggcactggcagaggaagcttccaggaaatcgcagcacccgaggagggggaaaggaagggcatgtagcaggaggcacagcctgggcagtggtgcagagccagggcaggaagggcccagccgtggagtgtgacctggcgcagaggggctcgaggccctgaggatggggaccggggatcagactggggactgggtgcaggaggcgtgcatctgtgtggggcttgagtggggtgtgtacttgtgcgtcagggagcagaccaggcaagaaccccaggtggtgatggctccagaggttctgagaaggaacaggcacagggcacactgggacggcacaggaagtgaggctgggggtggccggctgggctgcagggctgcggtgggaagcccagaacaggggcgcaccttgctcagcaggaaaagcccatggggagggggtgagcagggagccagggctctctgaagtgtccaggtgcagggcaaggtgcccacagaccataaggcacttaaatggccacaaagtcatctcagaagagtaatatgacaagtgcctggtctctaaaaagcacaagggtgacctctgcatagaaacagtcccccaccccatcaggctgccagggcaggctcacctggcgtcaaaacgataggatcaggctcccctcggttcccatagtagcaaatgacgtctccctttgctgtgctgcaggccaaggggagagaatgtcagactacagccatagggcgtcctccccgacactgcccggtgatctcacagccctgtttctggaggctagcgatgtgcgcagtagcccgctgcggccaggtcaggagcttgcaggacccagcccctcaggtgcctggcaggcggggtcatggaggccccagctcttgtccagcatcacgggtatgttcccagctcacctcggggcccaccagcccaggaggcacaggatctaaaatgccctcctgccatgccgaatgccccatggcatggacacacagaggctgcccatggggacaactgcagggctgagccccatccccacatcaccaacctctccatcaggccccttaccacagctcatctatgagggtttctggacaggtggccccagtgtggccccagggtgatcgaggcttccaaagaaagcgccaaagaccacattttcctactctcaagtgttaagtgtacactttaaaatagttaagggacagtagagctgggcatagtgactcatgcctatagtcccagctaatctggagactaaggagggaggactgcttgaggccaggagtttgaaaccagactgggcaacatagcaagaccccatctctacaaaataaataaatcattttttaaaaagaaaatagttcaaaatgctccccagctgaaaatattccaatcctcaataccacagtaagtcttctagaacttggagtgccttttttgcaaagtgaagaggatctctttgtggcctgtgagatgccctcccaggccagatgctgggcatggagccctgggccttcaagatggaacagatgcagagaaagagccaggcatggtgccttcctccccgaagtgctgcccccaggtgggacccaccttccccacccctggtaggcttcaagggcccccccgtctatgttcacattccactcccgttcttcctcaccatggtctttggcaactttcctaagatacttggttcataatttcagagactgtttgcaggcaaaaatctcctctgggctttctgtgtaaggacctacagaactggacacccatgctgccagcactataccacaggccaggcggagggcaggcctcacccagggatagctgtggccatgacaagcctctctcccttccaggccttggcttcctcatctgcacctaccagcagggctgctcactgacctccgatgcccccgccctccagcctcggccctggcaccagcttttgcctgacctgtggtatgctctcctggccactgcctgtatcctcaggctaggtccaggaggctgaccctcactctgcagcctttggagccgggagagttgcacaggctctgaggagcccaaacccccaacccccaaccacaggagcccgtgtatctgctcaaggcatggcacccttggcaccccacctccacacagctgctgagtgccaagtcctgctggtgccacggccgcagaggaactctcctgagactaatcagacccacatggaactactgaccgggaaaagtggttcctgagcatgggggcatgcagagagcacaggggctctgccacctggagtcacgaaggcatgggcaggaagaacggctccggacagcaagtgccccgcaccagccctcggccttccacctaggggacactgcaactctcccagcctccatagcaagtgtgcagacccatgtggggcagggctgggcatgccacacacaagggatgctcaacgaacagcaggcctggagctcgggagccaggagagaggcccatggacctgcccttgtggaaggaggcagcttcagggcccgccacaatgtgccgaccacttcccgtttgcctgtcctggcagaaggccccggactaacagcattggccaagttctggggctttggagggggaggagggcaggagggaggaatgctcacttcacggaagggcaaaacaccaaaacctccgcagttcctgcggcctcatctccaacaggagcttccctgggagcacagcatcccagtcactccaagccagggctgcggagggctgctctgcacagcctgcccgtgggagggaggacacccggccagagccactctatgtgactgttcttcacagcctcagctttctccagggatccggcagccctcatgccatcacaggaagccttgggcttcacccccaaatacccgagttggtacatctgtgacaggctcagtcctcagaatgtttgccaagtcacgaggagcaacgtccctggagaggctgccacagcccccagtggaaccccacttcctgatgagcctgaggcctgcccccgaggcagtgctgggcagagccgccatccccctctggcagacccacctcaggtcggctgctatgaggttgaagccattgtacagatggccctccatagagaccttcttcaggtaggacaagctgtccacgtcagtggtcagaaagtgggtgacaagttcacctgtaggcaggggacagatgctgtgtccacagctgcaggcatgtgctcttctcccaggaacactgatatggggccccctggggaggatgcaggaagatgaggggtcccactggagccctggcctgtcatgactgccgcaagagtcagccacacctcattagcctggctgccactcaggtcggcactgaaaactgctcattttattaaaaaaaaaatttccccactatgtcttcctatggaaatccagcatgaagtaaacaacacctttcagtggggacaatgtgtgtccacagagctgtcgtctcggggaaggcatctactctacaaacattccaggcaggggacagtgacacagcagtcaggagtgccatgcatgaggacaaggggagagtgcgccctgagaggagtaaacagtgctgcgtgggtcaggtgggagtgggctcctggctgcgacgccagagggccagggtgtgggaaatgggatgctcccctcctcactcttcctgtctctgccgcatacccctgcagcacacctcagtggcggcagtgatatgcccacggaagccacccacctgccacggggcccagcttcccccttcttgtccccacccttacctgggccctgccctgccacgctttgtcaccgcccactctgtaacctggccctgccccacggtacctcagccctgccccatcccactcccaagcacaagcaccttggcacttcctaccttggcccgccccactccaccatacattggccagtcctgtagtcccttggccccaccttgtctcacctaggcctgccccaccccaccctgtctcaccttggccccaccccactcgccttacctcgccctcgggcctgccagtccagctgcggctgcaggtagttggtgagtgctgccagcttgccacgtgtgctgatgcccagccatgtgcctccttccttgccttcctccatgtccagccctgtggcagatgacagtgttaccaccattgatgccacccattccagtcccccacctggttcccagccctgggagacgcatactcggcccagctcctgcctcaagctcctcgaggacgttcracatgcggcttggcccagcagccccagctatggaatcgtggctggaactcttcaaggccaggcagcccctggggttcatgggtcgtgcaagtgagatccctgtcctgcaggacaactatgacaccaaccacacctatcccaacagatgccctgcagaacacatccttccacttgggccagcgtcaaggctgaggggcagcactaggctccaatcgcatgaatggggtgcagggacgctggctgtcctcacccagcaggatgcaccaggcccaaagggcaggcccttcactaggagcccagcacacaaccaggaccttcacccccgccaaatctgcagggcatgggccactgctaatgccacaaggttggagggctctgaaagccacaggagggctccttcttagaccagggggtcattttacccaaagattggggcaaaaaaggctgtcattaagatgttatttttattattttatttcattttttatttttttgagacagagtctcactctgtcacccaagctggagttcagtggcaatcacacagttcactgcaacctccacctcccaggctcaagcgatcctcccacctcagcccaagtagctgggaccacaggcaggtaccatcacactcggctgatttttgcatttttttgtacagacaaagttttgctgtgttgcccaggcttgtctcgaactcctgggctcaagygatcctcccgactcagcctcccaaagtgctgggattacaggagtgagccactgcactggctaggatgttattttatttattattgttattattactttttgagacagagtttcgctcttgttgcccaggctggagtgcaatggtgtgctctcggctcactgcaacctctccctcctgggttcaagcgattctcctgcctcagcctcctgagtagctggaattacaggcatgtgccatcacacctggctaattttgtatttttagtagaaacggagtttctccatgttggccaggctggtctcgaattcccaacctcaggtgatccgtccgccttggcgtcccaaagtgctgggattacaggtgtgagccaccgtgcctggccctaagatattatttttataacaataattaattataacagaaaaagaaaagatgtaaagatcaaaaataaagaaataaaactgtatttgtggccccgtgcggtgactcacacctgtaatcccagccctttgggaggccgaggcgggcagatcacctgaggttgggagttcaagaccagcctgaccaacatggagaaacaccatttctattaaagatacaaaattagccaggcgtggtggtgcatgcctgtaatcccaactacttaggaggctgaggcagcctataatcccagctactcggggggctgaggcaggggaattgcttgaacccgggaggtggaggttgcagtgagccgagatcacaccattgcactctcagcgaaactctgtctcaaaaaaaaaaaaaaaacccaacaaaactgtatttgcaaccagcaggatcatatatgaagaaaacccaaaaggaataccaaaaccgatgtattagaactaataagtaaatgctagcaagaactggaaagtgagcatttaaatataccatttataacagcatttttaaaatccttagtgtgattaaaaaaaaaaaaaaaagccgggtgcagtggctcacgcctgtaatcccagcactttgggaggccaaggcgggcggatcacgaggtcaggagttcgagaccagcctggccaatatgatgaaaccccatctctactaaaaatacaaaaattagctgggcatggtggcaggcacctgtagttccagctactcgggaggctgagacaggagaattgctggaacccgggaggtggaggttgcaatgagcagagatggcgccattgcactctagcctgggcaacagaccaagactccgtctcaaaaaaaaaaaaaaaaaaaaaaaacaccaggaaaatatttaatgaaaaatgagtgacaaagactgaaaactccagggcactgttgagggtctcaagttgagctgacctgatttaaggagagacatgcatattcactgaaagattcaatagtgtttttttgtttgtttttgttttttagagtcttgctctgtcgcctaggctggagtgcagtggtgtgatctcagttcactgcaagctccgcctcccgggttcaggccattctcctgcctcagcctcccaagtagctgggactacaggtgcccaccaccacacctagctaattttttcatatttttttagtagagacagggtttcaccgtgttagccaagatggtctcggtctcctgatctcatgatcggcccgcctcggccttccaaagtgctggaattacaggcgtgagccaccgtgcccagcctcaacagtgtttcttcttgttattatttgtttcactgggtacttcttagacaactcagtattgttaaggtgacacttctccccacatgacccatagattcaaaacctgcccagtcaaaatcccagggggcttttygttttatagcaattaacagactggctgaaatatctatgcatatgcaaaggaactgggatggccaaaatagtcccgaaaaagaaggcagacccacattgcctgatttcttttttctttttttttttttttttgagacagagtttcgctcttgttacccaggctggagtgcaatggcgtgatctcagctcaccgcaacctccgcctcccgggttcaagtgattctcctgcctcagcctcccgagtagctgggattacaggcatggaccaccacacccagctaattttgtatttttagtagagacggggtttctccatgttggtcaggctggtcttgaactcccaacctcaggtgatctgcccacctcggtctcccaaagtgctgggattacaggtgtgagccacagtgctcagcctgatttcaagacttactaaaaagcagcagcactcatagactgcatggtgttggcatcaagacagatacatagatcaatgggatacaacagagtcaggaatagacccacacatatatgttcaactgatgtacaaccaagttgccatagtaatgaactaggcaaaagataatccatttaataaatgatgctggaacaactagagagatttgggggttggaggcagtaaatctcaacccctacctcacaccatgtacaaaaccttgagataaatcatagaccaaacataaaaacaaaaattaggcttctagaagcaaatggaggaaaatattgttatatattttcctctgggtaggcaaagactttttggataaggcacaaaaagaacaactcataaaagataagataaactgtactttgttaaaatgaaatattctggccgggcgcagtggctcacgcctgtaatcctaccactttgggaggccaaggcaggcagatcaagaggtcaagagattgagcccatcctggccaacatggtgaaaccccatctctactaaaaatacaaaaattagctgggcatggtggtgcatgcttgtagtcccagctactcaggaggctgaggcagaagaatcacttgaacctgggaggcggaggttgcagtgagctgagatcgcaccactgtactccagcctggcaacagagtaagactccacccactcaaaagaaaaaaaaaaaattctgctcaccataagctatcattaaggaaatgagtaggcacaaaggactcatatccagaatgggtaaataactcttacaaatcaataattaaaacaagaacaaaacttccaaattgcccaagcaacaaggaccagatttaccctcctgcataaaacaaccaaaaaataaataaataaataaaactcaagaaacaatggtgtatttattagtccattctcatgctgctacaaggacatacccgagactgggtaatttataaaggaaagatatgtgactcatagttcagcatggctggggaggcctcaggaaacttacaatcatggcagaaggggaagcaaacatgtccttcttcacatggtggcaggaaggagaagttccaagcaaagcaggaaaagccccttataaaaccatcagatcttggctgggagcggcagctcatgcctgtaatgtcagcacttcggaaggccgaggcaggcggatcacctgaggtcaggagttcgagaccagcctggccaacatggtgaaaccccatctctactaaaaatacaaaaattagctgggcgtggtggcaagcggctgtaattccagctactcaggaggctgaggcaggagaattgcttgaacctgggaggtggaggttgcagtgagccgagatcgcaccattgcactccagcctgggtaacaagagcgaaactcagtctcaaaaaaaaaaaaacaaaacactatcagatctcatgagaactcactatcatgagaatagcagcatgggggtaatgccccatgattcaattacctcccactgggtctctcccaggacatgtggggatttggggaactataattcaagatgagatttgggtggagacacagccaaaccatatcaaatgggttttacaaaaaaggatatgacagacaggaaacaaagtgagcccatgattagagaggctccaggacccagcccagggagtggggggaccaggccgaattcagcagactccctgagctgagaagaggggcttagtgtttggggaaactaagacaaccagagttcatggctgccatagtttggatgtttgtcccccagacctcatgttaaaatctgatccccgggctgggtgaggtggctcacgcctctaatctcagcattttgggaggctgaggcgggtggattgcctgaggtcaagagttcgagaccagcctgaccaacatggtgaaaccccgtctctactaaaaacacaaaaaattagctgggcatggtggcaggcgcctgtaatcccagctactcaggaggctgaggcaggagaattgcttgaaccttggaggcggagcttgtggtgagccgagatcgtgccattgcactccagcctgggcaacaagagtgaaactctgtctcaaaaaaaaaaaaaaaaaamaaacaaaccaaaaaactgatccccagtgttggaggtggggtctaatgggagacagatctacctaatggcagatccttcatgaacggcttggtgttgtcctcacagtgatgagttctagctctattagttcctttgagaactggttgtttaaaagagcgtggcgcctcctccctctctctggcttcctccctccgtgtgtgatctgcacataccacctccccttccccttccaccatcagtagaagcttcctgaggcctgcatcagaagcagatgctgacactgtgcttcaggtcccctgtagaactctaagccaaataaacctcttttctttataaattacccagccttgtggatcacttgagrtcaggagtttgagaccagcccagccaacctggtgaaaccccatctctactaaaaatacaaaaattgggctgggggaaggatagcgttaggagaaatacccaatgtaaatgatgagttgatgggtgcagcaaaccaacatggcacatgtatgtatacctatgtaacaaacctgcacgttctgcacatgtaccctagaacttaaagaataataataaaaaaatacaaaaatacaaaaattagcagggtgtggtggcaggtgcctgtaatcccagctactcaggaggctgaggcaggagaatcacttgaacctgggaggtggaggttgcagtgagccaaggtcgcaccattgcactccagcctaagcgacagagcaagactctgtctcaaaaaaaaaaaaaaaaaaaaaattacccagccttggctgggcaccatggcttattatctgtaatcccagcactttcggaggccaagaaaggagggtcacttcaggccaggactttgaaaccagcttgtgcaacacagcaaggctttgtcgctacaaattatttttaaaaattagctgggcatggtgatgtgcacttgtagtcccagctactagggaggctgaggtgggaggatcacttgaggccaggagttagaggctgcagtgagacaggattgtgccactgcactccagcctgggcaacagagtgagaccctatctcaaaaaaaaagaaaaaaattacccagactcagctttttcctttagagcaacacaaacgaactaagacagtggcacaaaagtccagagaggaaggagctacacagagaatgtctgatcagcatctcagggaggagactatatgacactggggcaagaaccaccagtgctcacacagggcagggagtagggctggctcccagacaccaggctggaaaacctcaagatctaggggcaccgagaaaagtacgcagagagcatcgcagaggtgtgggacaagggcaagtgaactaatatatgtgtgtaactggagagaaggagagagtgagagagaagacagaaaaactacttgaaaaagtaatggccgctgggtgcaatggctcatgcttctaatcccagcactttgggaggacaaggcgggcggatcacctgaggtcgggagttcaaggccagcctgaccaacatggagaaaccccatctctactaaaaatacaaaattagcctggtgtggtggtgcatgcctgtaatcccagctattaggaaggctgaagcaggagaacagcttgaacccgggagatggaggttgcggtgagctgagatggcaccattgcactccagcctgggcaacaagagcaaaattccatctcaaaaaaaaaaaaaaaaaaaaagaagtgatggccaaatttttatgaatttaatgattttgatttgcatttcttttcttttttttcagacagggtctcactctgttgcctaggctaactgcagtggctcagtctcggttcactgcagcttctaccttccaggctcaggcgatcctcccacctcagcctcctgagtaactgggacaacaggcatatgccaccacagctggctaatttttttttttttttttgtaaagacagggactcactacgttgcccaggccggtctcaagctcctggcctcaagggatcctcctgccttggactcccaaagtgctgagattacaggtgtgagccaccggcccagggtgatttcatttctaacaagttctcaagtaaagctggtgctacaggcccaaggaccacacctggagaaccactgtcctaaacttttgcatacaatcyggtgacgccagagagtgagaggatgtgggccttagtgatatggtcaccccgacacttggcagaagcccgtgtacatccatgcaccagctgccaccatcaaaacaccacaggggtgaacaattccacaagactggagctgctggggttggcactagttcagaggcagctgacagacctgggtgccagggtgggatggagcccaggagggcacaatagtcaaggaaccagaagagggtaaccctctgagccgccacrtcttcatctatgaaaaccttccaccttccaaggacatcagtcttgtgccttcacccacccgtcctgaccagccctgcacccactgcatcctcctataccagcaggcctaggaccaccctgcctcagtctccatgcacccgtcctcctcccacacggtgccgggaccacccagcctcagcagcattctcacactactgccaggccacaggcctacacaggagtcctcacaaaaccccacagctgagcttttatttgattgattgattgactgattgaatgagacagggtctcgctctgtcacccatgctggagtgcagtggcacaatctcagctcactgaaacctctgctttccgggctcaggmaattctctagcctcagcctcctgagtagctggggccacaggcacatgccaccacgcctggctaatttttgtatttttttttgtagagacagggttttaccatgttgcccagactggtcttgaactcctgggctcaagtaatcctcctgcctcagcctccttaagtgttgggttcacacctataatcccaacacctgccctcccggcctgggaggcagcacagggcacacacagcctccatgggcccacgaggtcacacatctggcctgagtgggcaccctggagcatgccaggatgcctcgggcccacttggcgcctggtacgcaggcagagtaacccgtggcctcaccagccatctatgcgcaccttccaggtagactcccaccaccccatgggcaggaactggttcctgtccaacaggacttcaatgaggctggtatctttggtggggaggacctggttctcacccctacttctgccctataagtacacctaatgcaacacaggcatggtgcaggtgacggggcttcagcaccaccagcttcccaaactcagccccaccatccctgaagcaagggtgctcatatacaaacagaaacacaaacacaggcacacacacgcacgcatacacacgcatgcacacactcatatgactgggttgcttcacaaagtgactgagtgtggatctgtacatcacacaaatccacccacatgccctcagcaaaaaggagggatccatataaaaccaactgatgctttcacatgatggggcccccatgcagacgcatggcacaggaagccacgcagacagtgctgggtgggcagctctggcaatgcccggtgctggggctggccccgaccaygagccccatcagttccacctctacaccccgccatcacacttggaagcagcaccactcagttagggtcactcgggccacgcaggggstagggaagcaacaaggcgcagccaccgctgagcacrcaggaagactcaccactgaggatctcgttgttgttcccccagaagtcagctaacttggagggtcggctgtagaattcatccctgttggctgccaagatgagcctgcaagaggaaagcatcactgatggcttcagatggaaacgagcgagccaagtctttttctcttttcacacacaaaactggcctcagtggcaacaagggccagtctcagagagggcaggaagccggcaktcctgctgcacccacactggaggaaggagcaccgtggctccaggtgagctctcgggagcctgcagctgggaccgcacgggaaacaggaggatgctaggcagggacacacatccacaccattcaatggcgggagacgggtctgccaggcccttaggggcaccatggagcctgggctccatgccgggagcccaggctggagggtggggggctgttcctccttctgtccatctgtccccagccctgggaacacccacaacaaacccgtgggctcttggaagcgtgagctcaaggatacagattgaatggcacagcatgtgggcctctgagggctgctccattctgtgtgttttggagttaatttctcgggttggttgggagtggatgggaacttcactgttttactagtttttttgcattatgaatcaaacaaatatttccatttttatttatttttattttttgagatggagtctctctgtgtcacccaggctagagtgcagtggcgtgacatcggctcactgcaactcccgcctcccgggttcaagctattctcccgcctcagcctcctgagtagctgggattacaggcacccgccaccacacccagctaattttttgtatttttagtagagatggggtttcaccatgttggccaagctggtcttgaactcctgacctcaaatgatctacccgcctcggcctccgaggcggaggattacaggtgtgagccaccacatccagcctaatcaaacaaatatttcttttggaattaggagagacatctaaactttaagagccctggtcttgaggaaagaaaactgactttcaagtcccagcttggacattagaagaaaacaaataaggacacagcrgtgactgagtggaaggggtcagttcctgcaatgtccattagacctgagggtctaagaagcgatggctgggccaggcacagtggatgacacctgtaatcccagcagtttgggaggccaaagtgggaggatcacttgaggctaggagttttgagaccagcttgggcaagaaagtaagaccccatatctacaaaaaaaaaatacaaaaattagtcaggtgtggtggtgcatgcctgtattcccaactactggggaggctgaggcagcaggatcatttgagcccaggagtttgaggctgcagtgaactgtgactgcaccattgcactccaacctggggaacagagaagccctgtctctaaaaaaaaaaaaaaagtgatggctgaagaccccctgagcacttgtgccggagasgcagctccaaggagcagagctcagctgtcctgccatcacaatctgagtctgaaaccaagttgcagtggtgagagcccgacaagtgtttaaaaataatttccatattgatcattgcacatcaatttcataaaacaacatttgctcctgattaaatgtgaaataacagacattcataaaattgggagtgaaagtggtgctcacagctgggtrcggtggctcatgcctgtaatcccagcattttgcgaggccgaggtgggtggatcatgaggtcaggagttcaagaccagcctggccaagatggtgaaaccccatctctattaaaaatacaaaaattaggccgggcccggtggctcacgcctgtaatcccagcactttgagaggccaaggtgggaggatcacgaggtcaagagatcgagaccatcctggctaacacggtaaaaccccgtctctactaaaaatacaaaaaattagccaggtgtggtggcgggcgcctgtagtcccagctactcgggaggctgaggcaggacaatggtgtgaacccgggaggcagagtttgcagtgagccgagatcatgctactgtactccagcctgagtgacagagcaagactccgtctcaaaaaaaaaaaaaaaaaattagccgggtgtggtggcgggcgcctgtaatcccagctgctcgagaggttgaggcagagaattgcttgaacccgggaggcggaggttgcagggagctgagatcgtgccactgcactctagcctgggcgacagaacgaaactccatttcaaacaaaaaagtacatggtgctagcacccaccattcatgcccttggaggcattcacacctgtgtgcacatgtgtgccccccactcagtgcctgcccctgaagcttcttgccagcagaactggggaaatgcttttggtcattgccagkgactgtgccatgccctagagcccttggggtctgctatggaagccttaccacctccagggtgccccattcagcctggtctgacacccagctggccccagggctgcaccaggtctcagggatgtgctgcctggggtagggggaggtggtctctgtccctgatgagcctcagcctttgtacctctaactgccatgtttcaacccagacccagcccaagtctccatgtcccttctgggcagaagtrccccccaacctctgcagcagggatggcaggagagcccaccttccctgggctggacagtgctagtagaaggcagtgcacttgccccagacctggatgggccagtcctgtaggtgcccattggttgtgtcctggccagcgggcaggagaagggggaacaccgcagtccctgagtgctatggtggggatgtgccagggtctgggatgacagctcctccaccctatgggtggggtcaagctccatgtggttctgctcagcattctctcttaaataccttcctcctctgcttccacgtcccacagccctgcaggtgaacaggggtcgggggagccagggacacctcatcccagtccagccccaaaccaggctggggctgttggcttcgggtgctgattctgacataatgctcttacaaagggaaaataaaggggagaaaagtaggaagaaaagctgactgagcatggacttttgtcctaagatgttcagctgtctgtttttaaacaaggagcaattatatatgtttgcctaataactcaggaacattaattgccaggttatttttgttccagcagtcatgtttagctgaattgctggtggtttgccagggatttcattgaatacataattcagggacaagccagcatgctgagcacccagatcaagccccaaagggaggaggaagtagctctctcagtcatcactggtggggctgcacatgggtagaagcctatctgcgccccacgtccagagagacagggatgcacccaccacggtgaggtccctgaggatggcaagtcacctcggctttattttgttccaataactgaaaccactaattatccatcaccacctgacacccacgctgctaggcagggtgagtgcgtgtactgtccggggggtatgtgcatcatctcggggggtgagtgtgttctgccggggggtgagtgtgtgcactgtctgggggacagtttggtgacagataggaggtactctggcctgagatccagtgatcaaaccctcagtggtgaccccatggaagctgtcccatggagtaacagcttgtcctgcagccactctaggctgaagccagcaagtggcatcacgtggggctgtaaacaggcaggttttttttcgttttttcttttttttaagatggagtctcactctgtcatccaggctggagtgcagtggcgctatctcagttccctgtaacctctgcctcccaggctcaagcaattctcctgccttagcctccctaatagctgggattacaggtgtgcgccaccatgccaggctaatttttgtatttttagtagagatggggtttcaccatgttggccaggctggtctcgaactcctgacctcaagtgatccacccacctcagcctcccaaagtgctgggattacaggcgtgagccaccgcacccggctgtaaacaggcagttttgaaagagatagggtgacatcatgaagtgattgtgttatcttgctgcagggtcttggttttccgtgatgggtatcaaattaccaaatacagtggccgaggccgggcatggtggctcacgcatgtaatcccagcattttgggaggctgaggcaggaggatcacttgggcccaggagttcgagaccaccctggacaacatagtgagaacttgtctctaccaaaaaaaaaaaaattagccgggcatggtgttgtagtcccagttacttaggcatgctgaagtgggaggatcgcttgagccggcgagtttgaggctgcagtaagctatgatcataccactgtactccagcctgggcaacagagcaagatcctgtctctaaaataataataataataataaaaaaaaaaaacatagtggcctaaagcaccctactttttactccagtccacaggtgaggagtccagcccagcctagctgggtacctgtacgaggcctcccaaagtgctgcagaggtgctgtcaggggctccatagaagtgtctgtgctcccagcctgcagcgtgcccttcccctggctggacaccccacaggcagagcagaagcagccaccagaagtgtctcacaccctcccatgaagtcaggaaaacacagcgcacatttgctcagtcacccagaggtggcacatttcgtctttggcttagggcttcggaaaatagtccagagaaatcccgaggccaactggaatggcaggacccgcaggacaggtcctggcagcaacacacgggttctgagtgaaagcaagaggggcccatgtcaaccctcctcctctccacccaaggggctgggtggcactgaccagcacccgcaggccagccatcaagcttcctttccagagatgggagcactcrgggtgggttgagtctcttcagcagcctgcaggaggcagccctgaaacgcatacagagctggctggctctcctcagcgtgctagtttcctggggctgccgtaactaagcaccacagaccaggcggctgcaacaacagacactattgtctcgcagcattggatgctggagatccaagatcaaggcrtcagcagggctggctccttttgagggtcttctcggtatgcagacgactgcttctatctctgtatacacaccagcttcccctgtgcgtatctgagtcacccatcacattgattagggcctacccacatgaccttattttaccttcatcttttttttgagatgcagtctcgctctgttgcccatgctggagtgcagtggcgcaatctcggctcactgcaagctctgcctcccaggttcacgccattctcttgtctcagcctcccaagtggctgggactacaggcgcccacccccatgcccagctaatttttttgtgtgtttttagtagagatgtgttatccaggatggtctggatctcctgaccttgtgatccgcccaccttggcctcccaaagtgctgggattacaggcgtgagccaccgtgctcggccagcccctacattctttagagttctgttcactcactagccagcccaacactactccagtccctgtagcagtcaatagttctttcctaacatttcttccaccttccctgcagcatgctgtctgctgctgggacctgccactcacccaactgcaaaaagggaaaacaccagacacccttccttcctgattccttggcctgaaatgacttcactcagccttgaagtcaagcagcatggtgtctatgcaactttgcagtgactcaaatctgagaccctcttgaaatggttcaaatcatttctggtacagattttaaaatgatgaaaacttcccgagcagttgcattagagagtggttacacgtttcattttagatgtgggttatatctctgcctcgttctctgtgtggataaatgctggggtgtcctggggaatggaggtgtggccgtcctgagtccagggtcaggggtggcttctggcctcgatttcctgactcctctggctggtcctcagcgtcccctcttccccaggttctttttcctcagctcaggacccacccacagacccctagcctggccgccactttgacttctcaccagcagctgtgacccgccagcccaagctggctctcactcactgacgccgttgtcccagttctgccgcccgaccctcctcaaagcccatagaactgcagcccacctggacccatgtcactcctctgtcctacctgtggctgccttctgtggctgagtcttcacgtctttgtacattgactggagtccccgccccgagaggcattctgacarcatcccacactgagtgaccctgtcctggagggcagtgccaggcctgtgcagccccgtcctggcccacacaccttcctgcacacagcagcttgggtggcatgagaactggctgggcacccaggaccctgcagggcgcagcagatgcagagcgagggggttacctgtacgcgtttttggaaacagggcgaggatcaaacttaaagaagatgatgcacatggtggtgcagggcggctctgctgacacaggtcgcgaggtctgcgggaaaaggaaaacactgagttgagcggatggcagacactcagggctgccctccgaacctgcaacaggccagaacagagagaaccacctctgtggtgtctgtacyacttgctgggtgtgggggaactggacaccacactcttggccggtgccacacaaacaactcccaaacccatgcactcattggcactggccagactgtctctccaccacctgcaacaccagccctgaacagaagcatcccatcagcaccatggtagtcttaaggcctggacacaccgagctggggtgccgagggggtccccggggggcagcagaagtgagggcaggagccacactgtgagaaacaaacttacccatccaaatctaaagaatgaactcagacccagagaacagcgaaagtgagacttttaatgacagtcttgcaagatcaggtgtcagacaggcacacccagcacagtttcgacaagcaatttatcccctagtacgcaggtccctcccccagttcctcataggccgagtactgtggggtcacaattttcccggacrtcgcctattaattgttgggtaggggcttcaggtgtttttttgggggcttgtcttgctgtattttgttgcagcccacaatgcattgcagtcctagttagctcagggactttttaagtatttaacttacgacctaagtagcaggcaggctgataagaacagacaaaatgagctattttgcaggctagtaaactttcagcttagactgaacttctttggttcgggtgaaggcaactaagtgcggggaaagtggaggccgacaagcacacatcagctatccaagcagggtrgcctagtatatcctgtttcttctgtagtttgctgagctaagccaatttaagacactttgtcttggaaatagaccactgtatacattcttccttcaagactgtcccccacatgcacatctcctcccctgcaacagcaccaamcccaccccacacgccaccagtgggggcagccctgcctccgcctccaacagcatggcccactcacctgggatgcaggccctacaggtcctgctcagcacacacactcgccatcccacaggacccgaaggccccacacacccacagcagctggcatggacacgtgccggggacacgctgggtgactgcacacttagcatacacctygtccccacccarggacctctggggcccagagcaggcagttttccacaatgcaaacgagtgcagaacggagattagattccgaggccacscaagggtgacacccaagttccctgaaatgtgcacatgtgcaatgatttagtgacacggctccagggcagagccagtgctcacagctgggacatgggacagccaagaagctgttcaaatactgaagagacccaaaaagattcctctgagaaaagtctaatgagtggggacggaggtgaagagggctcagtgtatgtgcctccataggcacgggcattagggatggccattggggaccatctgctccagtgaggagctggtggctgtgcagttgaagtattgggatagcaataagcgccacgtgcagacgcactgggtcagggggatgggcagccatttgagatggtctgctggccaccactctgcataggatgggaagctaaagggtgtgttgttgcaagggggccctgtgggaagcagactgtggggctggaagtgggttgggtccccttgccgggtgccctggaagcgcccacagggggccatcatccgagggtgggcaggctactagggscaatccttttggtaaaaacaactcaagatgctggatgaaatatgaaaacatcttaaaaattgccaggagctgatgagctcatgcagcatttggccaacagttcggagagcgtggcccacagaggacagcagaacacagtggccaatcctgcctgagagcgtttgcccactgaacacactggggctcatactctggtggcctygggggcgaaggagacagaagacaaggtccagtcacccccacaggatgaagaacctaacagaagactctcctctaagttaggctgggactccaaagagcgatgcttagggagagatgaactacagccgcagccacccccaggggttatggggacattgcacataagtgaagggaagtttctgagaagctgtggcacagccagccgtccaggtccacactgggggtacaaggacccacaagccaagcacagttttaaggggttccagcactcgtagtgcccctgtgcctgaagttctctctggagaaagayaccttcatcctatacttcaaagaagtctcaaaatcatttttcaaagacmagaagcagtacatagtcagaaagaaccacataatgaaagaagcaccatgagcaagaaccagcagaaagataaccgtacatgcatcatcaaccaaccatgctctgatggcagaaagaaaacagacagctcagaaacatctgcagggcaaaggaagtgatgaagagcaaactgggtttacaaagcagcaaaaggaactcggttttttgtttgttgttgttgttttgtttttgctcctgttgcccmggctggctggcataatctcggctcaccgcaacctccgccccccgagttcaagcaattctcctgcctcagcctcccgagtagctgggattacaggcatgcgccaccacgcccagctaattttgtatttttagtggagacggggtttctccatgttggtcaggctggtctccaactcctgacctcaggtgatccacccacctcggcctcccaaagtgttaggattacaggcatgagccaccatgcctggccaaaagaactcttaggaagctattttagaaatgaaagcttcagtgactgcacattaaagctcagctgtgggtttaagagcaatcaggtgcagctgatgatgcagaaccatcccgaatgcagtgcaggaagatggggaacacgctgggctttgggagtgcacccaaggtgccactgatggggtgggcccagcactcaccatgtggccagaagacacaagtccctttactctggaggagctggtctttcctgcacatgagaacccctggctgcagtcactggagaagccctgccagctggtctctactggaatcccactggcctggagcccagggctgcccaaggcctgctcaccagggacatgctcctctggggtgttagagaaggccgttggtctcaatcaacttcagccgacctcagccctccctgggctgcacgcccagctgctggcaaggccatggatgagggcagttctggccactgatacacgtaggacagacaggcagaaaggcacccccagttcagctgcaggaccccaccatcctagctggccagggtgcrggggcagcagaccagccctccaggcaccagtggcagggagggctccatggtccaagggaaggccataaacagatctccggacagcctggcactggaggtgtgggcgcagagccaagggctgtggcctcgacgaagacgcggtcattgggagggaaggaccagaggaaagccagcccctggggaggggaccatcaggaactgcctttctctccaatccctcgccccctgctcgagccaggcccactgcccaccggcccccaacccagctctagccagcaggtctccccctccccctgccagcttcacctcccccgacctgtgaccttgcctttgcctgggcccctgtgtgctccctaagccaagccctgcaggttccctaggtcctacaaggtccccacacaggcccaccacagcattccaacaccctctcatgcctgctgacttgccaggctctgggagggagccatggatatagtccttgtccttttggtcaccatatcttgatctgggcgcagggcatgtgggcacacgggtggccaggaccacttcccacaacttccacaggtcccatcacaccaggtgaggctgggctcctcagggcatctcttgtgccacacagagctcgccctcaaggttgcccgaattggccaactctacagragggttggtgtcccagggagaatcgtgcctggctttccaggtgaggctccgccctgcctgtccccacccctgccctgggctcagcacttgggccaagcccaaccaactctcagcatgtccttggcagtccaagaaggccagagtggtcaaagccaygcagggttggccctgaggcccaggcggccagaaccagaccacaaagagcagctggaggaagaggcaggcaggagggtctggggtccagtcagcagccttgccctgggtctcagaggccacagcccagaagcatctgaacatctgcaggaagccacgcccagtctctgcatcctgcacaggaccccgcctgccccaaggggctaagaccaccagggcagcctgcacacaaccaccaggcttgcagaagcagtcagatggccacacgcccatcctctccaggcggaaaatgcttacccctctccatyctgtcaactggcctcacggccaccgggatagcagttgggcaagtaggttacagggcgggtggggcaggtgacgcaaaacctggctgccagggcgggtccaaccccaaccggaaggaggctgggccagggcaccacaggtgggaagatgctgatgagctcctccctgtgctgtgtgctctgcagctgtgatctcatctcaagagtcccaggtcacatggcagggatgggcaaggtgagcctggaggggctcatggtggggcacctgctggttgggctagaggtgaagaagcagtgagctggccaccccgagcaggcacacgtgggatgctgggatcaagtgggcctgctggaccctgcacccacggcctggcagcccctgagagagtcaggatggcctcggcactggatctgttcatttgtagctctgctctgcccagccacgctgtggacactcctggaagtcagcatgctgccttctgctctctcatagcaggatctgctgatccccgccagggtgcaagaggtccctgggcaagctggtgatgggcagccagcttcctcctggccatggtggtcactgtgttcacatrtggtcctactagaaacatcatcttgaaagcaactggcatgacacaggcacatggccaggcctcaccaggcccacagggatggaagagcccagatatgtagcccaggctgacaacaggaggccgtgtgggcagcagtcgagaggagccatacttcaagactgaaagcagagcctgtgaggtgggcaaatgtcctgccaccgacctacgacaccagcacagcgcagcagggcaacgtggcatggtggtgaggttcctgagccaggacaagaaaagaagcgttgttctcatggctatttgaggaagcacatcacctccactctgtcgcccaggtgcagtcgtgtgatcatagctcactgcagcctcgaactcctgggctcaagccatcctcccacctcagcctcccaagtagctaagattacagctgcataccaccacacccggctaatttttttttttttgagacagagtctcgatctgtcacctaggctggagtgcagcggcgcgatctcagctcactgcagcctcctcctccctggttcaagcgattctcctgcctcagcctctcaaatagctgggactagaggtgcgtgccatcacacccagctaatttttgtatttttagtagagatggggtttcaccatgttggccaggatggtctcgatctcctgaccttgtgacccacccaccttggcctcccaaagtgctggtattacagacatgagccaccacgcctggccctaatttttaaatttttttggagaggtggggtctcattatgttgcccaggctattctcaaactcatgggctgaagtgatctttccacctcaggaagtcttaatgactgggtagtataagtgacatccttttaaaaaattttacagcaactgctggttgggcgaggtggctcacgcctgtaatcccaacactttgggaagccaaggcgggtggatcacctgaggtcaggagtttgaggccagcctggccaacatggtgaaaccccatctttactaaaaatacaaaaattatcacgcctgtaattccagcactttgggaggccaaggtgggtggatcacgaggtcaagagttcgagaccagcctggccaatatggtgaaaccctgtctctactaaaaatacaaaaattagccgggcgtggtggcgggcgcctgtagtcccagctacttgggaggctgagacagaagacttgcttgaacccaggaggcagaggttgtagtgagccaagatcgtaccactgtcctccagcctgggcaacagagcaagactccatctcaaaaaacaaacaaacaaacaaacaaacaaattagccaggtgtggtggtgcgtgcctataatcctagctactgaggaggctgaggcaggagaatcacttgaacccacgaggtggaggttgcagtgaaccgagatcgtgccattgcactccagcctaagagacaagagggaaactccatctcaaaaaaataaaaattaaaaaaaaaaaaaaaaaaagcaactgcttacacgagaatgccctctttacaagagtcctggtgcaccctgggaaggaaatgcgctggagtgtgaggcactggttctctggtcatacggagcggctggcctgtaccactgyctcctggagcacatagggacttggtagacaagcaagggacgaaaggatgtgcgtcgtgaggctcatccatatctgagaaagtccagctcctctcacacagatgtgacraaagaggtcgcctttgtgatggtcaacacttaaccacccccagtagagtgccatctccagttgggccaggcaccctgcctccctgcagcccagacagctagagtgaatgcccaggggacatgcacagcctctgtgcagggaggccggggaactaatcacttgggactttggtgtggyctttgccaaccctgccagggaggtaagagggggacagtcactgtgagctcaccatgtgactgcaaatgccaccagcctcagcagggacagagcacaggcctcttccagggaggaagttccccccacactcctggagtccctcaacacccccaagcctggccagaggatctatgagatatgaatggaaagagagagccctcttcacaccgcagccaagggcttcccgtcctctaagaataccagtgcgggtggaattcttcccagaatcccagcatacgttcccctagcctaacaacytggtaattctgcaaaacaggaagaaagcctggacttggcatgggttattcttagagcatggcgctgtctgtgaaggacggaagctttccaggcactctgggcccatctgctgatgctttcgagaactctcccagcgtgcaccgtcctctctgcccaccttctgcttctgagagccaccccgctctagaatcccctctccagcctagggctcctcccctggcttctcagagaaaccaacagggccttctgtcctaaggccaaatggaaacgggctaaactccctctctaagaagaatgagactccagttgaggcaagccccaaacctcactccatgcggtgtctaaaaaaggcacgacaagaaaaccattcagacagaacgcctgggcaaagatgggccagagccacaggcagagagcagcagcagcagtgaccccagccagggctgcgtggggacaaggtctggcaccctgatggatgcgcacatggcctgctgcctggcagtgaggatctgcttccctggctctcagtgcccaccacaggcaggtaggtggggtggagggtgggcagtaaccttgcagaggcccatggggaaaagaagcaagggggacgagggccatgctgacagggcctcaaatggaggacccagtggggaacaggcagacctcagtgctgcagggcaaatccaggccaccctcctgcatgtcccagaacccactactgccagcctccccttctgaggaggccaacaggcatcaggcatctgaccgtgccagtcgcccaccccacaccaaccagcaccacctccactagcttttgtataataccaagaaacgctggtccctcccatacgctgcctgttcattcaccctctattcagcctctctgtgccccagcctaaggctgagtctcctgtagccacgactggcagctctggaggctggtgggacccatagttgttaataccatcgctcaggtcacccaggagcacattctggrgggaaacatttccagtgacatttaacgggccaaagccccatcccttcagggctcatgtctgtcatcccagcactttgggaggctaaagcaggaggattgtttgaggccaggagtttaagtccagcctgtgaaacacagcaagtccctgtctacaaaaagcaaataaaaacaattagccaggtgcagtggcatatgcctgtggtcccaactacttgggaggctgaggtaggaggatggcttgagcctagaagatcaaggctgcagtgaattatgatcatgtcactgcacttccgcaacacagcaacagagggagactctgtctcaatataatactaataatataataaaataaggtagggtgcagtggctcatggctgtaatccctgcactttgggaggctgaggcgggcagatcatttgaggtcaggaattcaagaccagcctggccaacacggtgaaacccrgtctctactaaaaatacaaaaattagccaggcatggtagtgcaggcctgtaatcccagctactcaggaggctgaggcaggaggatcacttgaacccaggagccggagggcgccgtgaaccgagattgtgccacttcactccagcctgggtgacagcgcgagactccgtttcaaaaaagtaaagtaaaataaaataaataataataaaataaaattagccgagcatggtgacatgcatctgtagtcccagctactcaggaggctgaggcagaaggattgctcgagcccaggagtttgaggctgcagtgagctatgatagcaccactgcactccagcctgggtgacaaggcaagactctgagtctcaaaaaaaaaaggaaaaaaagcctcagccaagggctgcctgtggcgccagagtgttcttaacctgcttgcacacacatgtgagcagacacatgtatgctgtggggttaacacgctagggtcccattgctccrttctccctgattggccatgaggtctgtctccaccagagccatgtccccactggttcaccactgcccagctttcccgctgctctgcctctcagctgtggctggtgtcttcgtcccatcaagcgaccatccctagcacatgctctgcacatgggctgatttggcttggatctgtgtccccaccaaatctcacgttgaatttaattcccagtgttggaggcaggacctggtgggaggcgattggatcatgggggcagaattctcatgaaagtttaacaccatcccccccggtgctgtacagtgatagagttctcacgagatctggttttaagtgtgtggcacctcccccatctctctcttcctcctgctccagccgtgtgaagtgctggctcctgcttttccttctgccatgattgtaagtttcctgaggcctccccagaagctgagcaaatgccaggatcatgcttcctgtgcaccttgcagaaccgagagccaattaaacctctttttttaataaatgacccagtcccaggtatttctttacarcagtgggagagcagctgaggacattcctaggatagacgcaagaggtggaattgctccatccatgggtgrcgctttcagataaacagacttggccaagtccccgctaacgtctagcaccagaacctgttgccactcacctgcctccagggtgtatgcagtgtgggaaatgttcccgccagggttttatgggcatcccccactggctgggcaacttgtgacctcctgtatgttcttgccaacaattcaccaacatgggtactgactgctaggcctttgtctcactgacccgtagtgcagctggtgtgatgtgggcaaccatgygcctgtcccaggcctgcaactgttttctccctagccatcccctgcctttcagctctgcctgtgatgctgtctagtagaaatagccttatattacatgggattttcccatcattactgtacagcagtcatgtcccgtcctgctaaaggccctccctgtcccaaaatgagaactcctttttcttatctaccttgtatggttgcacagtggtgaagctcttttttttttttttgagacgaagtctcgctatgtcgcccaggctggagttcaacggcgcgatctcagctcactacaacctccacctgctgggttcaagcaattctcctgcctcagcctcccgagtaactgtgattacaggtgcgtgccaccatgcctggctaatttttgtatttttagtaaagacaggttttcaccatgttggtcaggctggtcttgaactcctgacctcatgatccccccgcctcagcctcccaaaatgctgggattataggcgtgagccaccccgcccagccttggtgaagctcttggatctgcccactgtctgcctgtgcgactgctgtgaggtggggaccacccatgcttcccaaacgcacagccaattgtccttaggtggccgctggccatccagtctggcccacctcagccacatcctggacttctagtcacatgggccccttgaggccttaaatgtgtcaccaggcctctgatgctgcagtagtcaccctagcttcaatgcattctcaggtgtctggagggcaccctccagactgtcccccttggctattcaaagaaccttccaaaccctgcctagatcacgccatgccccaactcctgctcaccatgccaggcactctgcaggtgcccaagtccacaaagtgacacagtaagaaagtccataacctggaaaagaagccagcctgtgcctttccayggtgatgaggcagcagggaggtctcagccagaagatagcactctgcttggtctttcatgcagaggccagagataagcaacatctgcccatggggacaggaggcagggcagggccacctggtctaggcagccactgggggacacgagggagatatctgggtgctggtggtggtgtgatatggacggtagctgtgtggctgggttcactttgtacaatctgtcacgccagacactgaaagcgtgcacacccagtargcatgcttcccggcggggaacagtaatgtctaccctcaaaagaaagtgcactggccaggcacagtggctcacacctgtaatcccaacactttgggaggccgaggtgggtggatcacctgaggtcaggagttcaagaccagcctggctaaaatggtgaaaccccgtctctactaaaaacacaaaaattagcagggcgtggtgatgcacgcctgtaatcccagctactcaggaggctgaggcaggagaatcgcattgaacctgagaggcagaggttgcagtggcacgatctcaggtcactgcaacctctgcctccggtattcaagcgattctcctgcctcagccttttgaggtgacaaagcaagactctgtctcaaaacgcaaaaaaaaagaaaatgtacagatcctgccctccttccctgccagggctgggacatttctatgggcagggaagagagggaaggaagggcaagaacccaagagtcacttgttcacagaaagcaagagaagacccaatcagccctggtgcaagacagctctgcataggacggggtgtagctgggctgtcgcagcaacaccacacctggagaccctgggggccagaggggatgggacacacgcttttggcggaaccacttccctttggcaagcgaaaaggcaagcatagcacatgggcagaggggaygtgtgctaagcagaaagcagtggtgacagaggaatggcaagctattagtaccacagggtcaaggggacctagacacttgggagggtagccatcaagtcgggctcctattggggctgcacatggtgagtccctgaacagagggtgactaagccctacagtctgctgcccccatttaatggcctcaatggccacaagggctggtgctgcagggctgagcagccgggcgcccaatccccatcccttgtaatccccactccatcagcggtggcagcccccaggggcagagcttgaaagcaygagttgctcttttcaaaggcagacacagacatgtgacgcgggctcccggtggctgtcagcagaggaggtaaacacacgtgggaacacagtgtcgctgttcacggggcctgggcgaagaaagtcctgacgtcaggaaaccctctgagtctccagtccactgcaatgccctgctccctcctatctccgcagcaagagctcaccagtttacactctctggctattaaatggcattttttatttttatttttagatggagttttgctcttgtcgcccaggctggagtgcaatggtcctgttgggtgggctgggggcagctggagagggtgacctctctcactgcaacgttcgcctcctgggttcaagcaattctcctgcctcagcctttcgagtagttgggattacaggcacctgccaccatgcccagcaaatttttgtattttgtttttagtagggacggggtttcactatgttggccaggctgatctcgaactcctgacctcaggtgatccacctgyctcggcctcccaaagtgctgggattataggtgtgagccaccgtgccgggcytaaatggcattttattatgacacattttctttttttttttttgagatggagtttcgctctgttgcccaggctggagtgcagtggcacgatcccggctcactgcaagctctgcctcctgggttcacgccattctcctgcctcagcctcccgagtagctgggactacaggtgcctgccaccaccacgtccggctaatttttttgtatttttagtagagacggggtttcaccgtgttagccaggatggtctcgatctcctggcctcgtgatccacccgcctcggcctcccaaactgctgggattacaggcgtgagccaccgtgcttggcctatcatgacacattttctacagtggtactctctcctcagatcttcacaatgcttccggggcatttcttcagcctcacaccagaggatcactgtctcttcccagttccaaggaatagcacaaacaagaggcatcgtgagcagacagcaagctctggacacagggtggccccatcctcaggccctcctgggaggaacactcagcttcctcacaagccagggacaggccagcctcgcagcggcccctgyggcctgagtggttagtaaaaacaaaaaaaaaggggggcactcctaccatgcccgcaaagaggatgaaggcaagcacttcaagtttcaagttagcatggcactgaagatctcaatggatgyacccccaaatgtcagcaagtgcaccaggggagcagccgctgggagaaggaggccagccttttttatctttaagcatgcataaactatttttgcagtctaaaagggaagttgagagaaaaaggggaaaaagctgtgataacctcaaaaagcagctcagtctttctggggtgaccttgttttcacggagcccatcctcatggtagggataggcttgttttcaagacagcccaagccctatggtaggggccaacaaaggccaggctctgccatgctgctgccatgtgctgactgacacgtcaccaaaggatgggccctgcttctcatgcatctggagtgtcaatgacaagcatggccctacttcgagaagtcttcccagcctccctatcccgggccatttctctccagaccccttctggggtccctgagaagcccctcatatccctgtgggtgttttcagaagcagcacccttgggtgggcaccggggtgccctccaagttcgccgtctggcgcagaagccgggcacaggatcaagttcccaggacactgcacgtgattccacacactgcaaaacgtaatcagaatgacagcccacaagtgaagaccaaggaagcacaagaggctgggcagcccaggaagagctgacagctggtcaccttagctcagggaagggctatggccaccacacatcacagcaggcaggggcttggtctgaggggcctgcagtctgaggacatgcaagtaacacaaagctgtgtaggggtcaaagggggtgggggcaccagggcaccctaccctggaccrccagagcactaggatcctgtgggaacagaggctctgctgtgtccatctaacaacatggtcaccctctccagctgctcccagcccacccaacacagacgcaggacacagacacagggacactcctaagagagtggcccaggagtagtagaggcactgggagcaggccctggctctgaatgaccttgggaacacgatctgccaccttagcctgagttttccttgtatgagcaggactggatcaatgaatgmttgccccaaaaggctgcccagaggcaaatgagctagcgtgagaaagccttccaaagagctactcagctacccccttatagctgccgtcacatctgcctcatggaagagggcactgtgcccagagtggcagcaaaacagtggtcagcaggtctagagccacacgacagtgcaaacaggcctggccagggcagggcatgtgacattcctgaagaggaagggggcctgaggcccagggacttgtccaagggcagacggttcactctaaagcttgtggtccagcaggaagccaagggagcacaggagaggtgctaggggcagggaaggtgggggtctcagcaaacagccctctgtgcccacttcctagaggaaaacgggcaaagcccaggctgctacaaagcccagcggtggggcaaggactgccctgagtgcagccctgccagcccctacctctgacgctctggagttgggggtgggggatctaactacccaaacctccccaggaaggccgcatccaggcgcagggatgacccagcacttactatctactcacacccacattagctgtcaccctgctggcccgcagcaggccgcgggtaggggrcagagtgaccgggcgccagagctgtccctgatgctggccaaggccgagcagcccacacaccctgcagggaccacgcagctcccaaccctgccgatctcagcctccccgcagcgagtctggtcccacctgccagagtccctcgcatcccgtgccagcggggattatcaaaaacaccttccagtaacgcgcggggcattttcgtcggccgggatcgacgtggttgcccctgacccagccgcctgattctataccatacctcagaaaggggaaactgaggcagggtgaggaagtgcggccagcccacccaccttcaagcagcctggcccggtccgcgcacccagagcccagagcccggagcccccgagcmcaggccggccgggccactagcggagtcggccagccccggagccgcgcactcaccgcctccgccaccgccgccgacttccgggtgccgcgcccgcgcgccaccgcagccagcccagtaccgcccagcccgaagccggcgcgttcaccattgggccgcgcagcgaggggcggggcggcgcgccgcatgccggcgtcccgttggctgggcgcgctgtcgctcggaggctgccacctcctggcgccccgcccccggggctgcgccaaagcttcgggctgcgcgggcgtctgagcgcttcctgatccagcggccttcggggactccgcggctccctgcctgcagggacgccatgggaggtcgcagccgcccctgagtccatgccctcatggacaccatctgtcacctgctcaccctgcggcctctctcggaagaggtacaggaatgctcacttccggactggccccctcagactgcgtcctggtctccccatcctgttcactcaaccccacctctggacctggccatcttcctcttggtcatcccttccttcactttatggcctccaggtcggctctttcctccctgatgtccctgccattcccagtatgtacccccagaccctggactaggcatttgagcactataccctgcacacccaccacctcccccacttccaccccccagtgtagcctttgagctcacatccaggtccaggccccagcgacgaggggctggcccagcttgacttgtgcagggtgagcaggtgggcactgactggggccctcccaacaggacagaggcattagctgggaccgctgctcctgtagcctctgggctgtgcctgggcctatgtggcagaaaggtggagagtcaaagcccagaggctcaggccctgcctcaaagtgagcattcaaaaaactatgacatggatgacaaagacattagggataatgataatgtgtaaagcactctaaacccaatgtctgggtcagcagttctttcatcccactttatagatgtaaacactgagacttggagcagttatgtcattcagttgaagttgaaaaaggtggcaagcaagagaggccacattagcttcaacctgtgttgaagacctaggtgccctgatgccctgcagaaaactggggctcagggatgggaagagcctggctggtaatcagcaacggcaagagtctaacctggacctacatgcgggcccgttgtgctccacacttttgctatcttatctgtgtttcccctggaacccaacagaaccttttacaaggactccagatgcccagggactcatggccagcgggccgcagacccagccagacatggttgtctctcccaccatccagcagtgggatcatgtggggctggtaccagtgatttccctctgagcagccaaacctatgcaatctatagggccaagaggtggtggtggtggacaagtgggatctggggcttgggggtgatggactgtgccctggggttcatggcagcacctggagaatgggcttccccaaagcaccaggccatgcacctcaaagctggacatgagttgaccaaggtttccctttgcccacaaagagggatgcagtaacatgtcagatggtggtttgcatcctgttctgtcataccttgtggccttgggccatccccacccccagccatacttttcccagctagacagagccagagcagacactctgatcttctttgtcaccactgacactccagtctggatgacatgcgatgccaggaagcaggtgacggcagatgaaatgggtctaggatgggcacctaagccctgggatcttggggctgcaacaggctcactggcatccaacctctaattgcacacaaactcagataggaagctcactaccttctgtggccactcttttgatttcaacagctgccactcttgaaaagttcttgacacccagctgaaagcattttctctctgtggctttctccgggggcctcacagctgtccgcatggagctaggtgagaggatgagagagggagaacactgggctactggtccctgtggtctcccttgctgtgtttttcttatctttttcttttttccttttttttgagatggagtctcgctctgtctcctaggctgctgtgcggtggtgcaatctcagctcactgcaacctccgcctcccaggttcaagcgatctcctgcctcagcctcccaagtagctgggactatgggcgtctaccaccatgccccgctacttttttttgtattcttttagtagagatggggttttgctatgttggccaggctggtctcgaactcctgacctctggtgatttgcctgccttggcctcccaaagtgctgggattacaggcatgagccactgcgcccagcctcccttgttgtgtttctgacccctggctgcagcctaatgggccgactgctggacagcggtcctgagtcctgtttgaattggtgctgccccgacatcctctgacctcagctaatgatcctgcctgccgagggcagacaggtctctgcaaccctatgggtggtaggggtggtgatgaggggagaggtagtctcacttgcacagattttggtgtatggttctgtcttttgcactctttcaacagaggtctgtccagtccctcttgcaagtgtggggagggggtggtgcaggactatgaggtaactgtgagaagaggggctccagcagaaccagggtccaatggccttgaagagatggctggggacagctggactcattacgtctactcctaaatggaggaaacgacccctcagctacacagcacctgagccagaatgtcaccatggtgctgctccacaggatgacagctacctggtttgtgagggcccctattctagggacagctacttcattctgccctcccagagcagcaagcaacaaccctatgccaggaggccaattggcacgtcaagtgccagctccaatcgattgatagtagctgcctggctctgaaaggcagctgggatcgattcaccatgctgccagcacacagatggacccagcggtggtcccagcagtgagttcttgccttgggccatttcattttctttgtcctggccaaggaatgattggatgaacacactggactcccaatatgggtggataagacaagagtgtctggtcacacccctccaccactcataagcatggttgtgggcagtttggttccccaggcggccttggagaatgcaatgagccgaggaactggtcatctccaggtgcatccagggcaggaaaggatgacagcatgcgtgagccagggtcactggctaagaagtcatctcaggacctccccctagaaaagcccactgggcagcatccctgctggttcccccctacaccacaaggttacgcagagctggcggagggtcatggtcccactcatgtcaggtgctcttaatctggaaaggaaatgtaacctacgtgaatctcaacaggcagtgaagcaccgtttcttcctgactccaggtagggtgaagaaaatgggacagtagtacggggtgcgggcataaacgcacaactctgcctccccagacgcagagctgtggggctgtgagaatgccaggaggaggtaagaaagggcggccccatggggggcctgcagggtgggacaagcccaagaggtctctacatccaggcctggtgggggaggtgagcccctggtttaccgagggggtcccttcctgccctcggaaatactgcagctcctacctccatcgtctccccgctgcggggacccaggggcgtgaggatgagagagcccccaggccccagggtcagacgactgtgttcaagcaagtgagaacctctctgaggctgtttcccaactgtaaaatggggatagcagcagaactctctctcgcggcttgcgtgaagaatacaattcgatgtcgacaggagggagcggcgcgcagcgcgcagcgagtagcaggcgctgaagaaggatacctgtgaactggaagtggtggcggaggctacgcggccagagtccggggaaggggcgccggctctgccagtccctgctcggggctggatggtcgggggatgttctcgtaagtcggctgggagggagcggtcccgcgtaccctgccaccgccgccgcagaggttcgggcaggtgcggggccgcggcccctccgcgagggggccggtcatccgccgggactgacatcccggaggcccaatggcaagccgtcatctccgcgcatccgcccaatcggcgccggttgccgtgccgcgccgggtctctcgaccaatgggaaaatttgctgtcagatggggcggggcggagattcgcgtcgccggcccggtccgctttgcgcacgggccgcgtgagggcgggagggctggcccggggtctcgggttgcgcgctgggcctggagggagggggcggcccccgcaccggtccgagttgcggccgcgtggactgcgacccgcgccgcgccgcaccgcgccgcgccctgggaacgccgctccccgcgcgccaacggacccggggaagcccttctggggtccgaggccgcgctgcggggccgcccacgctgcgctccaggtaagcctgagccagtgggcggggtgtgggacccggggctggggcctcgggtcggagccgggactgggggcggggctgcagatatgggacgcattccgggcagcggtccggacagggtcctatccctggagtcgagatccgggcgagggtctgggccggacgtcggagccaatctccgccccacccgcgtcttgtccgcgcgctctgcggcgtccgagaccccgggccggcgggggcgggtctctttgtgcgtggccttggggccctaccctacccgtccgggcgtcttgcactgagcactccagccgagcgcggcccgaccccgcagccgtgcccgccccgcgcgacgcttggcgcctagctgccagggccctgcagccaccgaaactttccaacagcccgaggggcggcaggccgggaactttcctggggcagcgcgccgccgggaagctcaggggcaccgacggcccggaggtgtcctcgcgccgcgctgctcctgccgcctcgggggtgagagagggcgcgccacccggacccccggcctgggtccccctccccacgccgccctgcgccccctcggtgccggtgcggagacatgtcatctccactctgagggagactctgctcggtttgctggggagtcgccctgggcaggtggcctgagagctccagcctattttaatttttaaataattaaatattggctgcttacaatatttcaccgtttcttagctatgtgtaatgtaacatacttaaaatggaactaaaggacttcagctccctttccctacatccaggcatatttagaaataaggaaaagaaaggtgccccgtgggtattttttagagtaggctcttaatgctgctgtctaataacctcaggtgagtacccaggctgctgtgggggaaacctcccctatggtatgggccaggggggtgcagtgggagcctccacctctcccgaccttagcttctctggggtagctgcctttacttcttcctacttcttaactactgccttatctgcctttactctgggatctgggcggtgtttagaggtctggtccaaacaaggcaggtgttacctatcttgtactcactctattggagctgggatggtgctgaatgcaggggggcagtcagcgctctcttgcccggtgtgccatgccagtggccggtcagctcctaagcaggtgatccaggccttagatcaggcgacagtgtgagccgcagcgtgtctgggaaggcatttcccccagtcttgccccatcctatccgcaatgtctgctcccagctgtcccctgtccccaccctacccccattctggggtccaccagcgcccagcagaggactgggcacagaacattcgctaagggactcaagtcccagctgagagggtagttgagcacagccaagccagcccctgcccagctcttggctgagctgccctgtcaggcttttcagcataaacacaaggaccttctgaccaaggttcctcctgggagaacaagttct

SEQ ID NO: 97048 - DNA, 90511 bp, Homo sapiens
  misc_feature (1)...(90511): n = A,T,C or G
gggcagagctcaaggaatctttaagaagccccttcaagtgactctggtgcacaaagagaactcctagtatacaggactccaaatatgtgtgtcatgctggagcttcatgaccaggttgtcaccgcttcaacctgttagaactttccatccaaacctgtcttactccaaagtgcctttgtacttccggaagcagggatccctgtcgtggggattactccgaagagggaaatagctgcttcccactccgggaatttaagacaaaggcgaatatcactgctgcatcatgtcggctgctcctaattctgcccttacgctgtgctttgtaatctctaacccgccgactcggcaggagaaaaatttaattcggtcacagaagcactacacaggaccctaggccttatcactttcccagggtggaggaaacaccaggtcggggagaaaagcaagaccaggactggaaggtcctctgctagtacgccctcccctcaacctcccgaccttcctcgccgcctctcttcctgtgaccttgtcgtgactccgtgaccggagcgctcgctctcctatcccgcctcgcctgccgcttagcccgctcttcagaatgttccaagctccggggaagctcccgctcctcgctccccgccgtcgggcccagtcaacaccctcctggcccccgtctctcattaccaccccatcagcgagtcttccccgctcggcaactcactccacaagcttctgctccatctcctcgctggctccgtctcccctcacccgaaggaccctaggcctcggctcccgactcctctcatccgcccatgctcgaggccgggcctgagccccggcaactccacctctcctccctcattcgagacacggactcccagcccccacccccaaagtcctttcggcctggccaagcgctgccccacttcttcccgccccgcggcccgagtccctggctcgcagtcccccggcttgtttcgcttacctagagcgagaaaacctctcacaccccaaccggcttccgatccctgcaggcgcacccagtcctcccggcttctccccacccacagccgtcccagccaatcagaggccagcggccgcaaaaggacgcgtgcgtgtgcgcggcgggtggggcagtgcagagcgggtcccggattggctgggccggtgagtgctggcccactaccccggctctagcgtactggcggagacagacgtgagagctcggcgcctggggttcgcgcccgggcacttgaggggctttggctcctggcccaaggactcctcagatttctcctgcccttttcccctcgggcagcggaggcgagcaccgcgaacgccgtgtcccgagcgccgccgcctgcggacgcctcacgggccgggaagggatgcgggtgaggggtttcggctgcgggtgaggttgtgttccccgacccacccgggtccgactgcttgttctcgccgttcagtaacgagatgcagacagactgggaaagaacggagtttatttctgcaacaggttacagggagaaggtcggagtaactcaccagaccaactcaaaattattaatacaagtttttctagtgcttaaatacattcagtgcatttacaagtcgaaagccaaagtgtttcactcaagccaatctttaacggtaatagggtcaggtgtctagacaattgcttcagagccttggaaataatctaaagtgggtcctggtacaaggtgtgcaagaacaactccattattttaattaaactctaggggttgaaaaagctcaggcgggatcctaatggacttgtctttacattctagcctttctcctaaggcaccagtttctccaatgtttaacttatacatgcatcagaatgacagtgaggcgttggtgagagctgctctggttgctaatggagatctggcctgccacagtgggagcagagcttgcccagtgcgccgggacgactgcgggctccatccattccgctcccagggcggttgtcggccaggaccgtgagctgtcaggtcccccgcgggatccttcctggagcttacactatagtaggaggcagccagtacttgcaagcacggggtcgcgggaactacgacctcacccaggccaggcgacctttctctcaagaaggagatgtcagaggcccctcgtgacagcgagcttccggggacagggctcctaatgtgtttgtcaagtaaataatgagtaataatccggccaattggtgggtcaacgaaaaaagtcaaactctaagatatttgaagagatttattctgaaccaaatgtgagtgaccgtggcccctgacacagccctcaggaggtcctgagaacatgtgcccaaggtggtccaggcacacttggttttatacattttagagaggcatgagacatcaatcaaatacatttaagaaatacattggtttggtccagaaacgggggacaactcaaaggcgagaggggagggggcttccaggctataggtaaatttaaacattttctggttgataattggttgagtttgtctgaagacctgggatcaacagaaagggaatgttcaagttaagataaaagattgtggagaccaaggttcttttgaagtcttgtagtggctgcctttagagacaatagatgacaaatgtttcctattcagatgtttgaaaggtgctagacttttaatctctttaggattggggggcctggaagaaaaagatctagctatgttatagggattctttacagatgagaatttttccccgcaaaggacagctttgtatggccatttcaagatatggcaaagaaatatgttttggggtaaaatatttttattttcttccttgtcttataatgttatgccagagtcaagttggaaagtaagtcacgatatatagagttaaataaaacccatttgatgataacttattatttgtggggcatgactccccagaccccttagataggaatttgggcatgataaaaaaaatcagagcttagtcctcagatgcaaagcatctacaactgcaccatggagaaatctgtgattaagttagagtttcttgatataaccacaaaacaaggcagactaccaagtgctcgtcatacagataggaactaaatgtcatgggctcaggattttgaaaatcgttcatctcataattaagatacatgtaagaaacatttcatgctatggatgattaagaacttcatacttcgctgggcacggtggctcacgcctgtaatccaagcactttgggaggctgaggcaggcggatcaccaggtcaggagatcgagaccatactggctaacacagtgaaaccccgtctctactaaaaatacaaaaaattagccgggtgtggtggcgtgcacctgtagtcccagctactggagagactgaggcaggagaatggcgtgaacccgggaatcggagcttgtagtgagccaagatcgcaccactgcactccagcctgggtgacagagagagattctgtcaaaaaaaaaaaaaaaaaaaaagagagaacttcatactttgattatatggtagctttcagctccttgaaggcacatattttgtctggatgatcctggtatctccttgaatgctgcctgtgtgctcaatagaaattcaataatggtaaatgaagaaagatgtaaatgctgcaataactggagggtttaaaagataagtagggatagtcaggaactataggataaaccccactgccttcaatatgaaggtcaaccggaagtcattagtctcttgattctgtaaacacaaaggctaatggcagcagtgaccaaagcatattcatttctgaaggcaatgtatatgcctcaaactaacatcagctaacttgttaatttccagagaataagatatactgccccatcagcggagagcaactagttggcaacatactagccgtgaccttggatttgatttctcaaagtgtcacttttttcacttgtaaaatggggggtaacatgaatgatggttaaagaggaaatatatgtagcatgttagccccatgcttggcatgaaaaatgttagctattgctttaaaaattccttgctgtgtactgtgcaaaaagagtcagaccttgcccttgaagctgtaagtataagcaccttttaaaccaattactattagggctcccaatccagaccccaagagagggttcttggatctcctgcaagaaataattctagacgaatccatagagtacagtgaaggcaagcttattagaaaagtaaaggaataaaagaatggctactctataggcagaatacccccaagggctgctggttgcctatttttatggttatttcttgattgtatgctaaacaaagggtggattattcatgcctcccctttttagaccatatagggtaacttcctgatgttgccatggcatttgtaaaatgtcatggtgctggtgggagtgtagcagtgaggatgaccagaggtcactctcgtcgccatgttggttttggtgggttttagctggcttctttactgcaacctgttttatcagcaaggtctttatgacctgtaccttgtgccaatctcccatgtcatcctatgacttagaatgcctaacctcctatctcatcctgtgacttagaatgcctaactgtctgggaatgtagcccagtaggtctcagccttatcttacctagcccctattcaagatggagttgctctggttcaatcatctctgatgattgattggtataaaggtcaaatagctagtaagtaatagaggtagaggactgtaaactaggaattttgattccgctatattttaggaatatagtatcgctcaacagcaagtaatttttaagacatagaaaggaaatacatttttatatataagctggactctattcataatattaaaaaataaggatttagacaaattataggatgacagatccacatagataatttaaggaagttagatatgcactctatggctacaactgtgtggaagatgcacatttgtcccccaaaaatctctttattgaggctactggtatacactacttggtagaattgtcattagtctgacccagtttgaatgacggttgaatttaggagaaaaaagtcccatctttcgacaaaagtgtaccagccctgtcagtttaagggagaaaacataaacagaggcagtgtaggggtggaaaggggatgatccctttctttcccatcataagcgttacagctaacactcctataacaaaagacaggttaacaagagaaaattactagcctggacaacatggcaaaaccccgtctctacagaaaatacaaaaatttgctgggtgtgatggtgtgcctctgtagtcccagctactcaggaggctgaggtgagcagatcacttgagcctgggaggtcaaggctgcagtgagccaaaattgtgccactgcactcagcctaggccatagagtgagaccctgtctcaaaaaagaaaagataaaaacaaaacaaaaacaagagaaaaacattataaatgtactgtatttgatcaaggtttgttttgtttgtttgtttttgagacagagtcttgctctgtcgccaggctggagtggagtagcgtgatcttgtctcactacaacctccgccttccgggttcaagcaattctcctgcctcagcctctcaagtacctgggactacaggtgtgtgccaccacacctggctaatttgttgtattttagtagagatggggtttcaccacgttggccaggatggtcttgatctcctgacctcatgatctgccttcctcagcctcctattgatcaaagttttacatgatgcaggagccttcagagtgaagacccaaagatacaggtgactctgtctcattatatgcttaggtttgatgaaacagggacagtcgtgtagaaatgtgattggacaacaaaggatatgagctaatggtaatagaaaacctagcaagacctgtctgttcagattcttgaactttctttcgattgtagcatttctcctttcaggatacagtacgggatcctttctggaatggaggtcttatgagctgctattgaacacggcaggtgagagaatttctttatggccaattcttagacaaaaagtaggggaagcggttgggcacagtggctcacgcctgtaatcctagcactttgggaggccaaggcgggtggatcacgagctcaggagtttgagaccagcctgaccaacatggtgataccccatctctactaaaaatacaaaaattagccaggcgtggtggcgtgcacctgtaatctcagctactcaggaggctaaggcaggagaattgtgtgaacctgggaggcagaggttgcagtgacccgagatcgcgccactgtastccagcctgggcaacaaagctagactccgtctcaaaaaaaaaaaaaaagttggggaagcttagaggttctggtttctgtaatcagccttggggaagaggaattctattttctatgacttgcttcaggagagaatgagggtatgacagatagacaggagggtaagacaggttggttagaaactttgcttctgaggctgcttctgaggccttcactttggggtatcattttctgagccccaacagcaggaaagaataaataataggaaattagaaaacagtattgacatagatatttcctgaattctaaagtgattcattgtttaaaaaataacattttattggaattaattgcagaatatctttcagtctgttggtaatgcgattaagttgcagaatatctttcaatctgttggtaatgtgattggaatgatgagttaggagtcaactaaccatttcaaacaaattaactttttgttgaaattktttaaaaagactgggtgtattgataaactgatgtgggatatgataagatttctcttcaaataatctgatcaatcttttattctttaattcatagtacccccccccaatttttctcctttttcgccttttttcctctttgcctttgttaaatgcccaggcacgccacaataccacgttttatcaataccaacttacattcctttccttattaaaaaaaagactaactttctagctcattacaaacaccctttcccctttccctccactttttcttttacatgctcaccctatctaaaaaaaatcgaatgtttagccaaccaaaattagtttaaattgtacgacccgaccactaccaataaaaaaagaatacaaaggcaagacttgcgtcaaaaataaaggccctcgtgcccctttgttcaagtgcgctctcatggcaactggccgaagagacacccctctgcgcaaaagtaaaattgcttcattaaaaatcctttgttcgagtgttcaatttccttaaaattgtaagggtgattcctaacaccgacttcatttcctcattccttttttgagatagagtctcgctctgttgcccaggctggaatgcagtggtgcaaccttggctcactgcagcctccacttcccaggctcaagcgattctcatgtgagtagccgggattacaggcatctgccaccacacccggctaacttttgtatatttagtagagatggggtttcaccatgttggccaggctggtcttgaactcctgacctgaagtgatctgcccacctcagcctcccaaagtgcctggattacaggtgtgagccacagtggcagrccctcatttcctcattgttttgaaacaaggcacatacattttctgtagggaaaagaaagatcagactgttactgtgtctatgtagaaaaggaagacataagaaactccattttgatctgtactaagaaaaattgttttgccttgagatgctgttaatctataactttagccccaaccctgtgctcacagaaacatgtgctgtatggaatcaaggtttaagggatctagggctgtgcagggtgtgccttgttaacaatatgtttacaggctgtatgcttggtaaaagtcatcgccattctccattctcgattaaccaggggcataacgaactgcggaaagccgcagggacctctgcccaagaaagcctgggtattgtccaaggtttcccccaactgacacagcctgagatatggccttgtgggaagggaaagacccagccgtcctccccagcctgtcacccgtaaagggtctgtgctgaggaggattagtaaaagaggaaggtctcttgcggttgagataagaggaaggcctccatctcctgcatgtccctgggaatggaatgtctcggtgtaaaacccgatcgtaaattcctcctattctgaggtaggagaaaaccgccctgtggctggaggcgagatatgctggcagcaatgctgctctgttactctttgctacactgagatgtttgggtggagagaagcaaaaatctggcctacgtgcacatccgggcacagtaccttcccttaaacttatttgtgacacagattcctttgctcacatgttttcctgctgaccttctccccattrtcaccctgttctcctgccgcattcccctagccgagatagtgaaaatagtaatcaataaatgctgaaggaactcagwgaccggggcctgtgcgggtcctccatatgctgagcgccggtcccctgggaccactgttctttctctatactttgtctctgtgtcttattccttttctcagtctctcgttccacctgacgaggaatacccagaggtgtggaggggctggcccccttcagttttctttccctcagggttgtatagtgcataacggcccttgtttggctaggagtattgtaatgggactgcatttgttgtgccaagcccttactgaaactaatgtgatggatacaatttatttcctagatagtcatactttctaatattgctttatgagagagacaaagtataaatgtttaggaaaggtttaaagcaatgcattctaaatttttttctgaagattgagtctcagtgttaggtattaaaaggggccttaaagctcatctagtccatttcctttcttttaatgaaaatacagtttttgagaatgtaagtggatgttttagatgacacacttacaggcagaatctgaataactctgccttcctgagaactagcccagtgctctgtttgcttgcttacctctccaggtcatggaatcagacctcttagtattccatgcagcttaaaactgaaaacctttaataaaagtggttgggcaattttcagccttttttttttttttttttttttttgagatggagtctgactctgttgctcaggctggagtgcactggcataatctcatctgacttcaacctccacctcccaggctcaagtgatcctcttgcctcagcctcctgagtagctgggactacaggcatgtgccaccacatccggctaatttttttgtatttttagtagagacagggtttcacctttttggccaagctggtctcaaagtcctgacctcaagtgatccacctgcctcagcctcccaaagtgctgggattacaggcatgagccactatgcccggccttcagctttcttttggttctaatcatatatgtggtaaagtgattgayttagacagttatgttaatgtgaacagtgctgttaatgttattgaatttgattaaaataaagctccataatttattttattttatttagcattagggcctttgggacaaaatatgaataacgaaagcaagataatttgcaaataagaattagtccaagagctatagtatgttttgggtttgtttttgggtttgattttgatctgtttttaaataagtatgttatagtatctaatattaacttaaaatcttggttcagtttgccctacataatctattctaaaaatatatgtattggtctgttctcgcaatgctagaaagaactacctgagactgggtaatttataaagaaaagaggtttaattgactcacagttctgcaagttgtataggaagcatggctaaggaggcctcaggaaacttaacaatcatggtggaagatgaaggggaagcaaacctgtcttatatggtgggatcaggagaaagcaagtgaaggaagaagtgctacacacttttaaacaaccaggtcttgtgagaactactataagagaacagcaaggagaaagtccacccccgtgatctaatcacctcctaccaggcccctcctccaacactgagaatgacaatttgacttgagatttgggtggggacacaaaccatatcatacaaattcaagagtttgtaacttggtacaatgtgcctttattattttctgcatcatgtgcatacttcactggttcacagcataaagactgaaaactgccatatttattaggaagttgtattttgtttttcaagctctgttgaggaatagatggaatttgttccatggtgagctgtttttaagttttcgcagtatcattaatgaccccagtctcattctgggaaacttgaattctccttgcaaattctaagaagttcacactttacccaaacttaatgtaataacgagagacaacatctgtttatgcctagttatttgaggttttgttgcctgtttgtgggagaaattctctccttctgattagtatgcagaaactaaaatcttggtgaatgatggtgataaatatctgaaacataatcagatgattcagtcaatttttggtgaagattattctgctacactttataccatatcatgttacaagaaaatgacaatgacacacttacatctttcataatacagacattataattggtaacaaacatgcaacatctattattccattcttcgtattgggygtcattttgaagtataattgatgcagaagacttaacacattatttgggttttcaggtattaaaccaacccacctgtaatttatagaaagaaaggcagcacaaaaagtgtctgccagctttgctattttcccctcttcagagagcctctgtgacttttcatgctgcaaatagctgtctacacatgatcgtatcttccataggagaaacaggcttctaaattcagatgtctgtttatgctgaggcccaactaaaagctacattaccttgttcttgacatcctttttaaaaagtactgtgtgatctttgtcgaactttgtttaaacaaaggttaaaccttttgagaaaattggtaataattaccggtgtttttataccagatttgggagtcaccatcagcaattattgaatacgtacattgtgccaagtacctgtactagattctgaacttaaagactcagtccctgccatgaaataatttataatctaagtaggtagaaggaacaagtatatagaaataacaaagacagtttataagtactttgaatgaaatttcaggtagatatcacagtaagtggagcagtttcaaaggcttcttgggactggggcttaagtgggccttgaaggatgactaggatgtaaataaattgggaggatatttcagaaacagcaaacagagggcagaagaatagaggcagactctgggattgtagctgtgtcacagaggacagcaagtgtgaaaaggcaaacatttgtgactagagcagagtcagagagaataatgaaaagtgagtcactgtggggaggaccttccatgttaattaaagaacctggacaatgttctattaggtgccgcctgaagacgttggagcaggatgttgacaagagcagagggcatttgaggttattggaagtgaaatagaatggattagaaagggagtgtcagccttagccagaaaatttaaaactattcagtaataacccattacatactgtgtattgagaccattttccccttggtcttaaggatgtagaggtagttacatgcagtagtgttatctctacttcttgacaaggactgccactttgaggcagcaataatctttaaagaccagtccccagggagaattggctaggggccaggccatcagaagattccatgtcagaaaattgccctaacaggctattcataatgtgttccaatttagtaccctttacactgcagagtcatggaatagtacttaagctgttcattttagacaaaaatacacttcccagacacattaattgcatgtttcaaagttgtatttaaaacttgcctaaaaggtaggagcttttaagtaaacaaaaaattttctcttggcaaaaagtaaccagactcttccttgatctgcttattcaaatctatcaggtgttttataagaaacactaatatttttccagaaggaccagctggcatcatatccgaccatgttctgctaaggtgacaatttttctttctcacactttatgcattccagaacattaattctcaagggaggtacctggttcattcctctaccctttaggaagaacagctctaaaatgaaagctcaaaactctccagagggagaaaagtcacagccacttttaatttggtatgagtcaggctccacaggctctggggtttgctttgctgcttactagttatgtgacactgagcaagttaattaatcatcttgtacctctgtttcttcatttgtacaataataggtcctacttagtaggactctggggagtgttaaatgatatataaaaccccaacattaactggcatatagtaagtgttatatgtgttaattgttacgacattctgtgggtttttttgtgtgttcctgtagatactactcagctaacctataaacacaattgatagtttcktgtgtgtgtgtgtgtgtgtgtgtgtgtgtgtactttgcattttaaaatgtcttttggttactgagggtttccatraaaatcataaatataagatgctcaccatcaatatggtgtacttcagcaaagaagaagctaggagctagaaaccacctttgatctctttagtttacatagtgtcttaccttttatattgctggtttcatcaactggttcccattagcaaccaaagtggcagcaggatttgtgtgtttatgtagtgataatttttgtagtgaacaaaaatattatactttaaatattttagtcttgaattgacttttccgctgaggaaactcagtggaaaaagtcaatgaactgaggcactcagttcattttttttttttttaaggcagagtcttgctttgtcacccaggctggagtgcagtgtgcaatctcagctcactgaaacctctgcctcatgggttcaagtaattctcatgcctcagcctcccgagtagctgggattacaggtgtttgccaccacacctggctatttttttctatttttagtagagacagggtttcaccacgttggccaggctggtctcaaactccttacctcaggtgatctgcccacctcagcctcccaaagtgctgggattacagacgtgagccaccatgcctgtctagcactcagtattttttattgctgttggggacagcaggacacttaacaagtactaatgaaaaaaaaatttggtagagtggaaaaggcactggctttgggcccctggattgctaccaggcctgaagtcaaaagacacggctttgaataacagcttaaatgcttatggacattatgaccttgaacacgttatttagcctcacatttttcatcaacacaatggggatactagtaagtatatgccttataggatagcattgtgtgatctaagtgaccatacataaggcaccaagaagagtgcttgggatgtaatagagcctcagtacatgttagatcctctcaccaaaccaggccccttcctcttgctgctatcttcttaagcattaaccagcaatgcaacctcaagcaagtcacttttcttttttagaccgtgaagttttctgaccccttctctaaatcaattctctcatttattcttgttcagcctcgacttccattcccctgatatccccactaaccgttttcacagagagcattgaaaaattctctcagcttcctcctctcttaccctacctgcgtctccatcagtcgtttcttctggttttgggtaccctcctcccactgaacacccatcaaaccctatgctctggattccatcattttttgccattgaatctgtcagctttttgctctctcacctgtaatttcagcctctcctcgcccctgcatccaggcttctcatactcttccatttaaaaaagattccttcctagattcttcatcctttctccagctattgctctcttttctttctcctcagtttaggagaaaaaagtgtacatatcatcccacatcttccccccaacccagctctctcaacccactggtttccattcttgtcacgctactgaaacaacaatagtaaaggacataattcaatggacatatttcagtttctcagcccatatcttacttgactcttctatcatatttgacattatgaatcttccattgacactcttcttctcattctccttccagtctggtcattctttcttagttacagkgactgaatttatttcctgtgtcccttaaatattggtgtgctctagggttctgtgctctctttccttcttactctctgcccttctcttagagtaatctcatgtacttttatggttttttattctcatctgtatgctgatgttcttttctctcctctgtctgccacacttcttgcctgtgttccagagctatctattcaactgtgttggacgtcttcactttggtattccacagactccatgtgtccataaatgagccgtgttaaccatctctctcctcccctcttctctgctctctacatctctctccgcacaagcctgcactttctcctaaattccctgacgtgtttgatggaacaactgtccatcccattcaccaaacatgaaagctgggtcaatccctgatgccacttcctcctttcttcacatccagccagtgacatctgagcagagaactgaatgaccaggggtcagctctatgaagatctaggggaagagctacagcagacatgagactgagttttcactttcatagtgatgtgttctgagcaaactggcccagaattggctgcttcctacaagcagtaatgttgagaggatcatttacacaggaaagcacttaaacagatcaaataaggaaagacattggcataatttttttgagacggagtctcactctgtcacccaggctagagtgcagtggcgcgatctcggctcactgcaacctccatctctcgggttcaagcaattctcctgtctctgcctccagagtagctgtgattacaggcaagtgccaccacacccagctaatttttgtatttttagtagcgacaaggtttcgccatgttgatcagactggtcttgaactcctgacctcaggtgatctgcccggctcggcctcctaaagtgttgggattacagatgtgagccaccatacctggcccatagattgtttttactgacaacattttcaaacaaaatgctgtcaggttgtcactaaaaaatggatcttggattctttgcagctcctcaaattcctttttgttctttctgttagttctttgctggggtgttggtgggggaaatggggrgcaggtgggatggtgggcacagaattttcctgactaagccgaagctctcctgcctcttttacttgttctgaagacttttgaatttgagattaacaacacaaccatcacctcttaaaagtctgtataactttatcttgcatatattttgttattaaatatgtcttttagtagagaatgagtaggaagactttggtctttataatattcagttttatgtgggttatatcctgatttttaaagttagaaactcataattttatgtaattctatgtaactaaaaagattgatttgtttttataatctatatttgtataagtatgggactagattacacaaaacaacattgatcactggaactaagagctttctgttgaccacaggcaaacagctctttccagtagaaaagagctgggctccctcactgtttcctggctctttccagtagaaaagagctgggctccctcactgtttcctggctctttccagtagaaaagagctgggctccctcaacacggtatgatattgagttccatgattatgcatgtaccttgggttacaacccccctggcggcagaacctctattgtgtccttctttgtattgcccacagagcctgttggtgacctgcacacaggagccctccagtcagtactgattgaattactcaaggctgcctctctgcaaagttgaggtaagcagctgagttcaatgatgctggctgcattttcagctattggggctgcagtagctaggcaggggctgcaggcccttctggctttttagccctcctgctcacccaccatttacacagtcttcctttcagagcccccctttctcctcctgcacttccttgaatattgactgcctctctgatttccctcactttgtctctcccaaatattagggctgtttttatggtctgctaattctgtgagaatgaggtacctcttctgggaggcactgccacactcaatggcactgcaaacaggtttttattggctcatctccaagctctccaagtcattctgccctcatactgattatgagacaccatctgtttatcttgattgcataataaattgaggactcataaatgtagttgacatctaaattagatccaaatcacagtaagaacaggataatggtctcctttgtcagagatggatgaataattacttttatagctctggaagaaaaatgggttatgcaaacagatacttcacccaaattggtttcctgagtgactctccgtatgttgatgtttttgctcagggacaggaacctgcctaccctgtttcagggaaaaccagaaaagaaatataatctgctttgggagtctgaggcggatggatcacgaggtcaggagatcgagaccatcctggctaacatggtgaaaccccatctctactaaaaatacaaaaaattagccagatgtggtggtgggcgcctgtagtcccagctattctggaggctgaggcaggagaatggcatgaacctgggaggcggagcttgcagtgagcccagatcacgccactgcactccagcctgggcaacagagcaagactctgtctcaaaaaaaaaaaaaaaaaagaaatataatctgcccaacccaacagtcaaatgttagccaccaatgtccttgtgttaccctgctttctgagggccagaagagattttcaaagattatgagcactaaaataacagtaaaaaaaaaaaaaaaaaaagctagtaaccttggcctgttgcctagtacaatatagctgatgagaaggaaatcacaaggcagtgggactgggctaaggtgcagcttgtgagttctctaggaattgggtgggttattgcttaaggacagttcatcaatagtttttttttttttttctttgagatggagtctcacactgttgcctgggctaaagtgcagcggtgcgatctcggctcactgccatgtccgcctcccaggttcaagtgattctcctgactcagcctcccgagtagctgggattacaggtggctgccaccatgcccggctaattttttaaatttttagtagagacgaggtttcactatgtttgccaggctagtctcgaacgcctgacctcgtgatccacccgcctcggcaccccaaagtgctggtgctaagattacaggcgtgagccaccatgcctggcctcatcaatagttttaaaagacctgttacgatttctggctaatttgcttttaccgttaattcagaatgcttgtgatccacaggctatagtgagtgagttgtccctggcatcccttttccttacatacgtgttccactagaagcaagaaaaaccacatacagctgctcagtctgcaatacgccaacagcacacgcacacaggagtcctgtttagctcacttccatttcctacgtgcactgctgcacacttgacctacacacttgacatacgaaagtgtctctgatcatttaaacaactctacaagtgtgtattattacccccattttatacaggaggaaactgaggttccgtgtggttaggtaacttgcttgggtttccatagaggcagaggtagaatttgaacccagtactgtttagctcatgccctttctggaacactctcttgcctctctatcttttctttttgctgcctatgctcagattgttctctctcttatagaatatatatatgtttttgttttttttttagagagagtctcgttctgtcgcccaggctggagtgcagtggcgctatctcggctcactgcaagctccgattcccgggttcacgccattctcctgcctcagcctcccgagtagctgggactacaggggcccactaccacgcccggctaatattttgtatttttagtagagacggggtttcactgtgttagccaggatggtctcgatctcctgacctcgtgatccgcccgcctcggcctctcaaagtgctgggattacaggcgtgagccaccacgcccagccagaatatacttttcaatcttctctttcccctgtcagaatctttatcaatcaaaacttttgttttgaaatacatatatgtatatatttacaaacacatacaacttaggtttacatctatatttatttatatgcattgacttctaggtatttatagatagatagagacagatwtaaataaataaataaataaataaataaataaaatatggaaagatatactcctcaaatagtaatggtggcwttatctgaacrgtagaatacttcgtgatttttatttccgtttttaaaaatatatttatgaaactaaatttatattattgctataatcacaaaacaatttttaaaacctttcacatccttttaagttcacatgtcactacctgaatagaatctcttcccagtctctaaattaaagctctctgtccctcttttgaaacacactcccttttcctagtacttgtattttcttgagtcacttctagcattttgctttgtattctgtgtagcctcaacttcccagggcccactaactcagagagggaagaatacaacaggcacagttaaaaataaaaacaggctgggtgcggtggctcacacctgtaatcccagcactttgggaggccaaggcaggtggactacttgaggtcaggagttcgagaccagccttgccaacatggtgaaaccctgtctctactgaaatgcaaaaattacccaggcgtggtggtgcacgcctgtaatcccagcccagctacttgggaggtggaggcaggattgcatcactgcactgcagcctgggtgacagagcaagactccagctcaaaaaaaaaaaaaaaaaaaaaagaataaaaccagtaacagaataattgttattccaatctgccccccttccccagtcatgaaagctaggatctttttgctgtatccaccagatctcaggcttgtgtctcttcccctctctgtagtcttggctgtgtgtccaccacaacactgttcctttgatgtgagtcaatcattacgctcactccagtgtttgtttttgcatgatgctgtccccttcctttcacttggttctaggctaagccccattattccaccaggccccacatggtctaggctgtgcctcctgtcttcactttgctgaagtggcgggacagtcttctcctatccaggtttcacttttaaaaagttatcccttcctcttgttttcttcatctccgataaagcctagcatggagtgacttttgcgtttgagtttttccttttgtttcttacagcatcccctcccctgccaccttgcctaggggaatttgtactgaacttggtcaggagtcagagtaatctgtctcaatatctccctctcctcaatcaggggctccagacaaaaggatgctcaactgctttctctcctgtctgggagatcagggtgtgaccttcattctataatttattcaagtgtctctctcctgtgtagcctgtcagccttcgtgtctccagtcattctcttcctagacagacttgtctgggatgttcagaactggaagtttggtggcttgcccygacatgtccaatactcagtaagcaagcagaacttaccctctttgggctctctgcactgtgtgctcttctaagccatgcaatcaacttctaagaccataagaggggagctaagcaccattcagctttgtatatgccctgagggaactaacacagttgcataggatggcaagaaacctatacatttttgcggaatgaattaataaaatctattgacttttgtgctctrcttttctcccttaactttattgcagcaagcaatcaaataaaggtaattagtcctagtttgttctacactaagtatatcacactgtgattctgatttcataacttagatctgagttttagaacactgagacaatcacagtcgtcccttcgtatccacaggggattggtttcacatctgacctcatgtgataggttgcagtcaaaacccagtcaaaactttgtttcatgcacaaaattattgtatgaagttaacttcagactatgtgtatgaggtgtatatgaagcataaataaatgtgtttaaacttgggtctcatcccatagatatctcattatttatattttgaaatatttcaaaatccaggaaattccgaaatccaaaacacttctggtgccaagcattttgaataagggatactcaacctataatacctaatataatgtaaatgctatgtaaatagttgttatactgtattttaaaaaatttgtatttttttattgctgtattgttatttttaaatttttttaaaaaatattttcagtcctttgttggttgaatccatggatttggaacccatatgaatacagagggctgactatatacataaaatttggcctcttaaattatgcaatttaatataaccacaaagttgcacactcatcacactgtctaaaatcagaacatttttcatcatgccaaacatgagtgacacacattagctgtcacttccatctccacaccttccccctgccccwtgaatctattttgggtatttgcctattctggacatttcatataaatggaatcgtacaatatatggacttttgtatcagatttcttttacattgtatartgttttcaaggttcatccatgtcatagcatgtatcgatactttattccttttaaatggctgaataatatttcactgcatggatataccacactttgcttatccattcatccattggtagacatttgggttgtttccaattttgggccatcatgaataatgttgggaacatttgtgtatatgtgttttcctagggacatatgatttcaattttcttgggcatataccagaccatatgtttaagttcttaaggaattaccaaaattgttttccratgtggctgtgccattttacattcacagcagcaatgtatgagggttccagtttctccatgtttctctttttgaattatagccatcccaatggatgtgaagtggaaaatcaattggccatggatacctgggtttatttatggactctcagttctattcgattgatctatatgactattctgatatcagtactacacagtcttgattactgtgactttgtagtaagttttgaaaaaagaagtgtgagtccaactttgtcctttttcaaagttgttttggctattctgggttccttgcatttccatgcgaattttataataagcatgtctgtttctgtaaaaaatgcagttgcaactttgattgggattgtgttgaatctgtagatcaatgaagggagtacatccctcttaacaacctttagtcttccaatccgtgaacatgaaatgtaattccacttacttaggtctactttaatttctttccatgatgttttacagtttttagtgtataggccttgcacttcatttgttaaatttattcctaggtatcttattttttctgatgttatcgtagatataatagttttcttaatttctttttagtttatagaaatacagttgctttttgtatattgatcttgtatcctgaatgttgctgagataacttgttagctctgatgtgtgtgtgtgtgtgtgtgtgtgcgtgtgtgtgtgtgtatttcttaggattttctatatacaaaatcatgtaatctgccaatagaggaaatttcagtgcttcctttccagtgcaaatgctttttatttttcttgcacaactgctctgactagaaatgccagtacaatgtcaaataaaagtggtgaaagtgggcatctttgttttgtttgtgatctgaggtagggagggggaagatttcagtcttttaccattaagtgtgatgttagctctgggtttttttttgtttgtttttttttttttgtagataccattaatcaggttgaggatgttccctagtttattgaattttttttttttttcaatcaggaaaggtggtgaagattaccaaatgttctttctgcatctgttaaggtgatcatgtggtttttgtcctttattcttttcatatgttgtcttacattgtttgagtttcggatgttgaacggtttaaccttgcatgcctggcaaatagcttaactagtcatggtgtataacccgttatatctgtagttggatttgggttgttagtatgttgtttagggagttgtgtgtgtctgagaatctatatatggtccataagggatattggtgtgtagtgttcttttcttgtgatgtctttgttgggtttttgtatcagagtaatactggactcatagaatgagttgggaaatgtttcttccccttctgttttttgaaagagtttgagaggattagtggtaattctttaaacatttggtagaatttaccagtgaagtcatctggttctgggcttttctttgtgggacattttttgattactaatgaaattcctttctttgttataggtctattcagattttctttttcctcttgagagagttttggtagtttatgtctttctagaaatttgttcatatgaattatctaatttattggcatacagatgttcatagtattttcttataatctttttttctatagtgattytctctcttttatttctgattttagcaattagagtcttctcccttttttcttagtcaattagttaaaagtttgtcagttttgctgatgttttccaagaacaacctttggttttgttgattttctctattgtattcatattctctcattcatttgtactccaatatttattttgtctttatttttgcttgctttcagtttagtttgcccttctttttccagaatcataggcgaaaagttagtttactgaattggggtctctttttaaaaatatctgtattcacatttctctctaagcattgcttttactatgtcccataagtttggtacattttatttttgttttcattcatctcaaagtattttctaatctcccttgtgatttcttctttgacccattggttatttaggagtgtgttgtttaatttccacatggttttgaattccccaaatttttccttctgttattgattgagtttaattccattatggttggagaagatattatatatggtttcagttcttctgaatgcattgagacttgttatatggcctaacatattctctgtcctggagaatgctgtatgtgcacctgagaagaacatgtattttgcagttgttgggtggagtgtcttacttatatcagttttaggtattcacttttcacctggttaaacattattcattctttgagtcacaggtccaaaggatttcttgtgtcaaatatttcttaatccatctccctaagtaaaatgtagtttcttcatttgaatttctataattctgccaacacctataactgtattataacttttattccaattcagtctttctaaattctgatgttatgggtttctttgtgcagagccatgttgtaactgtatctccatatcactgaaaccttacttctagtggtaactttaaagcatgtcatcgaaaggctgaaagaatctgctggttattgagcactttgtcaatccagagccataaactacctacaatggattatggataaggagaagcaaggcagtgtactctgcctctggggaacctacattttagttaagagatctacgagataccaatgtaggaaacctttaagacaagatttgaccaagtgccaagatgaaggcactaggggattggacttgttcactttgtctctctccccatgcgtgggaaagaggcttgtggaattgtgaggctggaacagccctcagggtttctgatttctagtcatcatccagcctgtgcgtggacactctcacccacagggagacgcccccacactcccatttaggacttgttgatggttgtttgctaactttgggcagagcaagaaaaatgaattgccctttagctaycacacacccttcagtcttctccataaaataaaccataagcctgcaaaatcatgtgtaaagtcaacagggaaaggaaagagctgtagtcataaattctaatcccaggaggatatgtcaaaggatgcttgcattatatatatatatatatatatatttttttttttcttttcttttcttttcttttctgagacagagtcttgctctgtcacccaggctggagtgcagtggtgcaatctctgctcactgcaacctctgcctccagggttcaagtgattctcctgcctcagcctcccaagtagctgggattacagatgcctgccaccacgcccagctgatttttgtattttttagtagagatggggtttcactatgttggtcaggctagccttgaactcctgacctcaggtgatccacctgccttggcctcccaaagtgttaggattacaggcgtgagccaccgcgcctggccagcttgcattatattttgatttcagataaggaaagtcagatcaagtgactgtgagaaggtcacttctttcttctcccttccttccttccacaatgcagcccctaaaagtggcaacatcttgttttaaggggaaccaaaaggaatgttttctgagacttattattctcctagtgcctacctgtctgtgaatgttctgggaaggtctgaggatgagatttggagatatggagatttggagcggcgaatttatctcacatgccagttagacactttattctgtctaattcaggacaaagactgatgatttggggggctaatcaggggwttcttttcaagaatacagtgtgatgaagaaggttatcaagacagactgcaaactcttttctctagtaacctctgaaaatagaatcataatgtgaagtacaatacctgcaattatggtagcacacattaaatgaaataggaggataatataagagcaggcccatagttrtatatattagtggactaaatgagtgatatctttattgtgatcatcatggtcacatttattgacagtcagtttagggcaaaacactcctgggagaggggagcatcaagccatctgaaattggacggaattaaagagttagaaaaggaacagagcaggtgtcctsgtatagagtggacttgaacagggtgaaagaatgggcgatctttggatggagagaaggggagaagaaaatgagggtgagtaaaaggccacagaggttggaatgtgtaagatacacatttcatcaatgcaaaaatacmagaaggtggcaaacgtggactttggtagaggcatggcacaggaaaattgctgttcataagtccacataggtgtgtcagcttccaaacaatattagctcactagatgcaaatgaattatccacattactctgttccaggcaatagcccctattgagctagtgacaaaggtaaaccatctctgactcatcagaaattctcttcccaaagaagtgaagggagaaaatgggagtggtaggccaggaatgaggggcaattctggttggcccagggtgagtcactttccctaatgttcctaccaggagatcaggccatgagctcttggctctgctgctcattcttgtcacctttcccccatattctagctccctcgggtcactcatcctatcacttttccgatagggccgtggagttgtaccctctctaattttatagatagggaccctgtggcctaaagaggattggggcttgcccttcttcctatagcacagttgggactaggagagggacctcttgaccatcaaccccttgcatctgcactctgtcctctgccatgtgacgtaactcttttagtcttcatgccaactgagaggcaaatgagacacaaaacagaacatgggaaaacttgaaggggctgtaccttgactgcaaagggcaccggggtacatgcgtagaggcaagaagagtttaggggcagcaggtcatcctacatgaccctattctcaaaagaaaatcagcccccataatccagtttcaggtctcatattccaaaacctaaactctgaactaacaaacattgtgattctttcatagatgtctaatatttactaaacaaatattgggacttgttttcaataccctctttcaaataccccttataacagggttcatatttctcttcctgaatgttatgaggcttcctctttcctgcctaactgtcccaaggcctctcctcctccaatgaccatgtggcaatcatagagggggtcttagatagtattcctgtatcaaaggaagtatgtctaaggaattggaggatgctggtcgttagcctctgattgataagcacttcttatttatttaatttttttttaaaatagagatgggggtttcaccctcttggtcaggttggtcttgaactcctggcctcaagttatctccctgcctcagcctcccaaagggctgggattacaggcatgagccaccacgcccagcctttgattgataaactcttctttcctcttccttcattctgtaatgcaacccctaaaagtggcaaaatcttgttttaaaattttgtctgtcccctcccccaaatttggcatattgaaaacaagatatggagcaatagtgactctgagaggagaagaggtgtagtgcaggacacaagaagctccccgctggtgaaatcctgtaatgtgtttctttcaagtccccctccctgcctttgtctcctggtgatgaggtgtaagttctgccttttttcttttctttttttttttattttcagaaagtctttgttgcttcaggcaagcatcagaaactgaatctgctggggtgttggttggactgtgtggcctctctttatccctctcttcccagacccctcaaaatcaggtgcattctatatccccttaggctagatagacattctatggatgctccggtctgcatgaggaagggaactccaacctcccccaagtcagttaattttaaacattttggtcttttttctgtataatttgggattggtgtaccagaaatgactaaaaacctgtggttttctgagagtgatcctgggactataattttctgaaattaaacttcaggcaaaaaaaataaaaaaaaagagaagaaaagaaaaagaaaaacagaaactctcatcgtggccagatggarccagagatttgtgagaagacgaggcttaaagagtaaaagsctatcagtgtgcgagatgggttgaaaaacaaaaaataaaaggtgaaatccgagactgccacgctcacctaggagaagttgcaaaacctccttagtgatgttgggaaaattcttttcagtgaaaagtctcttatggacctgttaaaaatatcccaagagcaaaacagcagaccccccacctttaaaggaggtgtaccttttgtcacttaatgcctgcctgtttcaaatccaaccttcattgctttgtgacgttaaaacatttcttctttgccagctggcatgatgctaaactttatcagcagggggcgctggagggctaatttcattggccaatggcagtggtttcttgccctccagcttcagttgcccaggatgctgcttgccagttttgacccatagtttcctgcctgctagccccagctgctgagtgtggatgagctccatctagggcaacccagttgaacatctgtgccatccagtagctgcaatcgcaccctctcaaaggaggtctgcatcctagctttggggcagggctcccttctcttccaaattagtacttttgtaagtagtctccctctgcctaggatgttctttagagttctcttcaattctcttgtagtagttacttctcttcaaatagtcaatacatctttatattaaactttccctgttcaacttactgtggttactgtctcctgactctcctttcatggaccatgatgccaaaaatgcaattactagtaggtgaaaggtttgatagtttcaaaatcaagtgaacatagggaaatacatgggccttaatatcactagaaatttaaagaggcagaaccaatttattcagccagaaattatgtctatgaattttgtacttagaattggtattaaatcattgtatggtttaatggtagtgaaatgaaacacaaaactttggagactgagatttttggaaagatagagatgaccctcccctttcctctagtggcaactgcaccaagaacagcctaataccagaaagcctccatctcttaagatgtcatgacccttaattgttagaaattcattgccatcaggctaggcgtggtggctcatgcctgtaatcccagcactttgggaggctgaggtgggcagatcacttgagtccaggaatttgagaccagctaggccaacacagtgaggacctgtctctaataaaaatacaaaaattggctgggtatagtggtgggcacctgtaatcccagctactcaggaggctgaggcataagaatcacttgaactggggaggcagaggttgcagtgagctgagattgcgccactgcactccagcctgggtgactgggcaacagagcaatactctgtctcaaaaaaagaataaaaaaaaaagaaagaaaaagaaaaagaaaatgtagtgctatcaaattaagaaaatgcaaaaacctgcaccagttcatctatcagattagggcactccatcaccgcatacggaacgcacagcaatgaaatactctagaccagtgctgtccaataaaaacaggtgagccaccatatgatccgtatgtgtcattttaattttttttttgagacagagtctcactgtcgaccaggctggagtgtagtggcatgatcatggctcactgcagcctcaacttcctaggctcaagcgattctcccaccttagcctcctgagtagctgggactacaggcacatgccaccacacctggctaatttttctatttttatttttttgagatagggtctgactctgttgcccaggctggagtacagtggcacaatctcagctcactacaacctctgcctcctgggcttaagtgatcctcccacctcagcctcccgagtagctgggactacaggcatgtgccaccacacccagctaatttttgtgttttttgtagagatgaggtttctccacattgcctaggctagtcttgaactcctgggctcaagcgatctgcccgccttggcctcccaaagtgctgggattacaggcatgagctactgtgcttgggttaatttataaatttttttgtagagatgagggctcactaagttgcccagccttaaattttctaatagtcaacattaaagccctaaagagaaacaagtgaaattaatttgaatgatgtatttatttaacccaaaatataaacaaattatctcaagatgtaatcaacataacaatgagatattttgtttatttttattttttattttttaaagtattttttatttcaataggttttgggggaacagatagtgtttgattacatgcataagttctttagtggcgatttctgagattttggtgcacccatcacccaagcagtgtacactatacaattattaattattaatgagatattttacattccgttatttgtactgtctttgaaatctgacatgtgctttatgcttgtacttctcagttcagactagtcacatttcaggtgcttcatggccaaatatggctagtgactactgtactgcccagttctagaataggatttgaccacacatactacttagtgggaatgacgatttgagagatcatttaaaaaaaaaactgcattacaaaaccagacttctgtggctttattgatcatattaatattgtattttaaggccattttcttttattggatacagataaacatattagtgattatgtgtgtttttttagaaacccagattttcaaccctgtgttgagcaagtcttacaagagccattttttcaacaggatgtgttcactttgtgtctctgtgtcacattttggtaattcatgcaatatttcaaacattttcattatttttatttttattttttttgagacagagtttcgctcttgttgcccaggctggagtgcagtggtgcgatcttggctcaccataacctccaccktctaggttcaagcaattcagctcagcctcccgagtagctgggattacaggcatgcgcctccacgcccggctaattttgtatttttagtagagatggggttttgccatgttggtcaggctggtctcgaactcctgacctcaggtgatccacctgcctcggcctcccaaagtaccgggattacaggcgtgagccactgtgcccagccacattaycattattataccgctatggtgatctgtgatcaatgatctttgatgttactatgcaattgttttgggtgtccatataagacgagaacctaatggataaatgttgtgtgttttcttttttttcggtagggaagacagggtctcactctgttgcttagactacagtacagtcacacgatcatgcctcactgcatccttgacatcctgggctcaagtgatccacccacctcagccccacaaatatgtaggactatagactcgagccactatgtctgggtaattttttttattttaattttttaattaattaattaatttatttatttacttattttgagatggagtctcactctgtcgccaggctgcagtacaatggtgtgatctcggctcactgcaacctccacctctcgggttcaagtgattcttctgcctcagcctcctgagtagctgggactacaggtgcgcaccaccatgcccagctaattttttgtatttttagtagagatggggtttcaccatgttggccaggatggtctcgatctcttgacctcgtgatccacctgccttggcctcccaaagtgctgggattacaggcatgagccactgtgcccgggcaaattttttttttattattattttttgagacagtttctcactctgctacccaggctggagtgccagtggcccgatctcggctcactgcagcctctgcctcccaggttgaagtgatcctcctgcctcagcttcccgagtagctggaactgcaggcacgcaccaccacccttggctaatttttgcacttttttggtagagatggggttttgccttgttggtcttgaactcctaggctcaagcgatccacccaactcggtctcccaaagtgctgggattacaagcatgagccagcacgatcggcctgaatttcttaatgttttccttcactgggcatttaggaccttgttaaagaaggcctttcatctccagagcycatgaagatgctctcccatagcatcttctaggctttaaaacattcagagcttatttgctgtgtggtgttggtgagggctctaatttttctccccgcaacccagataaccagggtcacccagttaacagagctttagagtccacgttgctttccgttgctcacgtcttcactgactgctctgttcatctgcctatctcagaatcacaccctttctccaggaccactctycttctgctggaagtacgttcttcagtgagttccttgagtctcactctcctgagtttcgtgttgtgataaattctgtttcccatctggaaatgccctttaccgtgagcagattcttgaacaaccatcaatttcaactcctgattctaatttgatggtgaagagtcccaagtcacactcactgtatcccatggcttccggctcccactgtggccactacgaagtctactctcagtctcagcgtctgctctctgtaatctgtgctttttccttggctgcattaaagatcttctctttgcctttggtgtgctgcaatttcattatgatatgggtgtggatttctgtgcttcctgattctgcgtattcaacctccactgaaatgggtgactcgtggttcccaggtccctccttcctccttctgcccaccygagcctgggcatcttactrtggggtacagttgggtgaasgagcatcatagaagcaccctagaagagatgattggtgcattagaagctgtctgccaggtctgagttgtgttatgcttattctctgggtagtctgaggcaacccctgagaaaggcaggtattactacagtcagaagaactgctccaggaatgcattcctccccagaaaaatctcatatctaaactgagagtaattcacgtattatggaacaattttccaaacatatatataaattacaaaccacacctctctcccacctccaaagttgtgatgagataraagcaaaactgtagcaccagcaaaactaaataaaactttgtaataaggctttaagtgccctgaatctcttccaaggatcaagatgaaccctagagctgcaattccacaatccaccagatcctgggactcaggccatatcaacatggttatctagctggcattccaaccccaagaggtttcttacttgtctgttgctttcttattatcaagtcctcacttaggttctgtgttcctttgcagcccagaccaccctagactccatacggcacctctattccagcagtataccagggtctattaaaagaaatccagagaaacaactcagatggaaagggccctgtggcgttctgttgaccattgtcatgactctgtggggctctagaccattcttgaggataggagggtgacaagccacaaggtgcacaaccagcagtgcacaaggtgaacttgaatacaattcagagtctgccaaagccctgcgrcagttttagccaagaaaggaaagggagttactgtgtggcattcaagatggactgagtgaagactacagataagtttcctaggactgtgtggagatgccagataaataacctcaggactagtgtatgaaatgggctgggctaatactgactgctggactcttaagtcatcatcttgcttactgtcatagtttactggtgcctaccaggaaggtccttcttccccacctctgatcaccgtgtttctctttcaaatgtcttttgcagtggttgtctgacaactcaatggttggtgtaacacaggatttggcatcttccttaaagttatctgattgtgtttatttcacccttgggacataatgtgcaagaccctaggatgctggaaacatggctctatccaagccccgaaggcctgagaaccagggaaacggatggtgtaactgtcagtctaaggccaaaggcctgagaagcaggggggccactggtattaagtcctggagtccaggggctggggagcctgaagtttttttttttggaagattgggtttcactctgtcgcctaggctggagtgtagtggtgcaatctcagctcactgcagcttcaccctcacaggctcaagtgatcctcccacctcaacctccggagtagctgggactacaggtgcatgccaccatgcctgactaatttttgaatatatatatatttagagatggggtctcactgtgttgcccaggctgttctcaaactcctgggcttaagaagtcctctcttctcagcctcccaaagtgttgggattagaggcatgagccactgcgaccagctgggagcctgcagttctgacaggagactaagagtgtattccagctccagcagatagatggatgcagatcaccttttctctgtttttgttatctccaggtccctggcagattggatggtgcccgcccacattagtccactcatactctcatgctgatcacctccggaaacaccttcacaaacacaccccacaataatgctttatgaggtttctaggtattccttaactcagtcaagttgacatctaaaattaactgtcacactattaaatatacgctgtaggcaatacatctataaaagggagtatacaaagaggaaatcagcccccatctccctggacttccatgccatttattttgaaagttaaattctgaattagcagaaatccttaacatttgactttatgtacagaaatatgaccctctttatgtattttcagtgtttactggacactgaagatacataaatttatattatcagaaacctctttcaaatagccttccaaggtttgctaatacagactcatcaatcataggcctaaaagtaaaacctaaaattataaaatttctaggagaaaacataagagaaaaaaaatctttatgacattagggtaagcaaagatttcttagttaagacaccaaaagcataatccataaaagaaaaagtcaattacttggacttcaccaaaattaagaatgtgtgctcttcaaaagacactaagagaataaaacacaagacacagactaggagaaaatatttgcaaatcatatatctgataaaagactttttataaaggatatggaaataatcctctgaactcaatagtaagaaaacacacagcccaattttgtaaaaaatgggcaaaatatgtgaaaaaacactttcattgaagaagatatagggatgtcaaggaagcatatgaaaatacgttcaatgtcattagttcataaggaaatgcaaactgaaaccacaatgagatactacttcacattcattataatggctaaaagtaaaaagactgaccataccaagaacttaggagaatgtgaaacaattgtaactctcatattttgtgggtggaaatgcaaaaatggtatggtcacttttggaaaaacagtttgactggtttcttacacagttaagtatacgcttaccattcaacatagtcactctattcctaagtatttacccaagtgaaatgaaaacctatgttcacacaaagatctgcacgtgaatgtttgtggcagatttatttgttgattacaaaaaaactggagacaaaccaaatgtccctcagctacagaatggattaaactgtggtgcatctgtaaatgttgctagagggaatgtaatttgctgcagacactttgaaaaactgtttggtagtatttgccaaagtcaaacgtcctcgaaacatacccaacagaaaagacttgaataagaatgctcatagcagcacatttgtaataactctggaataaagagtctgactcaatttttgatgttttactatgacagctttcaagccccatcactcccctttctcattttctccacacctggacatgcctacaggtagctcatggtgctcccttccttggtgcagacgggcagttcaaaccacacaaactccagcctgtgggagagggatccttcatcctggacgcacctgccctctgcccagccactataaaaaccagagccacgtgccccttcttttgcttgagtgtgggccctgctgtccccagaaagcctcattacgtgagtagtaactcttttcaaatcctcctgatgagtgtgtggcatcatcagtctggagctccgaatcaatcttgggtggtttgaagggctgataactcccatcaacagtgcagcagcaaagcaaaccccaaattggaaactactcaaatgccaaggcaatagatgaggatacaaatacattttttgcatatttgcccaatggagcctttgaagcaatgagaatgaatgaactgcaactgcacgtcatctcgcaaacataatgttgaacaaatgaaaccaacacaaaagaatatrttctatacgaccggttagcatttttagaagctaacttgtaatgttagaagtcaggagagttgctaccatacttagggtggtaggttactggaaaggcgcacaaagtgagaactttttggtacatcaggctgtatttgaaaagataaaaataaatctgagtgagatgggagaggcaggagaggatgatcggatgctccagctctctgagtgaagttctgactctgccctgttgggctgcggtgtttagaatgtgaaccagtcccatccagtggacaaatgtagaagtgcatgtaaaggcttaaaatataatagcaagatgtctggtctgtcttgggagtctctgatagtcgcagctaattttgggtgtgggtgcagatcctgggctcagaaatgaaatagagcaggccgggcgcagtggctcacgcctgtaatcccagcactttgggaagccgaggcgggtggatcacgaggtcaagagattgagaccatcctggccaacatggtgaaacctcgtctctactaaaaatacaaaaaaaattagccgggcgtggtagctggcgcctgtagtcccagctactcgggagactgaggcaggagaatggcgtgaacccgggaggcggagcttgcagtgagctgagatcgcgccaatgcacaccagcttgggcgacagagcgagactccgtctcaaaaaaaaaaaaaaaaaaaaaaaaaaggaaatgaaatagagtatccaagaagagtctgaggccagactttctgtcctgctacagagagctgggttcgccaggctgagggagacaaatgacttctctggtgggagggataggaagcagagagaaaggtggaccctatcccagctgagggctccactatccccacgcattgtttgcctcactaggaagtccagctgggttaggaaatcacctttactcaggtgctaaatgctaatctcataaggtaggtagtaatgcccatttttcagatgagggaactgaggcctgggtaacttgacttgtaagtggcaaaactaacgtttgaattccagtccgtctgggtccaaaacccatttctaaattatgatactctatgttgagtgtcttaaccttttttttgttttgttttgttttttgttgagacggagtctcgctctgtcgcccaggctggagtgcaatggcgcaatctcggctcattgcaacctccacctctctggttcaagcaattcccctgcctcagcctcctgagtagctgggattacaggcgcatgccaccacgtctggctaatttttttgtatttttagtagagacagggtttcatcatgttggccagactggtctcgaactcctgacctcaggcaatccgcccacctcggcctcccaaagtgctgggattacaggtgtgagtcaaggagcctggccaagtgtcttaaccttttttgtgccatggcccccacccctacccccagcagtctggtgaagcctatggggcccctctcagaatcatgttttaaaatgcataaaataaaacacatatgattatcaattctactgaagtttctaagaatgtcaatcccattgaaatagttaccaagttttaaaaaaattrtagtatagcgtgtgctatttatgtgtatctttattaatgccttaaatacaagatctagcagtgggtctgaatttccaggaagtaatgaatgtaaatatttttagatgtctgttctgatggtaatgtgaaatgaaactatcagggatttcactggtgacaaagtcatgggtgacattccaatgaaagaaaatactgaatttccattagaggttagtgaaaataaggatgtaatcttattctcatgtaagctcagatctcttgcataccaggtatgggtcctttggggatccatggaccttagattaagactcctttaattgttgcctctgactcmtctccctttgcccctgactattcccagggctttgctggaaacctgcctgtgagctgacaactagcaaagagtgctaagtgtttgttaaacaaggcaagatcacagtgttcagcagacacgaaaggcctcagatgggctgttggacccagaaatacacacaggaataagatgcagccttgccttcaagaagtccccagcctagtagaggcaatgtctctataggttatgatttacctccagatgaattaaacaggcaagaagtgagtgctttgggaacatacgaagagtaatccaatgggctgggtagtccaggaacgtgtcctctacgggatgatactagggttgagactgggatgggcagctttagaaggggccaggaacacctagtagttaggcacacaggctctctcatcagcctggattcaaaacctggctccatcactccctagcattgggattttgrgcaagtcttcctgatctctctgtgcctcagttcctcatttgtaaaatggaaatgaccctaccgcttcatagggttggttggtgtgaagattagatgagtttaggtgttgtyggccacagtgatggcactgattgtcattggagaggtagacagaggttgaggcctttctgggcattagaaacagcacaaactgtgcagagacaggatggttttcttgtgaaaggaactgggcagagaaagtcatgggtttgatgagttaaggtggaatggacaaacatgttttatttttctagttatgtttttatttgtttgccttgggaaataacatcaaatgtgtgattttactgataatattccataaaacaggactagagtgagtatttaagttttaaagagtggtgagttgatttatagaagatatatttatacaataatacatagtataggtggtagagggatgtggcaaaaaatatgaaggtgacagcaatgcctcattttaatcactggattaggagataggaaccctcttcaccttatgaatttttcaaagttcctctggctcagtccagcaattcctgaatccctgaatgggacagaggctgacagcaaatgcacagtgtttgggaaaagcccagaaattctgtccacacccaattcatttctgaatacactcaagggcaatatttgaaattgaaggtcaccacccagaagcaggttatgaaatcagttaattacatgstggctcacacctgtaatcccaacacttttggaggtcgaggcaggtggatcatttgagatcaggagtttgagaccagcttggccaacatggtgagactccatctctactaaaaatacaaaaattagccaggtgtggtggtggacacctgtaatcccagctactcgggaggctgaggcatgagaattgctcaaacctgggaagtggaggttgcagtgagccccaagattgcaccattgccctccagcctgggtgacagagtaagactctgtctccaaaaaaaaaaaaaaaaaagaaagaaatcagttaatgagtcatgtctagctatttatttatttatttatttatttatttatttatttattattcattattttttgagatggagtctctctctctctgttgtccaggctggagtgcagtggcacaatcacggctcactgcaacctctgcctcccaggctcaagcgattctcctgcctcccgagagtagctgggattacaggtgcccaccaccatgcccagctaatttttgtatttttagtagagacgggatttcaccatgttggccaagctggtctcgaactcctgacctcaagtgatctgcccccccagcctcccaaagtgctgggattgcaggcatgagccaccatacccagctcatgttcagcttttaaaaactatgaaacagaaaggaatagaaactatccttttcattggtagttgggtaatattattttgtgaaactttttttttcaggtgtgtgtatgtgtacaatagactgcctggtaaaatgcatttcctattgtgggatacagacaaaaataactgcttagatggaaacaggcctggattctcatccaaattctcctcctcccctgctgtctagcagggtggtctccatactctgtgagccacagaaacaggttaattttgctgggtggctaactgagatggcaaagtgctatgtttatgcctggtgttctgatttagccaaagtgttcctgagcctatttatatgcccagaactctccatttagagggaattgagttctttasgagagaggactgggatcaggccaaacaggccatgaacccatgttcccttttccagattccaagcccacacccagagcttctgcttccaaacattccatcacttttccagttacaacatttccatatctttcatgacttcctcattttgtagccacacttcccactctgatatgtgatgtgggtggggcacgtgctcattcctggagccgcctccctgttgtcccacctctacctctccgggaacccgctgtgctgtgggacaggaggagacctagcggacagcctttggataaagcaggtagataagcattggaggggaaatagccctggagcagactctgagacaaagatttgagtgtaaattttaggttgaactatatgaaattgccatttttataggtcaaaaatctcaaatattggcaatgtcatatggtcccactaacagtttatctggaagttggagacatgggcaggagagtggggaggtgaggcagaggaaggaaggcagccagtgaagagtgtgttagcaaaccagcttcccctgtgggtggttggacttaatcccccaggagaaactcggggagacagtgcagtgcacacaccttggagttattccacccaagggcaagggaggtggggtatttaggcaccaactgacctcagtcattggttgagggttcttggtggggggcagggaacattatgtcctggaatttctggcatgctgcactggtgggcaggggcaagacaggctttgttagccagagcaaggccacagacagagcagtgtgggtactcacagctggaagtcagccagtgtgtgcccagcaggtgggagctctggtagacgagggccaccaatggtgcctgctacaggagctctgccaggggattccaaaggtgccttcagtgagcacctctggccacacactcatgtagatgagaaaatatgattgtagttttctagaagaagctattttctattttgagacccccattctacaggatatggaaacttaattgcagtcactgtgagggtcaccactcgcccagaattacatcagttccaggaaactggttactgcccaggtgcaggggagcatggtgccacctggttcttggtggcacctgtccacacgggcctccacttagacatcagcatcctgcctccctgttggacatcagcctatgtgtccacactcagggtagtccactagcaccttcaggcctggcagcccattgaagacttcatttgattgcttcaggctagggcatgggatggggctacctgtggccctgttcaccttggactccccatgtgccatgtccctgtgccccctaagtcccgcaaacaccaggaccgtggccataagacagggcacrgtgtccctctaatgtttagactgacctgcttccctgctgcctcttaccttctcagcctggggaatgcttttttagtttggtatagaatagaaagagaaccttaattttctcaaactcctgtactcaaagaccaagaaaaaattcaaagacccttcctgagtctcactgtttgagcagaagaaaagtgaatggtgggaaaacaccaattaacacttgattgattgattgattgagacagagtctcattctgtcacctaggttggtgcagtggcatgatctcggctcactgtaacctccacctcctgggctcaggcaattcttgtgcctcagcctcctgaacagctggaactacaggtgcatgggaccatatctggctaatttttttgtatttttggtggagacggggtttcacygtgttagccaagctggtcttgaactcctgacctcaggtgatccacccacctcagcctccgactgacattttaaaaaacgtaatagtgccttaacccctagggaaaccctggccccacccttaaccataaaaagaaattggtcaggcatggtggcgcatgcctgtcatcccagctacttgggaggctgaggcacgagaatcacttgaacctggaaggcggaggctgcagtgaactgagatcgtgccactgcactccagcctgggcgacagagcaagactccgtctcaaaaaaaaaaaaaaaaagaaaaaagaaaaaaagaaaacaaaagaaaagagaaaaacaacatcataaaactacaaaatgtatctggggagaggggaaaatatctgattcagaagggaaaatcctgtaaactaactgggtggaggctgagggtgggggtggaggtagtctggtccaaatcccagtgctgcaatttggaaaagttacctaactctctgtgcctgattttcctcattataacatcgggttcgtgggaggattagacaaattaatacatgtaatgcacttgaaacagtgtcctgtccagcccaagtgccatgtaagcatcagcattattgttcggcccctagtgccctgtctggaatgaaacccaggacaggccctcaggaagggcttcctggatggacagatggggtgataaagtgaaggggtggtcaggcaaggtccccagttctcaactgttgattagctgtcagctttctcagtttccagagaccttgaaaatatttaaaagaaaatagttcccaagaaatgaaactggctccagaaagctgacagctcatcctgtccatgacacttacccacttccagggtcacctgcaaacaccaacttcctagccttacagtatgtgatcttctttgcctggaacccgagggtgcatccagctgctgctatttttgtccctggctttgggctgaactaataatgttatgagaaattttaagaatttgtgttgggctgcattcaaagctgtcctgggctgcatgcggcctgttggttggataagcttgctctatagtcactttacagacagggaaactgagtcccagaaagcctcaggtggtggagtctttgtataagaagcagtaagaccactgttaggtaagagcaagtaattctaggaaggctttctacatcaaagcctgcattctcccaacaaacatttactgagtgtctactgtgtgtccagtgctggctgggctatgcagtgggggatgttcagatgagcaagcaataattctgtcctggaatcactaaccagatctgaggtggaggggctggggagcaaaaaggagcaaataattacacagaatattcacaaagacaatgagcaaaagagcaccggagtaggagtcagaaagtccatgtggctgctatcaactgtgtttctgggcaagtgacggggtttctgaatcctggcaaccctgtctgcaaaatggatgtgataacttcagcctggcctaacccacaaagcagatgtctggagaaccactctgtaattctaacatgtagtaaatatgtaagtgaagatattttgataaatgaatacatatattgatttcaaacaaatgcatttgtagcaaggcaagggactggcagttggggaaaggattatacataaccccttagctgaagggtgccttgggcagatgtacaaaagaggagataacacagtctgagtggccagcgggggccaggctggggacagcacagaaagaggaagtrgaagaggtgagaggagcatcatttccttccttttgtgccgtcaatggagcatgttaggaagatctgaggttctggcataacagcaaataaaagtgagtaaatgtgggctctaaccaggcttctaaattggagggcaagtttgtagcctaggaattcaaagttttaaggccctagagaaggactggactgactctctcatgagttaagccagaatggggtgaattttgcccaaggaagacagagaaataaaagaaaaagaaacagtgagacagaggatgaggcagggccaacccagggctctcccatcaaaaaccaggctgtcaagagctgccagactcaagaaggggcaatcagagcatgagcttggtggtgctggagggaggatgcctgatggagagcaggggtgggggtgggggatctggggctacctggccaggctcagcccttcctggaactctttgcctgtggaattaggactgactcctccgactgcaacctgcccattccaggaaaaagcccagcccttgttgggaagatgcctcagtgagtttcagggaaacgggaaacctagttgctcacacaaaggctcagaggtctcccaaccacctgccctgcataccagggagtgtctgacgtgctatggctggggggtgacactgagggagtgacttagccgtgggccacatctcattaggaaaagcagcttaacaggaaacagatgggttgaaatattttaaaagaggatgagacaatttgaacagcaagataaataatgagagtaacaggataaaataaatacccatgagttcatactaatataaatacttaagaagaaaggctaactcttttaaaaaaaaaaawtttttttttttttttttttttttgagatggggtctccctctgttgcccatgctggagtgcacggcacaatcttgtctcactgcagcctccacttcccgggctcaaacaatcctctcaactcagcctcccaagtagctaagactacagatgcatgccaccacacctggctaatttttgtgttttttgcagagatgaggtttcgccatgttgcccaggctagtctcgaactctgagactcaagccatctacctgccttggcctcccaaactgctgggattacaggcaagagacactgtgccaggcccagctctttcttataatagaattctaattaatacatgtagaaagaattctaattaatatatgatggaaatagaatatcaccatttggaaaaaaccacagtaataattactgttggaaagtataaatggatgcaaaaattagtggacaaaagcatgatgagaaataggatatttgtgtagtctcaaagtagcaagatacttactaattacaaaaggtaaatagtaatttcacagtggaagaacttgttagataccacatttttcaagtgatcaaagttaacattgccaggaaagagacatctttaaattatgtacctctgatacgtatactgaggacataagatcacttctgtgttgttcctgcccaaaatacacaacctcagtctaatcctgaagaaacaccacactgaaatttagggacattctacaaatgaactggccagtactcttcaaaactgtcaaggtcatgaaagacaaagcaagactgaggaactgccccagaatgaagagacaaaggagacataagaaccaagcgcattctggtttagatcctgggccagagaaaggacattagtgggacaactgttgaaatttgaataaggtgtgtagattactcaatagtatcatgtcaatgttaatttccttgtttagattcttagtcagtactgtgattatgtagatgtgttaaaagtaaaaccttagaggccggctgctgtggctcgyggctagaatcccagcacgttgggaggctgaggcaggtggatcacttgagctctggagtgggagaccagcttgaccaacatggtgaaaccttgcctctattaaaaatacaaagattagccgggcatggtggtgggcacctgtaatcccagccaccgggccgaggtaggagagtttattgaacctgggaggcacaggttgcagtgagccgaggccgagctcacaccattgcactccagcctgggcaacagagtgagactctgtcaaaaaaaaaaagcaaaaccttaggcaaagtaaatggagtttaattgagcaaagaacaatttgagaatcaaactagattaggttcagagaaacttgggtgctgctgcatgtggaagaagacttatggacagaaaaggaaagtgatggacagaaaatggaagtgagggacaaacagctggattggttacagcttggcgtttgccttatttgaacaccatttgaatggttggccacatgcgattggctgaaactctgtaattggcacaagaataggttatagcctgtttatacattcagtttggttacagttcattatgtgtggagaaatctttacgccaaatttaaaatatgtaagttttatatattaaatgtataaaatacatgtcttatatattaaaagtatataaaaatatatgtttagccttaggctaaatgcaatttaactgatgttaatattaggggaagctggcagacaggtatccaggaatctcgtgctttattttgcaagtctaaaaattattttaaaataaggatgtacaaaaggggggaggtgagggagaataaaaaaggagcccaggtcctagaacttagctgttctgtgggagggaccgaggaccctgtggstcttgttgggcagctccttgggtctctctattggaaactagtgtttggcctagagaaacttggaggcctcacttgaaaggtcccctgcttccttctgcctgagtaaaaacccatcatagtcttaatgtccattcttggtagcctgtggaccccagagaaaggcaaatgtctaagtccatatccatcttcttgggacattccgttctctgacgcctgtctgagggactatctgtacccccaataaacttgcaaaaaccgaggcccagagaggtgaagccaccatctctaggtcacacagccagtaaatgcagagccaggtccaagcccagctgtgtgtgactccaatgccatgcctttaaccacctgacattactactctattattgctcagtccaggtggagacaacaggcattcaccaagcacttgctgtrtgtcaagggggcagtgggactggaggtgagggtggctgaggtactgatcctggaccacaggtgctgtcctgggaaggcagaccctcatactgctaagcatatgtcaggtaatgcatcatatatccacagtcattcattcattcagtctctgctcttgcctgtccctgggctctgggtggtgggtcagatatggtccttcccctgagagctcctgacccagcaggggaacagatagttaaataggcagctaatcatacagagatgccatgaaggggagtcggggagaagggaaagaaagagggaagatgatttggaaagtctgggagatgaaactattggtgacacagtgggtgtagcagacacagccctgctcagtgggagttatggccagaaaaagagattgggtggagtttagaattggggcagaatgggactgagatcttgctgagaaggtatccaggatgaagaagctgaaggtgatgttgggaaggcccttcaggtagacacagggtaaacaaaggcctggacctctgggatgggctgttagtgtacttgacccagctactagggaatcattccagagaggggatacatgctttccaaacactatctttgggggatgctcttttatggggtgggagtcatctgagcttgactcttatcaatgagagaaatagctcatggctatgcagctgagatgagggctggggcaagggcaaagggattttttttattccagttgaaagcaggatatacataggctgctgtccagagaggggatgagcgcatggaaaggaattacactctgtctgcacttccctgaggaagaggcacctggcgctgccgctctcctcccaggcttgtggtggacattctcaagcaagtcattctggctccggtaggttatagccayactcggggtgtggggtgggggtgagacttcccaggggacacagggagagactgaacccagtggcttggggagtgggcacaggtgctgggaagagggaggtgctaagtcagtgcagagctttctctccagggcagctgttggagcaattgcttccagcacctggagagtgatgggtcttctgacctctttcccttccttgactctggctctgagaatctgctttgcagattctgaaaacccctgagagttggttctccaacctggctgggggagctcaggcattcctttccatctctgggcctcagtgttcccggctgtaagataatggggcagatgagatggtctttaagggcctctctcccagggccaaagtttcacagctctgtggtctcttcttttgcacatgtccaccctctccccatcctgctcctttcccaaattcttggcccccttccttctgcccaaaacagttccagattcaaatagtccctggatctcctcccatgcatcccagcctgaatcaartgtcatttaatcagcgagtttattcattttaggggctggaagagaaccaatagtatatgccaggcccttagtttaccataataaccctgcaagggaggcagattataggtgagaaagctaagtatcagagaggttaaataatgagctcggagttgcacagccattaagaagtgagttaagctatattctgtctgttctaccctgcctattctgtctattctaccatgctgagtgtcctgcctttcctggggatagtggggtttcattttcatgctgaaatacacacgcaaggagttctcatgggaacattacaggcaacaagtacagaggcaaaaaacaaaacatcaaaaaacattctgggaaagacatgaaagtctcaccttctgcagcagcagctccttgaagggtcgggctctgaaagtgcttactttttgttagctgaaataagttttgggaggagggttactcttgtgattttatatatgtcacaaacatctctatctcctgaccaggccaggaaacattgagtgatgtggggtcccagggagcgtggggagcaggcaggcctcacatatctcaggagaagcagacagctatgtctagctggaagctgcaaggggactcctgccctgctgaggaatggacaaggccactcccttccagccagactttgtgtaatctggtgtaccagacgtggctctgggcatgaaaacagacaaacaggatacactaagatgttcctgtgggttatttttgcagtggtagcatctcaggggacttttgtttttgttttttggcctcttttctatttttccactgtatttccacattttacattgaatatatattattatggcaatcaggaaaaaataacatgttaaaaaagtaaggagagagagtgtgccgtgatctggaatcagaggccagctgattcctctggscagctgtgcctggcttacagtgtggccctggatttcctgggaaactagagaggcgatacctgttcaccccttcacgagggagccaggaagacacagcaatgactgggataaaaaaaggtatctggaaacacaaagccctgtgtaagtgtcagggctggtttctattatcttcattgtgttttataaatcacaatctgaatatgcttcccatgcagaccatccagaaggcagctgttcatcctgcaagcccgaggaaggggtgcacacaggctgaactcccagtgtgtgatttggggctccagctctggagccagctgcaggaacttggtttccagttctgccatatacttgctgtgtgtccttgggcactttactccccttctctgagtctcagttcctcatctgtaaaatggggcccattttataaggttattgtgagaagtcagtgcattattacatataaagctcagggaaggggatctacaacctagttgttattattgttatttttttgagacagggtctcgctatgttgcccatgctggtctcaaactcctaggctcaaggaatctaccaatctcagcctcccaagtagctgggactataggtgcatgccactgcacctggctgtgcttactattttctttgagtggtattgtaacctagcatttaagagcatggacacccatttcaaatcctggctctactactcaattgctctgtgatcttggaccagttctctaacttccctgtgttttagcatcctcagctctaaaacagggctaataatagtatttacttctatcaggtaaatgtgaggattaaataaattaatatatttaaagcccttaccctagattgtattttaaaggaggatatgatttccacattcaaaggaagccagcaaaagtattttccactagaagtgatctcaaacggtgtccttggcttcatatttcaaaggctggtgtggcctctggagatcacattcagtcttgtttatttgatcagtttgcatgttgaatcagctgcactgtgaacagtacactcaggatgggtgtgctttcagcccctgagggacctacacatgaccctgtccataggcttcttggctgtaggtagggcggccgtgaaattgatgtctaagatggaagaggggagatggtgggagacacaaaagagggttcgctgagtcaagcagggtttggtcaagctctgtgggggcctgatcaggggaatgctggtgaaggtttgacaagaagctctgggctgggggcacaggggaggtaggatggcagaggagaggaaagccttgatttatagcatttgccatggtgtaaatattcccagtttcaggttaccaacttaacatcactgaacgcagagttggttaattccatgatcatttgtttaatgcctcccagatgccatatgactggctctcagcacaccactggctttgaaccttcctgccactagttgccgaggccagaagtcccactgtcggaacctcaaccttcgaatttaagtttgatccattttgaaagggagtgtkggggggaaggggtcgtcacttccacctcacgttgtgagggccatccaatccccggccccccatttgctaatctgaggctgtggacaattgggcttcacctatccacacctgtttctttatctggaaagtggggattataatcactttgcttcccaggactatggtgaagataggatgagaaaattacatgttagtgttcaactcatagaaggagcccaactaacatgctgcatcctcatcacaatatctttcctcttgttgcctcaactgcgactttcctgagagacctaagggaggtgagccctggatatctcccagtgagggtaagatcctgggcaaccagcaaagactgaatcatacctttcttttttttttttttttttgagatggagtttcactcttgttgcccaggctgtagtgcaatggtgtgatctcagctcactgcaacctctgcctcctgggttcaagygattctcctacctcagcctcccaagtagctgggattacaggtgtgcactaccatgcccggctawtttttgtatttttagtagagatggggtttcgccacgttgaccaggctggtctcaaactcctgacctcaggtgatccacccaccttggcctcccaaagtgctggaattacaagcatgagccaccrcacccagccttcaatcacacctttctcagtgactcctttttgtaactgctaggtagagcagaacagaggctaaggatgaggtgggaccagggacaaggtaccatgtgcctggagtctgaagacttggatttcagatgcaacttgactagtgaccctggtaaagttgctttgctcctgggttaaatgggactgatggttccttcccaatttgccttataaggctgctgcagtgcatatgaaggtgtctggccagctgtaacatgcatatgggagtgctgactgctgctgtcattgttggcattattgatgaaagtgataggagggaatggttgctccagaggtgagggagacctggaaagattcccagagtgaaagatcaggggtaaaggcctgattgctgttgccactgttgttggcattattgatgaaagtgataggaggatggttgctccataggtgaggatgacctggaaagattcccagagtgagagatcaggagggcaaaggcctgatggctgtggtcattcttgttggctttactgatgaaagtgataggaggatggttgctccagaagtgaggatgaccagaaaagattcccagagtgaaagatcaggaggctaaagacctcgagtgggaagggaatagagtgttccatgtagagagagaacaaaggtggcctggactagcaggttctgctgactctgacctctggctttgattgaaacattcatcagacttggttgtttgctgaaacaaaagtcaggggacttcgagaaatcaagtcaagatcaaggtccatgtcagcagctcagaagagctggtgtttaatcaatgtcaactcctgagtaataagccctgataagacccgagtatactcctcacatcctccttctgcagcagctcacaggctcccagcaccagccatgtgctaggagtgtccttactgctgcccagaaaagggaggagttgaaggccaggaggcccctggtgcagaggagaggacaggaagaccagcagaaaaaggcactgggtaaagttcctaaggttgatcaggaacagagttgggccttagataaagccactcaggctgagctcctggggtgggggcaggtcatgtgtggtttccacagcatctggtccagatgccatcrgataggagcccaagggtggggcagaagctcacagagtgggaggactccagggctccctcaggagaggttctgtttcagcagcactgaatagttccatcagccatgagatcatggtatcatagatactttgggtcaactgaggacccgagtcaacatttctttcgaagtctgcctgaaaaaaggggataaaacttttatcagaaagggctaaggaaaatgtttgcaatacatatgaaaaaagctaacatcctcactattataagacctcataaaatgagcatcccacccattaaaagaataaataatttacagaagaaatacaagggggtattgaacatattaaaaagttcaagctcatgcaagtaaaatattaaaaagtaaaattcagaagtacggggtagagctgatttgcatttctcagtttgtggcccgtgaccatcagcagtctacaggcctctcttcagtggctcttcacgattgcctgcttggaccacaaattcctttttatctccttcctctctcctcctcaagcccccttccccattggtgaatgctctttgttcaatatgaagtctctctctctccctgtctttctcctggaacacactacaggtttgagcctaattcttagttcatgacatacttgtatcactggtttatgtgaagctctcatcaaaaaattattttaaataatgcaataaaatcctgggatgtcactgccttagaggacacttaaccgtggacagtgacttgtcccatctccatggtccaccccaatcccatgctgctggcttctgcccaggcacctgccgtcttgaatttggtgcctctcattcctatgccttcctgtcatctatttgtactccttcaaagtatatatgttttgtttcatttgtcttaattttattaaaagagtatcttgtacatatttttatgggacttagagataagtgggctgattcaagaggagagactcacagggtggtggtggtgaggrtgatggggaaagaatctgcaaggtatcccatatttcagtcttaggtgactgagtagttggtggagtcattcagttagataggcctaggaaagaagaaaggggctggtggggagatgatgaactcagttctgggcaaagcaataatttaggctcgcatttattgaatgtctgctgtgttccagtcagttttgtagaacttaaagtgctctgcatgtattattacatttaagcataacaagaacctcacaagacaggcactgttattattttcattttaaagataaggaaactaagagggagaaaagtttagtaggttctgagcccatcaacatgatggatcacacctttctgctgygaacagaaatattggataaaatgtttaaaatattaaatatttgtcattaaaaatattgatatgaaactatttacaaataaaatatttaaaaattctcaaaaagcaagggaaatcctcaggtgacaggagtaaagaaaacccaaagccagggtggatgcattggacatttatggataaaacaagccccactggcatctgccattactgaggcttgagtaggcggttttcccctcgcagtgtaaacaaagccactgggaagttcgaactgggcagagcccaccgtagcttggcaaagccactgtagccagactgcctctctagattcctcctctccgggcagggcatctctgaaagaaaggcagcagccccagtcaggggcttatagataaaactcgcatttccctgggccagagcacctgggggaaggggcagctatgggcgcagctttggcagacttaaatgttcctgcctgccggctctgaagagagcagtggatctcccagcacagcacttgagctctgctaagggacagactgcctcctcaagtgggtccctgacccctttgcctcctgactgggagacacctcccagcaggggttgacagatacctcatacaggagagctctggctagcatctggcggtgcccctctgggacgaagcttccagaggaagaaacaggcagcaatatttgctgttttgcagcctctgctagtgatacccaggcaaacaggtctggagtggacctccagcaaactccagcagacctgcagcagaggggcctgactgttagaaggaaaactaacaaacagaaaggaatagcatcaacatcaacaaaagagacatccacacagaaaccccatctgaaggccaccaacatcaaagaccaaaggtagataaatccatgaagatgaggaaaaaccagtgcaaaaaggctgaaaattccaaaaaccagaacacctcttctcctccaaatgatcacaactccttgcaggcaagggaacaaaactggatggagaatgagtttgatgaattgacagaactaggcttcagaaggtgggtaataacaaactcctctgagctaaaggagcatgttctaacccaatgcaaggaagctaagaaccttgaaaaaaggttagaggaattgctaactagcaaaaccagtttagagaagaatataaatgacctgatggagctgaaaaacacagcatgagaactttgtgaagcatacacaaggatcaatagctgaatcaatcaagcagaagaaaggatatcagagattgaagatcaacttaatgaaataaagtgtgaagacacaattagagaaaaaagaatataaaggaacgaacaaagcctccaagaaatatgagactatgtgaaaagaccaagcctacgtttgattggtgtacctgaaagtgacggagggaatggaaccaagttggaaaacactcttcaggatattatccaggagaacttccccaacctagcaagacaggccaacattcaaattcaggaaatacagagaacaccacaaagatactcctcgagaagaacaaccccaagatacataattttcagattcaccaatgttgaaatgaaggaaaaaatgttaagggcagccagagagaaaggtcaggttacctacagagggaagcccatcagactaacagctgatctctctgcagaaactctacaagccagaagagagtgggggtccaatattcaacattcatttttttttttttttgaracagagtctcactctgttgcccaggctggagtgcagtggcgcggtcttggctcactgcaagctccacctcctgggttcacgccattctcctgcctcagcctcctgagtggctgggactagaggcgcccgccaccatgcccagctaatttttttttgtatttttagtagagatggggtttcaccgtgttagccaggatggtctcgatctcctgaccttgtgatctgctcacctcggcctcccaaagtgctgggatcacagacgtgagccgccgcgcctggccttcaacattcttaaagagaagaattttcaacccagaatttcatatccagccaaactaagcttcatgagtgaaggagaaataaaatcctttacagacaagcaaatgctgagagattttgtcacaaccaggcctgccttacaagagctcctaaaggaagcactaaacatggaaagaacaaactggtaccagccaccacaaaaacataccaaattgtaaagaccattgacactatgaagaaactgcatcaactaatgggaaaaataaccagctagcatcataatgacagaatcaaattcacgcataacaatattaaccttaaatgtaaacaggttaaatgccccaattaaaagacactgactggcaaattggatagagagtcaagacccatcggtgtgctgtattcaggagactcatctcacgtccaaagacacacataggctcaaaataaagggatggaggaatatttatcaagcaaatggaaagccaaaaaaaaaaaaaaaaaaaaaaaaaaaaaagcaggggatgcaatcctagtctctgataaaacagactttaagccaacaaagatcaaaaagacaaaaaagggcattacataatggtaaagggatcaatgcaacacgaagagctaactatcctaaatatatatgcacccaaaacaggagcacccagattcataaagcaagttctcagagacctacaaagagacttagactcccacacaataatgggagactttaacaccccactgtcaatagtagacagatcagcaagacagaaaattaacaaggatattcaggacttgaactcacctctggaccaagtggacctagtagacatctacagaactctccacccyaaatcaacagaatatacattcttctcagcatcctgataccacaacatcacacttattctaaaactgaccacataattggaagtaaaacagtcctcagcaaatgcaaaagaatggaaatcataacaaacagtctctcagaccacagtgcaatcaagttagagttcaagattaagaaacttgctcaaaactatacaactacatggaaactgaataacctgctccagaatgactactgggtaaataatgaagtgaaggcagaaataaataagctctttgaaaccaatgagaacaaagacacaatgtactagaatctctggaacacagctaaagcagtgtttacagggaaatttatagcactaaatgaccacaggagaaagcaggaaagatttaaaatcgacagcctaacatcacaattaaaagaactagagaagcaaaagcaaacaaattcaaaagctagcagaagacaagaaataactaagatcagagcagaactgaaggagagagagagatgaaaaacccttcaaaaaatcaatgaatccaggagctggttttttgaaaagatcaacaaaatagatagaccactagccagactgataaacaagaaaggagacacgaatcaaatagacacaataaaaaatgataaagaggatatcaccattgatcccacagaaatacaaactacgatcagagaatactataaacacctctacacaaataagctagaaaatctagaagaaatggataaattcctggacacatacgccctcccaagactaaaccaggaagaagtcgaatccctgaatagatcattcacaagttctgaaattgaggcagtaattaatggcctcccaaccataaaaagcccaggaccaggcagattcacagctgaattctatcacaggtacaaagaggagctggtaccattccttgtgaaactattctaaacaatagaaaaaagagggaatcctctttaactcattttatgaggccagcatcatcctgataccaaaacctggcaaagacacaacaaaaaaagaaaatttcaggccaatatccctgatgaacatcgatgcaaaaatcctcaataaaatgctggcaaaccaaatcaagcagcacatcaaaaagcttatctaccaccatcaagtcggcctcatccctgggatgcaaggttggttcaacatacacaaatcaataaatgtaatccagcacataaacagaaccaatgacaaaaaccacattattttctcaatagatgcagaaaaggccttcgataaaattcaacaccccttcatgctaaaaactcaataaactaggtactgatggaacwtatctcaaaataataagagctattggtgacaaacccacagccaatatcatactgaatgggcagaatctggaagcattccctttgaaaaccggcacaagacaaggatgccctctctcaccactcctgttcaacatagtattggaagttctggccagggcaatcaggcaaagagaaagaaataaagcgtattcgaataggaagagaggaagtcaaaytgtctctgtttgcagatgacatgattgtatatttagaaaaccccatcgcctcagcccaaaatctccttaagctgataagcaacttcagcaaagtctcagaatacaaaatcaatgtgcaaaaatcaaaagcattcctatacaacagtaacagacagagagctaaataatgagtgaactcccattcacaaatgctacaaagagaataaaatacctaagaatacaacttacaagggatgtgaagaacctcttcaaggagaactacaaaccactgctcaaggaaataagagaagacacaaacaaatagaaaaacattccacgctcatggataggaaaaatgaatatcgtgaaaatggccrtactgcccaaagtgatttatagattcaatgctatccccatcaagctaccactgactttattcacagacttagaaaaaactactttaaattttatatggaaccaaaaagagcccatatagccaagacaatcctaagcaaaaagaaaaaagctggaggcatcacgctacctgacttcaaactatactacaagtctacagtaacgaaaacagcatggtactgctaccaaaacagatatataaacaaatggaacagaacagaggcctcagaaataacatcacaggtctacaaccatctgatctttgacaaacctgacaaaaacaagcaatggggaaaggattctctatytaataaatggtgttgggaaaactggctagccatatgcaaagaactgaaactggacccattccttacaccttatacaaaaataaactcaaggtggattaaagacctaaacataagacctaaaatcgtaaaaccctagaagaaagctaggcaataccattcaggacataggcattggcaaagacttcatgactaaaacaccaaaagcaatggcaacaaaagccaraattgacaaatgggatctaattaaactaaagagcttctgcacagcaaaataaactatcatcagagtgaacagacaacctatagaatgggagaaatttttgcaatctatccatctgacaaagggctaatatccagaatctacaaagaacttaaacaaatttacaagaagaaaacaaccccatcaaaaagtgggtgaaggatatgaacagatacttctcaaaagaagacattyatgcagtcaacaaacatatgaaaaaaaagctcatcatcactgggcattagagaaatgcaaataaaaaccacaatgagatgagataccatctaaccccagttagaatgatgatcattaaaaagtcaggataaaacagatgcttgagaggatgtggagaaataggaatgcttttacactgttggtgggagtgtaaattagttcaaccattgtggaagacagtgtggtgattcctcaaggatctagaaccagaaataccatttgacccagaaatcccattactgggtatatacccaaaggattattaatcattctactataaagacacatgcacacatatgcttattgcagcactgttcacaatagcaaagacttggagccaacccaaatgcccatcaatgatagactggataaagaaaatgtagcacatacacagcatggaatactatgcagccataaaatggatgagttcatgtcctttgcagggacatggatgaagctggaagccatcattctcagcaaactaacataagaacagaaaacaaaacactgcatgttctcactcataagtgggagttgaacaatgataacacatggacacagggaggggaacatcacacatctgggcctgttgggggattgggggctaggggagggataacattagaagaaatacctaatgtaaatgacagattgatgggtgcagcaaaccaccatggtatgtatatacctatgtaacaaacctgcaygttttgtacatgtatcccagaacttaaagtataataaacaaaattttttwaaaaagccccactgaagctaagctgtcattaaagaaattataaaccatacatgaggaagggtcaggagacacattaaatagatgaattgatatccctaaagaataaagaagaatttgaaagacactataggtctttttaaatgaagaaacaaaaccataatgaaataattaaatactctgagaacacctgaaggttagtcacttatccaagagtaagtgtcccagagtaagtgggattcagttataagacaaaggtgaggggatatcttggtgacataactattaagtggtgcagatggctccctaagcttttgctcttacttgctggactgcaggtactgatgtagatttgaasagtctattggacatcccagggcagcagcaaaagtgggtttagagaaaggtagagaatgctaggtctcaccatattttccccccgcagcactacaggacgtcgggactgggcatttccttccaacatggccgccactgcctctccgcagccactcgccactgaggatgccgattctgagaatagcagcttctattactatgactacctggatgaagtggccttcatgctctgcaggaaggatgcagyggtgtcctttggcaaagtcttcctcccagtcttctatagcctgatttttgtgttgggcctcagcgggaacctccttcttctcatggtcttgctccgttaygtgcctcgcaggcggatggttgagatctatctgctgaatctggccatctccaaccttctgtttctggtgacactgcccttctggggcatctccgtggcctggcattgggtcttcgggagtttcttgtgcaagatggtgagcactctttatactattaacttttacagtggcatctttttcattagctgcatgagcctggacaagtacctggagatcgttcatgctcagccctaccacaggctgaggacccgggccaagagcctgctccttgctaccatagtatgggctgtgtccctggccgtctccatccctgatatggtctttgtacagacacatgaaaatcccaagggtgtgtggaactgccacgcagatttcggcgggcaygggaccatttggaagctcttcctccgcttccagcagaacctcctagggtttctccttccactccttgccatgatcttcttctactcccgtattggttgtgtcttggtgaggctgaggcccgcaggccagggccgggytttaaaaatagctgcagccttggtggtggccttcttcgtgctatggttcccatacaatctcaccttgtttctgcatacgctgttggacctgcaagtattcgggaactgtgaggtcagccagcatctagactacgcactccaggtaacagagagcatcgccttccttcactgctgcttttcccccatcctgtatgccttctccagtcaccgcttccgccagtacctgaaggctttcctggctgccgtgcttggatggcacctggcacctggcactgcccaggcctcattatccagctgttctgagagcagcatacttactgcccwwgaggaaatgactggcatgaatgaccttggagagaggcagtctgagaactnccctaacaaggaggatgtggggaataaatcagcctgagtgaccaaattttggtctggtgggaayagatgggaaccagctcaattgggtgtccactcaaagtgctctctccaggggcctcagtgactgtgttgctaaacccagtggtcagttctcagttctcagccatcagcagcatttgctcgccccgccttcttcctccactttcttcacttgcttccaggataccacgctttcttttctgaattgctacaatctttcttccttccttccttgcttccttccttccttccttccctctctccctccctccctccctcgcttcttcccttcctcctttcctcccttcctactttccttccttccttctgacagggtcttgctctattgctctgtcacccaggctggaatgcagtggcgagatctccgctcactgtagcctcctccccctgggttgaagcaattctcatgcctcagcctcccaagtagccaggactataggcacctgccaccatgcctggctaatttttgtattttttttctttctttctttcttttcttttttttttttttttgagacggagtctcactcttgttgcccaggctggacaacaatggcgcgatctcggctcactgcaacctccacctcccggattcaagcgattctcctgcctcagcctcctgagtagctggaactacatgcgcgtgccaccacgcacagctaatttttataattttagtagagatggggtttcactgcgttggccaggatgatctcgatctcttgaccttgggatccacccgccttggcctcccaaagtgctgggattacaggtgtgagccaccatgcctggccctaatttttgtgtttttattagaaacagagtttcaccatgttggccaggctggagaattgctgtaatagttttccaactggcccctgtccttcctctctcttgctctcctcccatctcatctgcacctagcagccagagtgatcctgatactctcggcctttacttccgcctccctcagagcagcagcctgtcaaaacaccagattacaacaaatttagtttaaaggtctcaattagcgttattggcaattctagaatcaggcaacagactcattgaatcaggaacagattcactccataaaatacagagagtgctgcaatgagctgggtagaagaggttagttttatagacaggaaggggctgtcaaaggcagaaagaaatgaagaacaaaaaaaaagattgatttttttttttttgagacaggatctcactctgtcatccaggctgaagtccaatcccacaatcatggctcactgcagccaccacctcctgagctcaagtgatcctcccatctaagcccccaagtagctrggactacaggagcacaccaccacacctggctaatttttgtattttttgtggagacagggtctcagtatgttacccaggttggactggaaacccttggctcaagcaatttgcctgcctcagcctcccaaagtgctgggattacaggcgtgagccactgcacagggccagattcatcatttcaaagttactttctatatgcggccggaacagggtggttgacatcagttttcttcaggttactttttaataatgattaaaacggggaacttcattatcmtgagcatggttactgtctgcattattacgccaactgaaactgtcatgtttgggaatttggctgttaactctgtctccaggagtctcaaaggtcagataacaacttagttttggtttgaggacatggaactttaatacgacagattccattttggtttggtctggtcagctgggacctagtgcaggaggttagtccaaaacaatggccttccatagtttttacttaacaagcccaactccttacggtaatcctttaaggcctatgtgatctgcccycaccctggctacactctttgcccttatgtccaccagcctccagtgctccagacacaactgatctcaaatactcctgacacatccccctggggattcctcttcctggattrctctcctctcagctgtctgcttggctcactctctcaccttctgaggtcttagctcagataccacctttcactcacctgtccaacctatttaacacaaactggcccatctctgacgctcctgatcttcctgatgctctatttttaaattttttcaatagtgcttatttctttcagacattgtatatgtttctcctatttgtgatgttcagtggctactgtccccacccacattgtcccaggtgaattccacaaggtagggatcttggttaggctcactgctgtacccaaccccctaacacagggcctggtgtgtaggttttcagaaagtatctgtaaaatgcatgggtggaggagggagcattttccttctggcactgctggggaaaaagaacctaaggccctccactcaccagggttccacattctctgtagtccagctgggaaatgctattaaaaggaccattctcgtagccttgatggtggacccagcatctggcaatcaggagggccttgaagtactctgcctrgggaatgtcccaggaccatatacagtctgcagaaggaggcagtgaacacacttggcctaggccccatctcaggagccttcacatctccctgggacctgcacaatcaagtccaaaatctttgtctgatgtcaaggctagggcttttgcaaataggatcccatacatcttccagccctcatactcctccactcccttttcatttcctgaacattccaacttctatgcctttgctcttgtgggctccctcatgtaattaggataatttccagccaggtattccctcacccttgttttacaactgaatcccactttctctgggactccactgcttggtcactctgccctgtgctttgagaggaggttgggtggagcatgggacatgggccatttactgccttcacatttccctggtcacggtgatttttttaggggtgggcacatgacctaggtagagccaatgaagtgcaatatcactagaacatgtgagaagagaggcatgaaaccgaagctgagagggtttgagatctggagctactccttcctccacccaaacttcagaaggtgaaggagatagtgcatgtgagtgagcagatcccgagggcactgtttgagcctcagaatcaaagcacttctgaagctagtcccaatcttggattcgacagttacaagaaccaataaattcctttccttgtggagtcatgttgttttgttacttgcaacctaaagattcctgactgatatactgtgcccagtgcttttctcttcatatctctaatgcttggcattctccctgccccctgacacatccactgagaagcctttccccagggagctgcctgcccacatggcatctctctctcccgagcttctaaagcacccactgctcttcccacctcatagaactacctggtgcaacctgcccacgtcccagcaygtctgccctgcacaattgaacgtggaacctggcacacaggaaaggaaactttttggtggatggaatggagggtaggagaacagacggctgggtgaatgtaagctccatgagagcagggactttgccatgtgtaaactctgcatcccctgtgcttcaacacatgctcagagcatagtagactttttttggaatgaatggataagtttttttgtttcgttttgttttgttttttggagcgaatggctgatagaggattgagcaggcaagcagtattctgcccgctatttcttctcttcccctgagcttttgatggcatagttatagcacatgtgtcacatgctatctggcagtctcttgatgtagcaccagttgccctgtgccttccccacatccaatctctctcagctctgcctttagttctctctcctcaaggcccccaattccccaccatgaggaaggactctgagcttcctagttccctgggaaatgaagctctagatctgaaggtggatgtttgtttgaggacgcggaggatggaattctactttagagctccggaaatcttgtcctacaaggaacttctgttcgtatgccagcctggctggtgagatacagcctgagctgcaccaacagggtctaggtgctcagaggccctgactttgtgcccatgatgcacagataggatgtcaagcaagggacacccagcagggcttgtcacaccagcattggtggatttgtgtgtgtgtgtgtgtgtctatctgtctgggaagtacgtgtgctatgtgggctgtgtgtagtatatatggttgtgtatgtggttatgatgcagctgtatcactgtgtccaagtgggtctggttatgtgcctgcaactttcctattctttctttttttgagacggagtcttgctggagtgcagtgacatgatcccagctcactgcaacctctgcctcccaggttcaagcaattcctgtgcctcagcctccagagtagctgggattacaggcatgagctaacttttgtatttttgtatttttaatagagacagggtttcgccatgttggccaggctggtctcaaacttctgagctaaagtgatctgcmcacctcggcctcccaaagtgctgggattacaggcatgagccacttcgcccagtcctatttgtctttcatgcctttctctgtgtatgtgtgagtgtgtacttgccgcaaaaggcaggaatataacaagtagtgccctgaagcctatgtccaaaggagagggcaagagctagctgcaggtacctggttctctgtcactgtcttaggtgcaatatagtttgagagcagctcagcagctctcacagcccaggccaggataaagccctctccaccccagccttacttccgggtttgggccttggtccctcctgttgctctctgtcttcccagaggcctgacaaagtctggctccctgactgcactgctcaaacctttcccaggggtctcaggaaagcaatcagaattcctctgaccctcaggctctgaggcaaggtggactcttcccatgggccaacctagggagaagtgtagaagttgctttgcctgtgggcagggctgctgcctgtgctgaacgccacgaaatgtgatgttttgactccagttaattctctatgagaaaagcatctcttttctttcccaggtgcctgaaattccaccattggaaagccaccccgatcttgctttattataaactatcttcagagagaacgcatttagtgggctttcctctgaggtcctgatgaggaaaaggatgagaggaagaaaatatttggcatagaaatgaggaattggggacagaatgaccaggttgggtgggtggtgactagaggcatccttggcggtcgcagtcttcctcctgcctcaaggcctctgccagggttggctgcagcagtcctcatgcagggggcagagagctatatggcccatgggcccctcccatgcaagcaggcgggcatggggcattgggatccctgcccacactccaatcctggggggctcttgcttcctgggaggcctgttgttatgctggatatccctgactgtgggatggtacacttgcattcacctcacacctcacccgctgaggcttctctaggtcccaagcatctcctctggagctctcagacaggccacagggtccattaagttcctatctgcacatggtcactctcagttgagaccttctggtcctgactcagggaactccagccctcagcctcaccccagccaatccataggccactctcctggcccatattcctttgggtgtgaggcacaaaaggagacacagcaccaaggtctagggagggccaaggaggtgtgttaaggctctgttcctgcttccccacagccccagccccattgtactgggcacagggcctggctgggcagagatgtcattggtacatttcccatggatagtcttccaccttccagcccatttctcctccttctatgccccctactcaactcttctccttgtgctcctggtccttgtagaataggatgggatatctcagcttctcctaaccaggcagagctctatcaagccctaggcagacatcagcatttgcgggcagctgacctcagagaaatgcaggccctggaccagggtcacatagctagttggagacagactgtcaccccagctcaggcccttgcctactctcctggcagagcagaacaggcagccagcctcaggagaaatgtgaggctgccagagatgtaagataaaagtagcagagagaagttccactggctggtcgctgggtcggggggtccatgcagcctgggcccacctcctccaagacactctatccagctcccacagtcattcttcctcctgtcccagctccagctggagccctgccatcagccagctgcagctatggcagccaccccctcaccctcttgtagcactgataagcacgctgggaagggggattgtcytcatttcatagattggagggctgaggccaggaaatgatttgaggactgaaagtaaattagccgagactggaagtcaggtttctaacatttaatctccacttagggaattggaggtcagaaatgaataaaataccatgccccagtaggctccagtctagggaagtgggcagcaggcagaaaccaagacacagaaagcaacgacacataacagatatgctatgatacaaatggtgcygcaggagctgcacagttcggaggccatttctggccagaggatgggatgcgtgaaatccaggaaggcttccaggaaggagtagctggcactgggatgggcaggaacagcaatgtctctactgatggtttcattggagaaagctggcaaagttgagaagtttggagacyaaccgtgacaaaatttaaacatcaggtatgtgaaggcaagggggaccaactgtgacaaaatgtaaacgtcaagtgtgtgaagtcaaaggggaaccaggaaagtaaaagagtgacaatcagcagtgcttttggcaaaaaggcctctggcagcagtgtagaagagaaacgcagagatcacaggtataagaatgacagtaggagaggggaggagggtacatatttcagaggcatcacaggggggtgtactgataggacgggggcctgcttgtatgaaggtgaaagaggaggagggagagtgtctctgggagatggrgtgaatggtagtgttctgagcagagagagcagggaaatcaggaggaggagtggttcagggaagaggcaggggttcagatgccaagttctgcattggccaagctgagtcagaggtgctgggagactcccatgtgggtctggggatagaagaaagctctgagttcagcaatgatcatggaaaccaagggagggttgacagcaccctgaggtgggggagacatgggcactgaggagggatcttgaatgattcctacattaaagacatcctgactgggcacagtggctcatgcctgtaatcccagaactttgggaggccgaggaggccggccaaaatggtgaaacgccgtctctactaaaaatacagaaactagccgggtgtggtggtgcgcacctataatcccagctactcagaagcctgaggcaggagaattacttgaacccgggaggcagaggttgtagtgagccaagatcacaccactgcactgcagcctgggcaacagagtgagactctgtctcaaaaaaaaaaaaaggtatcatttctctagacctgtkgstatccaatagggcagccacctgccacacacggcaattaagcacttggaatgtggctagtctgaactgggaagaactgcaaaagtacagtacataccagactttgaagacaggatgaaaaagggaaggtaaaaactattacgttaaaatttttaatagtgatcacgttgaaatgccaatattttggatatattggattaagtaaagtatattataaaaatgaattgtttcattttactttttaaaaatgtgtttaccaggaaactaaattagctgggcaaggtggtaggtgcctgtaatcccagctactggggaggctgaggcaggagaattgcttaaacccaggaggcagaggttgcagtgagcagagatcgcaccgctgcactgcagcctcggcgacagagcaagactctgtctcaaaacaaacaaacaaaaccaaaaaaccccactactcatgtagcttgcttcatatttatgttggatgacactgttctagaacctgaattccataggatgtgggataagtgttgctgaaaaaactaaagcaagctgggagagtggaggctgatgtttgcaagatgccatgttactcgtgtctggggggaaccagtctctgtactcaggacttctcaaggcaggcatcatctcccaaaccaagttgcccacagatactcccccttcctctggacttcctgtgagaggagggttcggcagaacccactctgagagatggtattttaaagagaatgataagcctgtcagatgactaggcggggagagagcgaggacaggcagaacagaggtagggggtgccacaggaccagagggaggggtggccagtggggtcttggggctgcagaggggtgagaacaggtgagagatgcaatagaactcctctggccaggtttgcagctggcttggccaagctcactctgtaggatgcaggcggtagcggaagcgcacatcgtggctgggctgcatggtgccaaaaccccagcgctgygggtcaacatggggtagtggtgtgtcagggtccaccaactctaagtcaaagtgtgtgaccataagcaggataaagagcttcacctcactgagtgcaaagaacctcccagggcagatggaaacgcccgaaccccagggcatggtgtagtggtggatcttcttgcctgtcttgaagaagtccactttccggctgccattagggttgaggaagcgatcgtacttgaagacggtgggctcagggtggatgtcagggtccatgtgcactgagaggtagggaaagagggccaggatgtctccatggcggaacagatactcctgcccactggacatcttcagggtatagtcttcatgaaccaacctrargagggtgggtgcagccctcagccgcagcgtctcctccaccacgctgtctagaactggggtgtgttgcagggcaccgagtttgaaggcaaaggactgcttggtctccagcctggcctcacccaggacctgggtagcttcctccctcacagcccgaatagcttctgggtrcttcaggaggtacaagagggcccagaaagaggtaggccccgtgttcccctgggaggcccagagcatcatgaagttgaacttgtcctgcatagctgagggtacmccctgctccctcagaaactgaagcatgttgcccagccagttgctgatgccctccttctcctggctgtggctcacggagagcatcytgtgaaagagacgctggagtcggcccacttctagccactcccggggccacagcagggagtagacaaaccttgggaaaagaaggtcaaacttgcggaactccatgaataactctcctgcctgtagcaggtcctgctccttgtccttcgtgtagccgaacaagctcaggtagccagctgtgaacaagatgtaatagcagaagcgaaagaggctgtcctcatgccagcaactggcatccagactccagcctttggacgtcagcattacaaaggacaggctgtccagcatggtctcattaagatccttcaagccatcccccctcagatgcttggtgctggctgagtgtatcatctcatggtccccttgcactgaacggtatccaaataccttcagcaccagtttttttgcatattgcccaaagtctagttttctctgtgtgtccttgaggatggrgccaaaggagagggggtccatgacgaaggtgaagtactggccccctagctgcactgtgaacacatccccatgcttggtcctcatgcgcttcagaaattcaaacatattcttccggaaagccatggcatggccaagccagggcacggtacccttgtccagagggggctcccatggcctgcgttgtcggagcatccctggcaggcacaggtatccagcaatgaccaccagcagagctcccagcactggaccccagagaaccatggctatgctcctgcggattaagctctcgacacgcacactgttccctgggtgccagagagctttgggaggccttggaaagtccaggatgtaaaggtctgagcacctggaccttgccctgtggccgcaagttatggcaaataacactagtgagacagtacttggaagcagcaaaatgttcccctggacttaacacttggctgactggtcacgtaggggaggaggaggtaaccaggagaaagctcagagagaagcttccagctatggtcacagctgctcaccagcttcatgctttgctctgaccttttcagacagctcttgcaccttctctctaagcctgccttgagcccactcccacccccatagctgacagactatttatacccccatttactcatgcttttatttrtttgccagttcagttggtagaaatgaatcaagcacttacaaaatctcacttccactctttcctcatctttagaagactcaacaaatgcctccattcctacttggcccccttggtcaagtaagttaacctcactgtggctccactccctcatctgtgaagtagggataattacagtgccttgtaggtgctgtygtgaggcaaaaagagataacacctgaaaagcacttagaatagtgcctggctcatgctagtgctccatatatgttagttagtatcctaaagccttttctcttacctttgcctgctcccctggacctcacagcagcccgtgcttatctcctcattctttccctagtctgtcttcctctctggtctcaaagatgcttgccaagggggcatgaccttgttgaagtcatgtctgctcctacctccatgtgcacagagtacacagtcaaaggcaagtgaagaatgactgtatgcccttccacaacagctctgacccctaacccaaaaaaagaggcatygatgctggggctttagatgctgagaaggctgagatggtggagggggtgttgactccatyttggggtatgagtgtgaatgaactcatctgaggaggccacagagcctcccagatgatgactcttcaagcagaggctgagccctcagtctctgagcctctcacccggagccctctcacctgcccaactgcttgcctatacacttctctgacaagaaggcagaatcctggaattgtaaaatgtcagagacaatagagacctcactcaatcacttcatacttcatttcacaatgaggatctaggtgcagaacgcagtggggaccctctttgacagctgccctggcttggggccttgagataagctaatcattgactaagggccttctgagacatgtcagcccaggtccctgccagcagctcaagagggagaaaactgtaccattgacgccaaggcattagtcaagcagcctggcccattgttgctataggtgaggttcaaactcaattcaatcagttctgataacctccaaattactttttaacttcctaacgacctgagaacagggacttcggctcttcagacaaaagagggtatggaacttccatatcccctctggagtgagcttcctttgcctatgagcttccccttggcagggagttggaactgtccacactctgcttcccagaatccctctttaattgttcaggaccaccacagtacttggcatcatcaactctcctcaaccttagaattcggtctgaaactgggccaaatccaatgaactgaaccgtgtcccctagtttttaatggatgaaccattatttcacattcattcttacctcattcattaacccacactcatctattcattccctccttccttggagaagccccatctatccattcactagatatttattgggcacttactggcagaaatgttgctacgatctgggattataatcatgaatgagatagacacagtccctgctctcttgcagtttatggtctaatggagggagaaagatattaaatcactgcccaaagtaattatacacatatttctcatttaatgtgctttgctttattgcacttcacagatactatgttttttacaaattgaaggtttgtggcaaccctgcattgaggaaaactattggcaccatttttccaacagtgtgtgctaactttgtgtctctgtgtcacattttgtaattctcacaatatttcaaattttttcattattatcattacagctgttatggcgatctgtgatatgttagtactgtaattgttttggggcaccatgaactgggcccatatatgatgcaaacttaattggtaaatgttgtgtgtattctgactgttccactgaccagctgttctcccctctttctatctctccttgggctttcctgtttcccaagacacagctattttgaaattaggccaattaataaccctacaatggcatctaagtgttcaagtgtaaggaagagctgcgctttaaatcactttaaatttcactttaaatcacaagccagaaatgattaagcttagtgaggaaggccaagataggctgcaatctaggtttgttgcactacacagttatccaagttgtaaatgcaaaagaaaaaatttcttgaaggaaattagaagtgctactctagtgaatacatgaataataagaaaaacagctttattgctgatatgaagaaagttttagtggcctgcatagatcaaaccagctacaacattcccttagccaaagcctaatccagagcaatgttttaactctcttcaattctatgaaggctgaaagtgatgaggaagcagttggagaaaagtttgaaggtagcataggttggttcattaggtttaaggaaagaagccatctctataacatagaagtgcaacgtgaagcagcaagtgttgatgaagaagttgcagcaagttatctaaaagatgtagctaagataattgatgaagatggctacaytaagcaacagatttttaatgtagatgaaacggccttatattggaagaagagaccatctaaggactttcctagagcaaagtcaatgccctgcttcaaagcctctaagggtaggatgactctctttttaggagctaaggtagctggtgactttcagttgaagccaaagctcacgaccattctgaaaatcctagggcccttcagaattatgctaaatctactctgcctgtactctataagtagcaaggctaggtgtggtggctcgcgcctgcaatcccagcaattttgaaggctaaggcaagtggattgcttgagcccagagcttggagcccagcctgggtaacatggtgaaaccctgtctctacaaaaattagccaggtatggtggtgcatgcctgtggtcccagctacttgggaggctgaggtgggaggatcacctgagcctgggaggttgaggctgcagtgagccaagatcatgtcactgtacttcagcctggacgacagagtgagaccctgtctcaaaacaaacaaaacaaagcctggatggcagctcatctgtttgcagcatggtttacttaggcccactgctgagacttactgctcacaaaaaagattcttttcaatgtattactactcattaacaatgcacctgagatctctgaggaagatgttcgaagagatgaatgttgttttcatgcctgctaacacaacatccattctgcaacccatggatcaaggagtaatttcaacttttcagtcttagtattcagaaatacatttcgtaaggctatagctgctgtagatggcgattcctctaatggatctgggcaaagtaaattgaaaaccttatggaaagaactcaccattttagagccactaagaacaattgtgattcatgggaggaggttaacatatcaacatgaacaagagtttgaaagaagttgattccaaccctcatgaatgactttgaggggttcaaggcttcagtggaggaagtcgctgcagatgggtggaaatagagaattagaattagaagtagtgccagaggatgtgactgaattgctgcaatcgcctgattgaacttgaatggatgaggagtaacttcttacggatgagctaagaaagtggtttcttgagatggaaactaatcctggcgaggatgctgggaacactgttgaaatgacaataaagaatttagaatattacataaagttagtaaagcagcagtagagtttgagagcattgactccaattttgaaaaaaagttctattgtgggtaaaatgctatcaaacagcattccatgctacagagaaatctttcctaaaaggaagagtcaactggtgcggcaaccttgattgttgtcttattttaagaaattgtcacagccaccccagmcctcagcaaccaccaccctgaycagtccagggtgaagacaggaatcactgaaggctcagatgatcattagcattttttagcaataaagttttttttaaaaattaaggtatatatatgtattttagatataatgcttttgcacacttaatggtgtatagtctaaacataatttttatattccccggaaacaaaattcgtgcgactcattttactatggaggtttgaaacccaacccgcaatatcttcgcggtatggctgtaattgtgacaaatgctgcaaagaagagcagagcatgaagggaggtggcagtcaggaaggccacactgattgggccacactgattcagcggaggcctggaggaccacaagacccagtcaatgtgtgttgtgtgtggtggaggtgctagcggccgaagaggggtgctggtcaggggatgcagcagggtggtcccaaggtaccgagagcatatccaccctggggccaatgagcccagggcactcggagaagggggaagaatctccacagggtgcagaaccggcaggctctgtgcgggttaggactttgacacatcggtggcactgaacccctctcacgccagccggcccagccacgcttgtgtccggggccagcccacgggggccacgcagggctgccggatggacaggcagggaatacgggctcttcctcgggaggagactggcttgcccctgggaagtcagcccacgggactgccctcctctccctcccgaggggctggggaccagcaactcaagccaacaccgggagcgggcggcacgtcccctcctcgccccttcggtccgggaactgtcaggggccggggcggggttacgatggtgggctagggggccaggtaggaccaaagacacacggaggcggcctccgggacagccagagggcccgcgggcgctcgggaaaggggcgggtgcacttccggcccccgaagcctcagcgagggagtctccgggaggcgcggcggggagtaggcagtgtgttgctgacctctggcggtcgctctgcggcacttcgcaccttctttgtgctcaggagckgtgagtgtcagttcggcggctgagcccccagtaagggcgtggttccgggccaacgggaggacgtgctgawggcgctgctttcttccttccccaccgcagctgtttccgactcgcgcgctgaacccaccactacccctcggcccacgcccctggcagttttcacggcataagcccggcaagagcatcattttggttgtcctggggggttttgggggttagctcctttattgctaacctcatttgcacattccatggtgggcaggacagtggattgagttttttacactgggccctagtagttccatgttcctgtctgatgtcatgacttctcattctatatatggcccagaattttgagcaactgggcactgacctgaggattctatttatctgctgtggttcctttactggggttctccgctgtgggttctctagtccggatgcactagctcttccctgagtcttgtttgcccctttttctaattctggatgatattgactgctcccccagtatgtgccacctcttgctcactgcctcgcccccagcagtaagtagtaccattgaaatggaaatacaggggagaaattatttcaccctgcctttagagcaggtaataatcgtttcacttagggcttatgtatggctcctttttgtttctttctagctttccaggttccttctgtttttcctggaggggaaggaaccccctccatggcagcctgggttcttgacagcctgactcaagggtcactatgcttactgctagcctgaatcacatataccaggttgtcgtagaaccagtgtaggacataaaaggcaaacctgggttcttgtcccaacttttccaccaatttatggcatgacccagaacattttgttttacccttctggacctttattctgatgtgtcaaaataagaggtactgaatttgacgtactcgccagcagtgagatgctattataaaggtattgggttgtacattcactaatttgccaagagataacgagggcatatagtgtgagagggtggagggatagggtgggaattggaatgattggcattgagcttctagccagkggatggctctatgctgatcatttccatcgccaccaacaccatcaccattcttattttgagaacttaccttgagctaatattacacgaaattcacgtattttgccatctaacccttatatcaacccggttcagagattccgtagaagaactcacaggactcagaatacagttgtaatcatgactaagaytgattacaactggattgctggtccctagccccttgggagggtggggagggcagccacgtgggctgaattcccacgggcaagccagcctctgcctgaggaagagccagaattctctgcctgtccatctgatgggatacataaccagatcataagggaaaaagacataggtggagtctggaggaatctatgtgcaggattccgagttctttctccctgccaggagagatcacacaaagcttactcctcctagcaatggaaacgcagcaacatatgtgccatgtttctaactagggaagctcaaaaattagtcagtgcccaaggtttttatcgggggactggtcatgtaggcaccttctgcctagcacataccaaaattccagactcctagaaggaaagcagatattcattataaatcatgtttgtacaaatagtcaaggcataacgaactactcttattggttaagtgttgactggacgcactttgaaagtgaagttcccagacactagccaggggcctaccttgcaagcaggcctttttttgggtctctgacttgctatgttagtgattttatgcacccaaccatatgaagcaaaaatgccctcattttacagaggagaaaattgagatttcaagggctggtaacttgtctagagttgcacmactagcaagtggtacarccaagagtctaatcactctgtttacttcagaacttcagctsttcatccrctgccatattgccagtcccagggccttcctcaagtcctttgtctttgttctttctgcctgaaatgttctttccttagctatttgcatgactggtgatatggtttggctgtgtcctcacccaaatctcatcttgaattgtagctcccataattcccacctgttgtaggagggacccagtgggagataattgaatcatgggggcggtttccccatactgttctcgtggtagtgagtaattctcatgagatctgatgattttgtacygggaaaccccttttgcttggttctcattctctcatctgccaccatgtaagacrtgcctttcgccttctgtcatgattgtgaggcctccccagccacgtggaactgtgagtccattaaacctctttttctttataaattacccagtctcgggtatgtctttatcagcactgtgaaaatggactaatacaactggtttattttatttattcattttttaagagataagatctcactatgttgtccaggctggcctccaactcttggcctcaggcaatctgcctgcctcagcctcccaagtaggtgggactacagggatgtgctgtatgcctcgcttggtttctttcaattattcactgcctcaactcagattacaccttatagaaaggccctccctgactactctatgtaaagtagtctctttttaaagtactttgtatcattaacctattttagtttcatcaaaacatttataattatgtgaaatgatctagtgtctttctttattctctatatcaattttcatccagtcgcagtggctcacacctgaaatctcagcactttgggaagctgaggcgggctgatcacctgaagtcaggaggagtttgagaccagcttggccaacatggtgaaacctgtctctactgaaaatacaaaaattagccgggtgtggtggcgcatcctgtaatcccagctacatgggaggctgaggcaggagaatcacttgaacctgggaggcagaagttgcagttagctgagatcgcaccactgcactccattctagcctgggtggcagaggaaaactctgtctcaaaataaaataaaataaaataaaataaaataaaataaaataaaataaaataaaaagaaaaagtcaatcttcctcagtggtgtgctggtaaattggcactgtaagaaaaaaaagtcttgattggtagagttggccagtttcatattgtaaatacattgcccctggccaatttcaggcacccatataaggtcactgaaggaggagttggaaagagatgtgcatcgtcagcatggagtcctgataagtaakcaacaatgaggaagggaccttakgtaggggagaaccccaggtggggaagaacaatgaacagttgttctgagagatggctaatcacaaataacctgtgggcacaatgacttgtcctgtccgcaagtggccccaagagcagaaccttataaaacttccctccagcccctgcctcattgtagacagcccatttcctgctgtgctgcctgttgcaactttgcaacatatttttatactttctgtaataaatctgtctttctttacctacagctgtcttggtaaattcctttaccacctgcaccaccagccccagatagttgctacctgtgataatcagctttcctgagtcagtgtgtgctggcaccacaataaactctttaaaatcaaggactatgtcttgtccattgctgtatcctcaagacctagcacattgcctggcacatagtaaatactctataaatgtttgttgaatggacgaataattctccaattccatctctgattactgttgcaggcattcagtcttattttagagatgagaacaatggggctcagagtgtgaggaactctcccttgggcacacatttattaagtggtagagccaaacatttaatacagccagtttgtgccagctttactgctaagtgggtcagagaaacctaaaatgggagaaattggagctagagaaacaagttgtccatatacagttccatagttcatagcaacaaataatttattgcaggcttaagcatatgcaaggtagtatcttagtctcagggagacaaagattgattggatttttaaatcatccttcaaggatctcactgattaaatgggataagcacgtaatatcaaatgtacaatactaaagcagtatgagccaaatgccaatggattctgagagcagtgtcacattttgttgggggaaagggaatagggtcagaaaggggtttataaaaataagccatttgagttgggctaataagaatatatagggtcaggttgtgaatggaaaggtaaggtatttcaggcaaacgctgatgaggattttttgctccttagttcagctaaaatctggtttctggtctcacgactgggaaaaattaggcacatggacacattgaaaggtgaggagagtggaatttattgataagaagctcagagaaaaaaaagagggtcttgccaacaggctcccacctcacagattgaataccaggccaccacacaccagctgaagaggccaggcttctccccaccgcataaggtgtgaattcccggtggctacaccccagtctcccagtgcacaggtgggcccttagtctgagccactccacattgatttatttcccttactgcacatgtgttaagggacagaattcttcgcygtgggcatgttaggcaagccccctgtgcacaatgacctgagcagcatttggctgtctcatttctatcaactctgtggagaaaggcatctaaagaggtggtgagatgtgcttgaagaagaaagtccagttcatctgatatgtcaatgcaggtacaactcaggcaggcctgaagactataactctaatgaacatgctatccaggaaactaaccttcaatccacatgcacaccaaaccctcaagaaaattagagttgttagtagttacagtagtcctgccttgtctgcaggggatacatcccaagatccccagtggatgcctaaaaccatgaatagtactgaaytctatatatactatatttttttctgtacatatacatatatatctatgataaagtttaacttataaattaggcacagtaagagatccacaacaataattcataataaaagagaacaattataacaataagttgtaatacaagctatgtgaatgtggtctcgttctaaaactattttattgtactgtactcacccttcttattgtgatctgtcaatgtgataactgtcatggctaccaagtgactaatggtcaggtagtatatacagtgtggatatgctagacaaagggataattcatgtcctgggtggtgtgaaaggaaaataacaacttgggaccccaattcactatgctgaaaggaaaaagtcaagctaaaagctgagtcatgcaagaagttgcctttccttttgttcctaagcagatagttacagataaaaggtaaaaaatctccacaggtagctactctatgttcaccttatcttatgtaacctgcagatttacttagcatgagatgaatacataattaaatattcccctacctgctccttttctcttacatgtggattcagtaatgaccataacctctgtctttcccctgcagcctgcttttcccttttaaatattgaagacttcaacatcatctttggaaaaagacacatacctgtctcctgggttatgtccttaaccttggcaaaataaacttcaaaattgattaagtcctttctcagatacttttggtgtacagtgggatggagcagagtggtgtgaaattttataayactactcagaacagcgtgcaacttaaaacatgaattatttttggaattttccatttaatattttcaggccatggctgattgtgggtaactgaaaccacaraaagtgaaattgcaggtacgaggggaccaatgcatttgcaagtgtaaatgatgtgatcttaatgccatagtttctagagtagcttggagagtctaagtccccccaccccctgcaacccaaggcaaggagaactttgtaaaatacttggttgaacttccactgcattccactgcaatcaagcagtatctttagcaatcatgcaccttcatggggaatttgagggccaggaaagcatgactttccatgaagagattggattagtatcctttgtccatgtgtgatgttaccttcctgtcgatcgctatcatccttgtgacagttgtgcagtaggatctggcaaacagttggaaagatggcttggtgcctattctggggtgtcttgaattcacctgaggcatggatctcatttgacaggcggtggagaactactgaggacttctgagcagagaggttggtggaagaggaagcaccaaaaatccatctcatcacctagagagcattgtactggcagaactgtctaaagtgactattttggaactctgggatcaatttgaatacttgcagcttccaaaggaaaggttggttggtaaattgtggctaatattggttgatttcagcttgtattggatacccacccataagtcccatggcaggcagccatgacatgtttctgacatggcttgctgaagccagagtgggaaattaggactttgtcctccagatattggggctctgtgttataattgctgatagctgcttcttatcaatgaggtgtagctacagaggctggctgccattggttcacctccattggctgaagcagtctctagggcattaaaacattaaaaggagctgcacctttgggttttttgtttgtttgttttgttttgttttttttgatggagtctcgctctgttgctcaggctggagtgcagtggtgtgacctcgtctcattgcaacctccgcctcccgggttcaggcgattctcctgcctcagcctcctgagtagctgggactacaggcatgtaccaccatgccgggctaattttttgtatttttactacagatggggtttcaccgtgttagccaggatggtctcgatctcctgacctcgtgatccatctgcctcggcctcccaaagtgctgggattacaggcataagccacctctccgcctgttttgtttttttttacattcaaaaacaactgtgtgtatgggggaatttagaagccatgtgtgcatacccagggaaagacataggttcagaaaagaccttaaactttcacctcaggatgatccctagcacagacactctaaaatatttcttaaaagtcaaaccctgggataagtgggataatattatttccagaattatcacaatgtaaaattcaaatgtccagtttctacaaaaaaaatcacaaggcatacaaagaaacaataaagtatggctcattcaaaggaataaaagaaatcaataagaaatgttcttgaggaagcccagatagtggacttcatagacaaagactttagaatgactgtcttaacccatttctcgtttagaaaaaaattgcagctcgccgccagtactcatttaattttacataaacacactctttgaggctgaagcaaatcagactgatcttcaatgtgaaaataaagtataaaaactgttcttggagttatttccaaacagaacttttttctaatcctaatgtaacagaaatgtatatgatgacagtatttaataagtgggcagaattttggggtaaggttaggactgtaatccatgagttatcgtggtgtattcactgcactgcaagggccactggggaatattttcacggcaaatgggaaatgggttaaagatactcaaagagctaaaggtaatcatggacaaagaggaaaacaatgtacgaattagaatcagaatatcaatagagatagaaatgataaggagaaacctaaaggaaactctggagctgaaaagtatcataacaaaaagggaaaatacactgggatgggggtgggggtggttaaaagcagatttgagcaagtaaaataaagaatctgcaaacttaaagataggatgattgaaattattgaactggaggaacagaaagaaaaaaggatgaagaaaagtgaacagagaggctggcagataaattcatcagcttgttcctttgcctgtggacactgccgaagaagcatcattaaagtctcttttctccctgccatcatgtctaagtcagagtctcctaaagggcccgaacagctgaggaagctcttcattggagggtagagctttgaaacaactgatgagagcctgaggagccattttgagcaatagggaatgctcacaaactgcatggtaatgagagatccaaacaccaagcgctccaggggctttgggtttgtgacatgtgccactgtggaggaggtggatgcagccatgaatgcaaggccatgcaaggtggttggaagaactgtggaaccaaagagagctgtctcaagagaagattctcaaagaccaggtgcccacttgactgtgaaaaaaatatttgtgtccttaaagaagacactgaagaacttcacctaagagattattttgaacagtatgggaaaattgaagtgattgaaatcatgactgaccaaggcagtggcaagaaaaggggctttgcctttgtaacctttgacaaccatgactccatggataagactgtcattcagaaataccatactgtgaatggccacaactgtgaagctaggaaagccctgtcaaagcaagagatggctcgtgcttcatccagccaaagaggtcgaagtggttctggaaactttggtggtggtcgtggaggtggttttggtgggaatgacaactttggtcgtggaggaaacttcagtggtcatggtggatttggtggcagccatggtggtggtggatatggtggcagggggatggctataatggatttggtaatgatggaggtggtggaagctacaatgattttgtcaattacaacaatcagtcttcacattttggacccatgaagggaggaaactttggaggcagaagctctggcccctatggtggtggaggccaatactttgccaaaccacaaaaccaaggtggctatggcggttccagtagcagcagtagatatgtcagtggcagaagattttaattaggaaacaaagcttagtaagacagaggagccagagaagtgatggaagctacaggttacaacagatttgtgaactcagccaagcatggtgatggcagggcttagctgctacaaagaagacatgttttagacaaatgctcatgtgtatgggcaaaaagcttgaggagtgtatttgtgaataattgcataacaggttattttagtttctgttctgtggaaagtgtaaagcattccaacaaagggttttaatgtagttttattttttgcacccatgatattgattgctaaatgcaatagcctaatggtgatgctgaataaatgtcttaaattaaaaaaaaaaaaaaggaaaagtgaacagagcctaagggacccaggggacactatcaagcagacaaacatatgcataatgtgaataccagaaggaaagagagaaagaaagaggcagaaagactagttgaagaaatgttcccagaccaaactgagggtcgggctgctatttctcgctgcccaataacaagatgcaaatgaactggggagaaagagagtttttttatttctgtaaccggttacagggagaaggcctggaaattattgccagaccaactcaaaattacaaagttttccaaagcttatataccttctaagctatatgtctacgtgtaagtgtgcattcatctaaagacataagtgattagcttcttttaatctataactaaggtctgagtcttgaagaccttcctctggagcctcagtaaatttacttaatctaaatgggtccaggtgctggaggtaattacccttatctggtctcctgctaaatcgcagaggtttggggagttccttcagatccccggtaaaacttttttaattctaaatgggtcctattaagaattcctttgttattttgtaatgctttaaggcccaggaaaggcctaggcaaaacccttggtgggcatttcttacattccagcctttgtataaagggcattggctgtttcagctttgaatatttaacttaaccacttagtactaaaacagttgttatggaggcctgcattagtgagacctggcctgccacagaaataatgcttgaaaacttcctaaactcaatgaaaaatacaaatctacaaattcaagatgctcaacaaactccaagtaagataaactctgaaaaactatcatttttttaaaaaccaaaagaaaataacaagtgatagtgaggatgtggagaaattgaaacccttgtgtattgctggtgggaatgtaaaatgcagcctctggaaaatggtatgattcctcaaaaaacatagaattaccacatgatctgcttctgggtatatatccaaaagaaatgatggcaggaactcaagatatttgcacacttgtgttcatagcagcattagtcacaaaagccaaaaggtgggagcaacgaagtaaccagtgacagatgaatggataaaatgtggtatatatgcatcagtggaatattacttggtcttaaaaatgaaggaaattttgacacttcctacaacacagatgaaacttgaagatattatgcgacatgaaataagccagtaacaaaaaagacaaacattgtatgattcctcttaaatgagtttcctagagtgataaatttatagtgacagaaagcatggtgtttgccagaagctgaagtgtgggggaaatggggattaagtgtttaatgggtatagtttcactatacaacaaacaggttataagagacaaagaagtatattatattgtaagtgcccaatgggttcaccctgcccactgcctagacagagctgatttatcaaaagaggggaattgcaatagagaaagtaattaatgcagagccagatgtgcaggagaccagagttttgttattactcaaataagtctccctgagcattcagggatcagagtttttaaggacaacttggtgggcagggggaaaccagtgagctgggagtgctgattggtcagagatgaaatcacagggagttgaaactgtcttcttgcgctgagtcagttcctgggtgggggctacaacaccagctgagccagtttattgatctgggtggtgccagctgatgcatcaagtgcagggtctgcaaaatatctgaagcactggtcttaggttttacaataatgattttatccctaggagcaatttggagagggtcagaatcttgtagtctccagctacatgactcctaaaccataatttcttttttgagacttgtcacccaggctagagtgcggtggtgcaatctcggctcactgcaacctctgcctcccgggttcaagcaattctcctgcttcagcctcccaagtagctgagattacaggcgcctgccaccacatccagctaatttttgtatttttagtagagacggagttttaccgttttggccaggctggtcttgaactcctgacctcaagtgatctgcctgtctcggcctcccaaagtgctgagataacaggcgtgagccactgtgtctggccctaaaccataacttctaatcttgtggctaatttgacagtcttatgaaggcagtctagtccccagacaagaaggaggtttgttttgggaaagggctgtatcatctttgttttaaactataaactaagtttcttccaaagttagttcagcctatgcccaggaacgaacaaggacagcttggaggttggaagcaagatggagttggttaggtcagatctctttcactgtatcagttataattttgccatggcagtttcaatatattaataaaatattccatacagcaggcaagtaaaacagctataaacattacacacctaataatagaccctcaaaatacataaagcaaaaattgacaaaattgaggggataaatatatttttatagtaatagttggagacttatttaccccagttccaataatggatagatcattcagacagaggataagaaaatagagaatttgaacaatgcaataagccaactagacttaacagataaatataaaacactccaccccaaaacagcagaatacatattcttctcaaatgcttatggaacattcttccagaaagaccaaatgttaggccacaaaacaagtcttaatagatttataaagatagatattatacatatcttctccatcccaaacaggataaagatagagctcaatagtagaagaaaaaaaaaagtcatccaaatttgaatggaagagggaaaattatattctcagataacatgatcctgtatacagaaaatctgagtccaaaagataactagtagagctaataaactaatttagcaaagttgcagcatataaaatcaaaacaaaaatcagttgtgttcctatatagcaggtatgaacaatccaaaaaggaaattaagaaagcaattttatttccaatagcatctaaaagaattaaatacttaggaataaatctaaccaagctggtgaagggcttgtatcctgaaactacaaactattactgaaagaaattaaagacttaaataaatgaaaaactatcctatgttaatgaataggaaggaagacttaacattgttaagatgttaatacagtccaaagtgatctacagattcaatgcaatcccaatcaaaattccaatagactttttcacagacatagaaaagctgattct

SEQ ID NO: 97049 - DNA, 96027 bp, Homo sapiens
  misc_feature (1)...(96027): n = A,T,C or G
caacctggtgtccatcaaatcagctaggactcagcaaacgaggatgagcggacacagcaagccacaagctgattatgcacaacactgatgcttacataacaagaacaaaaacacacaaaacaatactaagtattttctactaggacatgtgtatgtgagtgcacagaagaagatggagggattcataagtggattcagtggttctttctgcagatgggagacactgcagtatttcccttttgttaagatgttctcatgtgtttctttttcttggccggtcgcggtggctcacgcctgtaatcccaccactttgggaggccgaggcgggtggattgcctgaggtcaagagttcgagaacagcctggacaacatagtgaaccacccccatctctactaaaaataccaaaagttagctgggcgtggtggcaggcgcctgtaatcccagttacttgggaggctgaggcagatgaatcgcttgaacctgggaggcggaggttgcagtaagctgagatcctgccattgcactccagcctgggcgacagagcgagactccgtctcaaaaaaaaaaaaaaaaaaaaaaaaagaacctgattttatttcatgtcagccctaagagctggtagcccaggcaagagtgcaacaccctccccaccccccatccctgcagctggtgaaggaatcctttgaacagtagctttcctgggccagtcaatattgaaaagaaagcttttaaatgtcttgctgggagccgttgccggcctccactcccctacagctcagggaagtaagggttgataatggtttgctgtcaggcctgtctgtctgccctgcggtgttaccaggcacctctgaaataattctggttgcatccacaaggtttttgtttaaggttcaaagtgagcaaactcagaggtctccttgcgttcttttgtatgagctggggggatgggcgtgtgtctgtgtgggagagagtcagggctgtggcaaagaaatgattttctgaagtcagttcagtattgtttgagccatttcaaatagtatattgtttaaagtgtcttttaaaggtccgggaaaatgctaaaaagcaaaaatcatccaccattctgccaccaagagaggatcactgtgtatttctgatgtatttatttccagacttttctatgtatttgggcatgaaagaactttttggagtgattgaaatactctatcttcatggtgtagtggttgcatgactgtgtacatctgaattttacagtgtgcaaatcgtagctcattcaacttgacatgaaaagcacagtggaaagggcgccattgggatctttctttgcacaggaactgagctttgtaaacagcttggctgtggtttctttgcagacactgctccagaggctgctctgtgctccctggggatgaactataaggtgctttgtcatcccccacagatgcccactgaggtggttttcagcttttctccgcaaaaaccatactgtgaacagtttgtgccatatcttgagtgatttattactgggccaaggagtatacatattttataagcttgtggtattatcagcctgttttttggaaacttgtgttgttctatccagagcccagaactgtctgggaatgtccttgggccattattttcagtgtcataaagcttttgggtttttaggggtcttggttagtagatttgcttagtgttcagacaccaagctttacttctattaaaaataggcctgttgttagtcaaagatttcttagatacgacaccaaatgcatgatccaaaaaagaaaaaaatgatgaatcggaccttcatcaaagttcaaaacatttgcacttcaaaagacactattaagaaaatatgacgaacaagagactaggagaaaatatttgtaaaacatatgcccagtaaaggacttatattccgaatttacaatgaactcttaacaactcagtaacaagaagacaaacaatccaatcaaaaagtgggtgaagatacaaacagacatttcaccaaagaagttgtataaatagccaacatgtgcataaaacaatctcagtattcttgttagggaaatgcacatgaaaactatgatgaaatactatattatactcatgagaatagctgtagtgaataaaacaggcaataaatcttgtcaagaatttggagaaacaggaaacttcatgttgttgatgggaacacaaaatgatgcagcccctgtggaagatagtttggcagtttctcaagaagttaatcacaaaatgaccatacgacccaactcttccactcctagatatcgacccaagagagatgaaaacacatccacacaaagacttgtgtgggaatgttcatagcaacgttgttcataaatgtctaaatgcccaagccaaatgcccattaactgatgaatggataggcaaactgtggtctgtccatacaatagaatattattcagtcatgaaaaggaatgaaatactgacacatgcctcaacataaataaaccttggaaacataacggtaggtgaaagaaaccagtcacaaagccagaacacagtgtctgactcaatttataggaaatgtctagaaaaggccaatttttagaaacaaagtagatatggttgcctaggactgggagttggaacagagattaattataaatgtgcatgaagtcttattagggggatgaaaatgttctaaaatgaatttatgatgatgattacagcactaggtaaagttactgaaaatcattgaattctacgcttgaaatggatggattttattaaataaaaaatacttcaataaagctgttaaaaatggggaaggggcaagaagaaggtgtatgtagctgattcccaatatgcttccagctgccagagtcttgggatagcttcaggaaggcctctacatagcctgtgggagcttgggaaccctccacccggcagagtaaggatgaagggatggattgttcagtgaccttgaacacctcctgcccctggatgcttgtccctctgcttaccagatgtacagtccatgtcttcatccccttgaagtggggccagcctcatgacttgctttggttaatggcatgtagcagagtgacatggtgctggttccacgcctaggtcccaagaggccttgcaacttcttctttgccctctgggatccctgctctgagaatgccatctgaggaagccaggccgggctatgaggagatgaggcaccacatagaaggaagctggtgtaccactgggggcgggggaacccatggaggggaaccagcgggcccacgaagagccagcagcaactgccagacatgcaagtgaggacttctggcagcttccagccatgttggtcctccagctgagcacagcatagggagtgagcccaggcgaggccagcagagaactactcagctgatgcatggagtggtgagaaataacaagtgtttgtttgacaccattaagtttggggatggtttttactcagtaacagataactgaaacagaagccccccttcctttgcttctgatctgccagccctgaagccatcttcactgaggtagggttgtagacccaccactgtctcatacctgagtagtgggtagcacacctttgccctcacttcatcctgtgatgccctaggtcttgacccagacaccatctctctcagggcagtggttccatattctggttgtgcaatacaatcttggtggtaatttaaaaatatggctcccgttcctattatttattgcacaacaaatcaccccaaaacttagtggtttaagagagcaacaatttgcttataaatctacaatttctcatgatggagacagcttgtttctgttcctcaatgtcagccagggtggctcaaagactgagggctgggatcatttgaagtcttgcactctcatatgtctgggggttgaggctgcaattggctgggaaccgtcagtcacaacagtttcatgtggccatttcacatggctgcttgggcttcctcacaacatgctagctggattcctagcatgaatactatacctcaaaagaacagggcagaggtagatggaatttatatgacctggcctcagaaatcacatagtgtcatttcctctgcactcttttgactgagccagtcacagaggtctgcccagtttccagagaaggagactagaccccccaactgggtgggaggaatgtgaacctcacaatgcctgccggaagattatgtgggaggggatcttttgaggtggctgtctttggaaaatacaatctgccactggtttctaagctccacccctggagagtcacttccacaggtctttaatgaagcctcagaattgtatttttgacatgtaggtgtttccagtgcacatccaggatggcacattggcccttggtccaagacctctggcctctcactattgagcttgggaagagattggcttctgtcctaggtggtgatgtgatctaggaacctttggagggaaaccagcctcaggccagtgggtaggacctggggagcaggaggcctgatgtctgtccaagagtggtggtagtgttgaactgcccttgttaaagggcccttttgggggctggtgtatctgagtagctttgtattcttccagcccttcatgtgtctcctgagcacttcctggcatacagacagcagtctccaggctgctgcaggtggggtgtgggcaaggtggttgccgttctcgtgctaagagtttgaacccactcctcacagggcccactgccatttggtgtcttccctaacagctgtacttgaggctgtttttcagactgaacccgaggagtattggagcacccagtattaaaggggctgtcccatgccctgagagcggtctggggaggcatgcactgggaggctcaggacttgggtctcagccccagctgcgccacagttttgctctttgacacaaagtaggtcatagctcaactcagctaaagttttcttaatagccaagcttgtgtgtagcctcagctcccattctcttgaacaaactgactgccggagcagggtgccctccctcaacagaagacctgccttggctccccattgcccatagtcctgtgccctaacctgccctgtggggctatgtaccatgggccctgcacactgctacagcctcgccacccattcctgaaacttgccatgccctttcacctctatgggcctttgcatatgctgttcctctacctgggatgctttctcttgctttcaccgcctctgcctagtcaccccccagatttggcgttgctcacttcctccatgaggcctaccccagccctctgtcccagccgcttgctgtgctgaggtcctctacattaggagccgcagccagggctctcagcttgggtggtttagcagacgagcggaggctttggagtcaggcagtccggatttcaacacagtgctgcgccctacttgctgtgtgacctcgggcgaatcgcttcacctctctaagctttgttttctcatctctgagttggcgctcatgatcactaacaagaattctcatgctattttaaggacatcagcgacagaagcagagaatctaatgagagggatcgtggggaggtctggtttttaaggacatcggcgacagaagcagagaatctaatgagagggatcgtggggaggtctggagtttgcagagcccacagcttcctttgcttttattaaagaatgggaggtgggagctgatggagggggaggaaggagccatcaacccctacctcccatcgtacgggcaaggaccaggcttatagtaggtgctgacgttccgagtagaaactccttaatgagtgaatgcatgagtgaaggaatgaaggcagctggtttctgaacctggatgtagccatttgacaaactgcgcgcagtggctgagggggaaagccccgccccgcggagccccgcccccaggccgcacgccctcgcgtctcctagcaaccgccaaacgtagctgagtggctgggcctgcggccctccctgcaccggcggacgctcctctcagtcttggagtctcttcgcccaggtggctgtggatccggtacgggagttgccgccgcggtccaactccccgctgccgcccagcgcatccgctcgcaggtaccgccagcacctggaggggaaccccgacccctgcccccacctcggccgccgcagcccgggactcttcccgcctcgcctcgatgcgtgttccctcttcggcgtttgcccggcgttccgcctccatgggcctgagctgatgccccgagcccagcacccagtgcacattcatgttctgtcttggggacagggcttgccctccccgacctcgccaggctcctgcacgtgctgcccccggcctggtttgcctctccccaaatagcaaacgcatcttgtgcttaggcgcagcargcctgcctgagcagacgtcccctctcccgcctggtggctcccgggagctgctcacctggggcaggcattccagaagcccggcgactgactcctggttaggcgaaggaaacggggttgctcgtcgtcgtgcttactgccagccacccttatctgytgttccttcatccattcattctctaagtcgattgagtaccgactgtgtggcaggcagtgaaggagccccggcgttcatctaggagcaggcgggggaagcagggaagagaagggtgggtgcttctgcaggaggccgggcttacctcctggagcagccctggaatacaggcggggacagccttcactttctccctgccaggagcgccggcggccagcagtgcgctctgcagcatgtcgctacatgcctgggagtgggaagaggaccccgcaagcatagagcccatctcctccatcactagcttttaccagtccacgagcgagtgtgacgtggaggaacacctgaaggccaaggccagggcccaggagtctgactctgaccgcccgtgcagcagcatcgagtcctcatctgagcctgccagcactttcagctccgacgtgccccacgtggtcccctgcaaattcaccatctcactggccttccctgtgaatatgggtaggtgctagagcagaagtttaacaccctctgaaaaaaggaggtgcatgactttctgcaggagtttagggcgcatacaccccacatcctctctccacctgccccaccccaaagcgggctggccagtgccagccaggagcagaggttgaaaagaaacagcaattttaggagaggcccaactgtggctgcatcagcttcacatacttaatcctctcaacaaccctaaagcaggtgatgttctgtctgctttttacagaagaaaaaaaaaccatggagaggttaaggcattgattctcataagcgcttgtgcatcacctaataccttgtttaaaatacattttccgggagtctgaggcaggagagtctcttgaaccccggaggtggaggttgtggtgagcagagatcacgccattgcactccagcctgggcaacaagagcaaaactctgtcaaaaaaaaaaaaaataataattctttttttattgagatggagtcttgctctgtcaccaggctggagtgcagtggtgcgatctcagctcactgcaacctcagccttccgggttcaagcaattctcgtgcctcagcctcccaagtagctgrgattacaggtgcacgccaccacacccatctaatttttgtatttttagtagagactgggtttcaccatgttggccagaatggtctcgaacccctgacctcaggtcatcctcctgcctcagcctcccaaagtgctgggattacaggcatgagccaccgcacccggccaaaaaatacattttctctgatctgttgaatcaatctctgaatgtaaaggtgtatcaattagctattgccacaaaaatgcggtgcaacaaacccaaacaagcccccaagctcatggctgcacacaggaacctgaggttctcctggaggtgctgggcgctggtctaggctgggttctgcaacagctcagctctgcttcatgctgctccttttcctcctggaccagtgggctatcctagaccccttcttgttctagaaacacggacacacaggagggcaagcctagccccacaaacactcctcaagtctttgagtgtctcccacctgctagcattttattggccaaaccaagtcacatggttccagcccaatatgaggggaggagacaagtagtacttcacatcttgatagaccttgctttgttttgttttcatctgcttacttgaactagcccaccattatgatttcaacttctcctggtattctgtcgatggtgtaagtttcttgtatgggttggaaccccgagagcgcaccaacagacaacacgaggcggtgtggagcaacatgctgtttcaatgaacgccttggtgcaggccggctgaggcctaaaatggcgtcagccccaagtgaggacggggcaaaggttttatagtctcctgtaaacaggaagtgtcctagtctggcgtaactgctacgctgtacccggatggcctctttctcatcttcatgtcttccggccagggtaggtgtattccagccggctctcctcctgcttctgctattttgctggtgcacgctgctgacgtaagtgaccttacgccttgggactaggcttgagaagggaggagttattcatctccttaagctttcaggccctggggagagtcttacagatggttgcttcagctattttggaggccgactggttgggtgtatagtatgtttagaactgctccatcttcttggtgaactgaactttttgtcattttatggtgaccattcctgtctaaaatgatgcctttactmttgggtctattgctataaagcaaaagagcctggaaaaagacatctggcaaataccaaccaaaagaaaattggcacttgacctcctttagccctcatctctttcacagcatcttctaagcgtgtttttgtttttgttgttgttgtcctctaaaggcatttataaaatggatctctgtggggcaaaacttcatgagaccttgtgtgcctaagagtatttttttatcatgccaatacctttaaatgacataccttcggctctacataaaattctagtttaatttttttttccttcaatacctgagtatttacagatgagtacataaatgtttctttatataaattatttatttatttatttttgagacggagtcttgctctgttgcctagactggagttcagtggcacaatctcggctcactgcaacctccacctcccaggttcaagcaattctcctgtctcagcttcccaaagtagctgggaccacaggcacatgccaccacgcccagctaatttttgtatttttagtagagatggggtttcaccatattggtcaggccggtcttgaactcctgaccttaggtgatccacccgccttggctttccaaaacgctggaattacagacgtgaaccaccacgcccgacctataaattgtttatttcagagaaatgagatcctacaacttactttaaaatgttttgacatgatttagattatctttgagaatatgatcaaggatacttgtttttgtttgtttgtttttagacagagtctcyctctgtcacccaggctggagtacagtggcgcgatcttggctcactgcaacctccgcctcctgggttcaagcgattctcctgcctcagcctcccaagcagctggaactacaggcacatgccaccatgcccagctaatttttgtatttttagtagagacggggtttcgccatgttggccaggctggtctggaactcctgacctcagatcatcctcctgcctgggcctcccaaagtgctaggattacaggcatgagccactttgcctgggcaaggatacttgttttaattttgttgtttcattttaaacacctatatattaacagtattccattatatgtctctaatttatcctaccccttattggtggatatttgagttgtttcaaatgtttttctgttgcaattctgcgatagacattctttacgtccatttttgtgcatatatgtgggcacttctgttgcctgtattccaagaagtaaatttgctggattgaaggcatgtattaatagtttttgatagatattgtcaacttcccctttaaaagggctaaataacttgcctttctgtctacagaaaatgagaggctctgtttgtccacttgctggcccacctgggattgaatcagaaaaggtctaatgctaccagagactggcaggagaagcttcactccaatctctgcacaaatgctaactattttggtagcagaaaaattaatgctgcagcagtctcctggggttaaaaatttagactttaaaaactacagctttaaagayagtcatgtttttatagaatgatatttggattaaatgtttatggagcttcttatgatgtgaaaagccccaacctagagtgtgcagtttaagctggagtgtaagcaaccaggggtggggtcagggggctccttgggctctggactctggcagaagcccatctgtaccttccacatcctgtcaccctatccaccccgcattgggtagcttcacccatgacatttttgtgaagctgctttctctgtctgtctggaatatctgccagctttgctcctctaagactctgctaaggtccccctgggaggcccaccccaccctccccatgcagagttttctcctccaccttcgttcttcacaaccttgttcctgctgctattattgcacaaatcacattgtactgtgatttttttttttttttttttacctgcttcttagggccaggagggaccagggtaaggcaagtatggcgtctctcctaataacatctggcctggccatgtgatttcactttaactctatcacctttttaaccctaggcctactaaccaacactcactctccaactgagacactcactctgaaaaccatgcacctaaattttgcactcaggtgcccagtccaggtcgtgctactctgctggctaggagcactggacctgtacctccttccccaagtcgggcaggcaatgtggagtgctcagcctctcacaacatcaagctccagggaactggggagacgggtctgcttttccacatgaggttaaaacgagactttttcaatctgtatcttcaaggtcagaagggaaaatatgcaagtttgattgaaaaatataagaaacaccctaaaacagacagttctgttacaaagatgcgtcgtttttaccacattgagtatttccttctgccggacgatgaagaacctaaaaaagttgacatattgctatttccaatggtggccaaagtattcctggagtcaggagtaaaggtgcgtgtgtgagtgtgtgtggccttgtgtatggtctgatgctcatcacgaaaagtgtgctgctccatggatatgcaacatcagctccacctccagcttgctagaattggaggatcccgggccccacctcctgagtgggaatctgcactggcctgatcattccaattactgacttttttttttttgttgagtcagagtcttgctctgttgcccaggctggagtagagtggtgcaatctttgctcaccacaacctctgcctcccggttcaagcaattctcatgcctcagccacctgagtagctggaattacaagcacgagccaccatgcccagctagtttttgtacttttagtagagacgggatttcactatgttggccaggctggcttcgaactcctgacctcaagtcatcctcccgcgttggcctccctaagtgctgggattacaggcgtgagccaccgcacctggcctattttttatttagatattttacccagtaatttccagaatgtttcaaaagtttttgtagttcttgagatttcttttttctgtgtgtgtgcatgtgtgcagacgtgtgtgtgcatgtgtgtgtacacactacctgcacacacacactcctgccagtggtttggccctgggtcattgcttagaagcaatcgaggaggatgctatttgcaggtaattactttgattttattcttcctaaggaattcaaaagtctgacagggcccagcacacaacgccccattttccctgagctcagagcctggagagtgaccaggcactgaagtcaggcagcgctgctgctgagggccaggctggggctggggcttgctctgttcgccacggcctttgcacatctttccccagttgacatctctgaatgttgttttacacagactgtgaagccgtggcacgaaggtgacaaagcctgggtgtcgtgggagcagacttttaatatcactgtgacaaaggaattattaaagaaaataaatttccacaaaatcaccttgaggctctggaacactaaagacaagatgtcaagaaaagtcagatattaccgattaaagactgccggcttcacagacgacgtgggagcttttcataagtcaggtgctctggttttatttgaaatggttctggaagcctggggcttactcactagtaacagcataaaagccagtgtctcctggtttccttcatctaattggcatgtgcacacacgggttttgcagatgttgcagggcatcccaccaggccatgctgtggtgacaggaagcgccacataggggagtgagggtgtggtgggcagtgttcttgaaactccaccttttgggccctttcattccagggcagctctgacacaggcacccatcaccggtctggactagtattatatgttcactgaaaaaaaaaaacaaaaaacaaacttagaggataccaaggaacaaaagagaaaacttaaaaatcccaccaccccaagccaattgtcttaagagtctcatgtagactcttccagactcatttgtgtaaatatatcaatatcagaaagtctttttttttctttcgagatggagtctcgctctgtcgcccaggctggagtgcggtggtgcgatctcggctcactgcaacctctgcctccccagttcaagccattctcctgcctcagcctcctgagcagctgggactccaggcatgcgccaccacgcccggctaatttttgtgtttttagtagagacggggtttcgccatgttggccaggctggtctcgaactcctgacctcaggtgatccacccaccttggcctctcgaagtactgggaacacaggtgtgagctactgtgcccagccaatgtcagaaagtcttttgaactcattttgaaggagagagccaggagggatggaaagatgcaggctttgaagccagacggtagaattcagtcctgtctccatcttgtacttgttggtgacttgggcatgttcctgaacatacgtttctcatctgyaaaaaaggaaaaataactagtacctgcttcactggaatactggaggcaggttgaccggcgtggtctacctgggtgcaagcaatgagggtgtgcattgtctatagaaaatttaagaactgtaattaaatgctactaactaaactatgacatggcattaattgtaagatgcatcctgatgcttagagatgttaaaaattaaaaaaaggcaggtacagtggctcatgcctgtaatcccagcactttgggaggctgaggcaggagtttgagaccagcctgggtaacgtggcaagaccctgtctctataaaaaatttaaaaatcagcccagcatggtgacgtgctcctgtaattctagcttcttggaaggctgaagtgggaggattgcttaatcctgggaggtcgaggcttcagtaagctgtgtttgtacgactgcacaccagcctgggtgatggagcaagaccttatctcaaaaaaaaaaaaaaaaagtaaaacagatgtacatattagaatcaatgatatatggtactattatcgttgtcagcaccttccagacgagtataattatcctcaattttgtgtggctggaaagccttgcttttctctgattttccagcccaccttctcaaggagcctttctgaccttggaggcttggaacttcccactttcagtctttcatktatgtccagggtttcttactcttggcactattgacattttgggccagataattcctcgctgtgggggctgttctgtggattgctgggtgttttgcagcatttctggcctctacccactagctgccagtagtagcctgccagttgtgacaatcagatttcttcagacattgccagatgttccctgggggtcaaaatcacccctggctgagaaacactgatatatatacctacactacaagtcgtaggcttccagtgtgagaaaatgggattcaaggtaatttttctcacctggactataggaaagaaccatgtcctcaaagtgtgggttgtggaccacctgcatcagatgcttacatgcagattccaggcctgtttggatctgctgagccagactttctggttagtatctgccctgcagtgggctttcactggagtagggtgttgaggtgggagtatcaggaaggattcctggaggaagggccatagtagcaaagtttgggtgggtaaagggaatttggtggccagaaaaggaaggagaaaaggtgttctagggcctcctgctatgagtattcttattgattgattgagacagtctcactcwgttgcccaggttggagtacagtgatgtgatcatagcttactgcagctttgagctcctgggctcaagtgattcctcctgcctcagcctcctgagtagctgggaccacgggtatgtgccaccacacatggctactttttaaattttatcttttatagagattgagtcttactgtgttacccaagctggtctctaactcctggtcttaagcaatcctcctgccttggcctcctaaagtgctgggatcacaagcgtgagccactatgcctagcactgtgaaacgttgcaatgacagcacctgctccttcctgaaccctgtcccaagcttagcatcactgcttcttatttaaataagtttttccccattaaaaaagcagtgcgaattcactttgtaaaacaatttagatatcacctagcaaaaaagagaaaaaattaaaaccacatgattcctgtccagagatagccattgttaacatttttcctgtgaatctagtgtacatgttgtcttaagtcctgccttttctcacgtaaaaagatttcttacagaaactcttatttcttgggagtgcagaaatgctgtaagagttctgyctcatgttatgaaggggataggatgtttcttggatgcctggtaggtcacatgccagaacttgttagcattcagcctgctggtcttgaagaaacatcctaatctgactcagtgtactagtcagtgttctctagagggaagggctaataggatagatgtatatatgaaagggagtttattaaggagtattgactcacatgatcacaaggtgaagtcccacaataggccgtctgcaagctgaggagcaaggaagccagtccgagtcccaaaacctcaaaaatagggaggccgacagtgcagccttcagtctgtgaccgaaggcctgagagccccccggcaaaccactggtgtaggtccaagagtctaaaagttgaagaacttggaggctgatgtttgagggcaggaagcctccagcatgggagaaagatgaaggccggaagactcaggaagtcagctccttccatgttcttctgcctgctttcttctagccatgctggcagctgattagatggtgcccacccagcttgagggtgggtctgcctctcccagtccactgactcaaatgttaatctcttttggcaacaccctcacagatacaagcaggatcaatactttgcattccttcaatcaagttgacacttagtattaaccatcacactcagcatttcttttccctttaatctgctcgtctgctcgatttctcaggactggatgaagacagcattcttttcaaagccccccagtcatatttaattactcctatgctctcaattctgggcacccccacctggtgcccagtgggtgtcccccgcctgttgttcttgagagctctctgcccagctgtcttttccctcctgccctctggctttctctgcactcaggtttgttccccctcctctctcctgccggcctggcctttctctgtctccccttcggccctggtgctgccttgctctgcagctgttcatggctgccccagggcctttagagaaccaagtggttctggccttgaaggcattttacaatctgtttccaagcctcctcctcactgccactgccccttcacaccacagcccacctcctggtccctgcagacacgtggctctcccttgtggtaaggcctgcctccagccagctgggcattcttccacggctcccagcctcatctctttccccaaaaatgttatctataattcaacactgaatccaatttcacctccttttttccacttctttcttgtagcgtctttcatctccatttgtcaattcacttcctccattcattcattatcctacccattcttggtggctgccatgtgcatgcgaggcctctagggatagaaatgaaaggcattgaggagctgacactctggctggggacaaggcactctgagtgcagtcctggctttgttaaggactacctctctgaccacaggaaagttacttcagtgtcagatcttcatctgtgagatggggaatgttactgccctccttaaagtggaattctaggagcgagtggggcagcacatgtcacaggctcaatgctcgcatttggaggaggctgctggcctgctgaggtctgagaacctcaacatgtgtgcctatcccagacatgtgtgcttattgttttgagtttcctggaatttggaggcagcagctccaggagaacaggggccttatccattgcttcatcttcttcagaggaaagtgagtgtcacttataggcataccttggttgataatgctttgccttattgggcttcacagagatcatgcgttttccaaattggaggtttgtggcaaccctgtgttgaacaagtctattgacgccrttttttcaacctcgtgtgctcactttgtgtctctgtcacattttgataattctcggatttttcacacttattatatctgctttggtgatctgcgatctgtgatctttgaagtcactattgtaaatgtttggaggtgccacgaactgcatgtgtgtgaaacggtgaacttaactgataaatgctgtgtgtgttctgactccagaacacagggttccagtgatcggccattctcctgtctctccctctcttcaggcctccctattccctgagatacacaataccaaaattaggtcaattaataaccttacaatggcctctaaagtgttcaagtgaaaggaggccttgcacatctctccctttaagtcaaaagcttgaaatgattaagcttagtgaggaagccacatcgaaaagcctagataggatgaaagctaggcctcttgtgctgaacagttagccaagttgaggatgtaagggaaaagttctagaaggaagttaaacgtgctactccagtgaacacaggaatgataagaaagtgaaacagccttatagctgatacagaggaagttttaatggtctggatagaagatcacaccagccacaatattaactgaagcctaatccagagcaaagccctaactttcttcagttccatgaaggctgagagaggtgaggacgctgcaaaagacaactttgaagctagcagagattggtttatgaggtttaaggaaaggagccatctccrtaacataaaagtgtaaggtgaaacagcaagtgctgacggagaagctgcagcaagttgtttaggagatctagctaagatcactgatgaaggcaactacactaagccacagattttcagagtagatgagacagccttctactggaagaagctgccatctaggactttcatagctagagagaagtcaatgcctggcttcaaaggacaggctgactctcttgatagggacagtgcagctggtgacttaaagtagaggccaatgctcattgaccattcccagaaccctagagcctattaagaatgatgctaagtctgcctgtgctctagaaatggaacaacaaagcctggatgacagcacatctgtttatagcatggtttactgaatatttaaagccaactgttgacacctaccgcttagaaaaagactcctttctaatatgactgctcattgataatgcacctggttgcctgaggtctctgatggaggtgtacaaagaggtgactttggtttcaacatccatgctacagcctgtggatcaaggagtaattttgactttcaaatcttattatctaaaagccacatttcataaggccatagcttccatagatagtgattcctttgattgatatgggccaagtaaattgaaaaccttctagaagtccaggtgcggtggctcaagcctgtaatcccagcactttgggaggccgaggtgggtggatcacctgaggtcaggaatttgagaccagtgtggccaacatagtgaaaccctatctccactaaaaatacaaaaaatatctgggtgtggtggcaggtgcctgtaatcccagctacttgggaggctgaggctagagaattgcttgaacctgggaggtggaggttgcagtgagccgaaattgtgccattgcactccagcctgggtgacagagcaagactgcatctcaaaaacaaaacaaggccaggcgcggtggctcactcctgtaatctcagcactttgggaggccgagggggacagatcacgaggtcaggagatcaagacgatcctaactaacgtggtgaaaccctgtctctactcaaaatacaaaaaattagccgggtgtggtggtgggcgcctgtagtcccagctccttgggaggctgaggcaggagaatggcgtgaacctgggaggcagagcttgcaatgagccgagatcgcaccactgcactccagcctgggtgacggagcgagactctgcctcgaaaaaaaaaaaaaaagaaagaaaaagcttccggaaaggattccccattctagatgtctttaaaacatctgtgattcatgggaggaggtaaaaacatcaacattaacaggagtttggaagaagtggattccagccctcatggctgactctgaagggttcaagtcttcagtggagcaagtcactgcagatgtggtggaaacagcaagagaactagaattagaagtggagcctgaggatgtgactgaattgctgcagtctcatgatcaaatttgaacagatgaggagttgcttcttagggatgagtaaagaaagtgatttcttgagatgagatggaatctactcctcgtgaagaggctgtgaacattgttgaaatgacaataggatttagaatagtacacacatttagttgataaagaagtggcagggtttgagaggattgactccaattttgaaagccgttctactgtgggcaaaatgctatgaaacagcttcacatgctacagagaaaccgttcatgaaaggaagagttgatcaatgcaggcaaattcatggtgaggtgaacccagccctcagcacccaccatcctgatcactgagcagctgtcaacattgaggtaagacccccacagcagaaagatgattacccacaggctcagatgagtgttagctttttttttttttttttttttgagacagggtcttgctctgtcccccaggcagcagtgcagtggtgtgatcatggctcactgtagccttgacctcctagaatcaagcagccctcccacctcagcctcccgagtagctggaattacaggtgcatgccaccatgcccagctatttttctttttgtagaaacaaggtttcaccatgttgcctaggcttgtcttgaactcctggcctcaagcgatcctcttatctcagtctcccacagtgctggtattacaggcatgagccactgtgcccagcctgtaatatattttagcaatgaagtatttttttctctttttcttcctttctctcttccctcgctccttttcttcctttcttccttccctcctttctttctttttctcttttttctttatatatatatatatatatatatatattattatactttaagttttagggtacatgtgcacaacgtgcaggtttgttacatatgtatacatgtgccatgttggtgtgctrcccccattaactcgtcatttacattaggtatatctcctaatgctatccgtcccccttccccccaccccacaacaggccccggtgtgtgatgttccccttcttgggtccaagtgttctcactgttcaattcccacctatgagtgagaacatgcggtgtttggtttttttgtccttccgatagtttgctgagaatgatggtttccagcttcatccatgtccctacaaaggacatgaactcatccttttttatggctgcatagtattccatggtgtatatgtgccacattttcttaatccagcctatcattgttggacatttgggttggtttcaagtctttgctattgtgaatagtgctgcaataaacatacgtgtgcatgtgtctttacagcagcatgatttataatcctttgggtatatacccagtaatgggatggctgggtcaaatggtatttctagttctagatccctgaggaatcgccacactgtcttccacagtggttgaactagtttacagtcccaccaacagtgtaaaagtgttcctatttctccacatcctctcccacacctgttgtttcctgactttttaatgatcgccattctaactggtgtgagatggtatttcattgtggttttgacttgcattctctgatggccagtgatgatgagcatttttcatgtgtctgttggctgcatagatgtcttcttttgagaagtgtctgttcatatcctttgcccacttgttgatggggttgtttttttcttgtaaatttgtttgagttctttgtagattctggatgttagccctttatcagatgagtaggttgcaaaaattttctcccattctgttgcctgttcactctgatggtagtttcttttgctgtgcagaagctctttagtttaattagatcccatttgtcaattttggcttttgttaccattgtttttggtgttttagacatgaagtccttgcccatgcctatgtcctgaatggtaatgcctaggttttcttctagggtttttatggttttaggtgtaacatttaagtcttcaatccatcttgaattaatttttgtataaggtgtaaggaagggatccagtttcagctttctacatatggctagccagttttcccagcaccatttgttgaatagggaatcctttccccatttcttgtttttgtcaggtttgtcaaagatcagatagttgtagatgtgtggtattatttctgagggctctgttctgttccattggtctatttctctgttttggtaccagtacgagtctctatctcttagccaggctggactgcagtggtgcagtcacagctccctgcagcttcaaactcctgggctcaggcagtcctcccaattcagcctctcaaagtgctgggattayggacatgagccaccgtatctggccccaataaggtattttttaaacttaggtatgtacatttttttttagatataatgcttttgcacacttaatagactacagtatgatataaacataatttatatgcactgggaagataatgtatgactcactttattgtgatatttactttagtgtagtctgaaaccgaacgcccagtgtctccaagaaatgcccatagtagttaattcaataaatattttggattgattgagtcaatgatcctttcttctcctgcattctagaagtgagacatttggttttaaatcagagaaaattatctgaacagggcattgagaataccaacattgtcagagaagagtcgaaccaggaacatccgccaggaaaacaagaaaaaacagaaaaacacccaaagtctttgcaaggtgagcggagaaggcctttgtggacaagctgagtgcaaggcgatggcagggaaagcggttgtgtggtgtgctggagcaatgcatctgcatgggcgtccctcctgtgtattggcagcagaggcgggcggggctcaccctgccacacggctgtattgctcttgctgcatggcttactttttgttactgattctgagttctgctcttgtcccccaggctggaatgcaatggcacgatcttggctcactgcaacctctgcctcctgggttcaagtgattctcctgcctcagcctcccgagtagctgggattacaggcgcccactaycacacccagctaatttttgtatttttagtagagrcggggtttcaccatgttggccaggctggtcttgaactcctgacctcaagtgatccacccacctcagcccccaaagtgctgagattataggtgtgagccactgcacctggtccgaaaaacttttctgactgtggaagttgtatatgtggtttttagaaaattcagtgaatagataaaagtataaaacaaacagggaaaacaatttcatcacgaggagcaatctatgtaacattgtagtgtggtggctatgtagtatttcatctgctgggcagactgtaatttgctaaccattccctatggttgggaacttaggactgttttcattattctctaatgtaaacaggactgaaatggacaatttaatagataatagactttcttctttttctctgtgggctgttatgtaaggaactggaggtctcctcttgactacatttatccaaataatcaaatattagtctgtatgtttattcattcactcagttattaacaatatcccaggccttaccacatcccaggccttctgcatagagactgacattacagaaatgggtcaggggccctcatttcttagtgaactagcatgtaacaaaaagcttggaaatatttgctactgttttcaggttctcaccaagcagagcccgaaacttcttccaagaacagtgaggaatatgagaagtccctcaaaatggacgattcttccacgattcagtaaggattgaacgatattttgggtggtgggagtggagcccctcttgtactagccctactatgagtcgtggtaggttttttagtaaatccagttaaactggatctcatgcaatccaggctaacttaagctaacagggaaggggtagcttgtgtttatgagtacatgttgcacatcaagctttctgcatgcattattttatctcatttgatcctcataatgataactttgtgaggtggtatgactatctccgtttcctaaaaaggtgactgagtaattaaatggtttacacaaagtgataaaccagaattcctggttaagccaggtttccaacccacaccttcagactcctgagtctccagccatcctgcatgaggtcagttgctcttagggtctctggtagcccaagaagggtctggagaaggagactccttggatgctatggggacaagggagagaatggaagctcagctggtggttttgggaaatggaatgagaagaaccgagagaacatgtctttaagcaattttgatttttaaaaattgtttttgtattgaatatatagattaatttgggaagaattgacatttttacattgttaaggtgtctcatccatgatcatggtatatatcctttcactcagttcagaccccccttatgtcctttaatagagttcatttgttctgcctataaatgttgtggataattcctataagtgaattcttagatgttttatagtttgggttatttttattaaaatatattattttccatcatatttttgagtttgttagtatcttgaatgcagaccaagtgtgtcagcattaggggggatttggtagaaatggagaatttcaggcctgcccctggtttactgaaccagagtctacattttatttgacaaaatccctaggtaactcacaggcacattgaaaactgagaagcactgggttagaggaatgcactatgaggtttttaaaaaatctgctctcatttagtccatcagtaaatagattctcagatctggcccctgatttttttcaccttcattaatttttctctttgtgaattttctagatggagtgtttcaagaacaccaaccatttctttggcaggagcaagcatgatggagatcaaggaattaattgagagtgaatcacttagcagcttaacaaacatattagacagacaaaggtctcaaagtaagttaggataggatttgggaattttataatataactagacttggaataattatgaaatattttaaattcaggatacttcaatgagattcttgcatatttgacaaaatgtttctcaaaagtaagagtactgtatacattttcaacttatgcatcccatccttaccgtctatccatccatccacccatccccatccatccattcatctatctgtccatccccatctatccatccatctctattcatccatccattcattcatccatccccatccattcatctgtccacccacccattccatttattcatccatccatccatccatccatccatccatccatcccatccctatccatccatctccatccatccatccatttgttccatttcttctcatgtcattcactcaccctcatcatccattccattccatcaatatttttgacccatggtgttgtgcatatggggaacatgaaaatctctaatatctaatggagactttcaaataaagaattacaattctttgtgatagatgttgtggtatgggtaggtacgtggtatgttggggaggcataaaagaatcatgtttatggaaagactctccttgaaagataaagtatttactctttttattttattttattttattttttttgagatggagtctcactctgtcacccaggctggagtgcagttgtgcagtctcggctcactgcaagctctgtctcccgggttcacgccattcttctgcctcagcctcccgaatagctgggactacaggcgcccgccaccacgcctggctaattttttgtrtttttattagagacggggtttcaccatgttagccaggatcgtctcgatctcctgacctcgtgatctgcccgcctcggcctcccaragtgctggattacaggcgtgagccaccacgcctggccttctcttctttttttttctgagagggagcctcactctattgcccaggctggagtgcaatggcgcaatcttggctcactgcaacctctgcctcttgggttcaaacaattctgctgcctcagcctcctgagtagctgggattacaggcgtccaccaccacacccagctaatttttgtatttttagtagagacagggtttcaccatgttggtcaggctggtcttgaactcctgatctcaaatgatctgcctgcctcagcctcccaaagtgctgggattacaagcgtgagccactgtgcctggcctagtgttcactcttatggtggaatgaagaacacagcatcctgtgttatgggatccgttcatgcagaagcatgtaatcttattcacatactgtcaagagagcagaaccctcagaagccactaaatcaacttcctcattctcagcttagatcccctcaccagtttctcattaagaagttgtgtttccagtgtgaggtgggaaaatctagagccagtgggtatactgctgcctcctgggatgggccatttcacgtccttttagctataattgctacagatcatttcctcatctctccatcagttaatctgttgtttcctgacactggcctggttctagtgcaacagtctatggctgcagagggaagtgactgcttgagccaggctctctgctgggtgctggagacacagttgaagaaaactcattcctattcctacggtccacaaagactaagtcacactttcacatgtgaatgcctctcaactcctgacttttgtcttttccggattaaaagtgtcactctttttaaaaatgtgctttaagcatttaatgagatttttaaaccgttctttttattttgaaataaagataggaaagttcacatgaaaatgcaacaactacatattcacaatttaggtgttagcattttgccatgtgttatgggtggaccgtcctgcatgcacacagtccccgtgccagggatctgagttgtctccaatttcttgctctccagcactgccatggtgagcatctgggcacacatgtgagtccacggcattggcccagtgggacccctgggacacaggctgtgagcctcgaccccattgctagatgctagtggtttactctccaggcagcatctctctcttttttttttttttttcttgagacagagttctgctcttattgcctaggctggagtacaatggcgcgatctcggctcaccacaacctccatctcccgggttcaagcaattctcctacctcagcctcccgagtagctggggttacaggcatgtgctaccatgcctggctagttttgtatttttagtagagacagagtttctccatgttggccaggctggtcttgaactcccgacctcaggtgatccgcttgcctcggcctcccaaagtgctgggattacaggtgtgagccaccgggcccggcctcaggcggcatctgttcccccctgcttgcagtcctgaggattgctgttctccccggtctgcacgggcatggtttagttcctgactcctggtgaggctgagcagcattgcataggcttatttggtcacactcttctgtgattttcctattcatatctttgcttatttttctgttagtttaaaaaaaattgtcttactgatctgccagctttgtgtttacatctggataattgtacattgccagttatatgcatggtaatcctcacagacaggggtatrtaacttatcgtttgacttgatttatgttatcttggttttgtacaccaattatttaactattcctctctagtttatactttcacgaatgtttaagaaatccttcctcagctgggtatgctggtgcacgcctgtagtccaagctacttgcaagactgaggggatgatcacttgagcccagagttcatagccagctttggcaacatagtgaaacatcatctctctatcttttttttttttttttcaaggactgagtttcgctcttgtagcccaggctggagtacaatggcgcgatctgggctcactgctacctctgcctcccaggttcaagtgattctcctgcctcagcctcccaagtagctgggattacagatgcccgccaccacacctggctaattttttatttttagtaaagatggggtttcaccatgttggccaggctagtatcaaaatcctgacctcaggcgatccacttgcctcagcctcccaaagtgccaggtttacaggagtgagttaccacactcgggcgaaacatcatctcttaaaaaaaagaaaaaagaggccaggtgcggtggcttacacctgtaatcctagcactttgggaggccaaggcagatggatcacctgaggtcaggagttcgagaccagcctggccaacatggtgaaacctcatctctattaaaaatacaaaaattagctgggcgtggtagcacgcgcctgtggtcccagctactcaggagtctaaggcaggagaatcacttgaacccaggaggcagaggttgcaatgagcctcgatcgtgccattgcactccagcctgggcaacagagtgaaactccgtctcaaaaaaaaaaaagaaagaaatccttcatccagatgtcagtatagtctcctagatattcttctgatgattttaaagtttttgttttatacttttagtctggaattcattttgtatatgccgtgaagtaattcaataacttaatttgctcccatatggataatcaatataacttatccactgatttgaaatgccacttctggcatctgttaggttcccctatgtgtttgggtctgttcctgggctttctcgtctgtcccattggtcttgtcttgatgaccgtagatttatatgtgttctcatctccttttccttctggtctgagcttggcactgagctgagtgttttatgtagcgttgctaatttcctcttctcagtgtcctagaaggcaggtgctgttgccctcatataacaggtgaggttactgaggctcagactgtgggcttttgtttgtttaagagcagggtctcttaaaaaagcccaccgtccaccctgcactgacattaagagctgactggaagagagccttgagtgtgttatggcatcattgtcatgatgaccttagttctcttctgtctgtgttctcagttagcagaggcggggaatgagaggccctcaccctattactacatataactggcaacgggcctgccatctatatttagccaccacttctggttgctgggaagaggcagtcacacaaagaataacccctgccttctaggagcttccagaaccttcctgaatctctgtagcatgttcaggtccacatatggcagctcagatacagtctcctcttaatgctcatctcctttgtttgatttcacagttaaagggaaagattcagagggaagaaggaaaatccagaggagacataagaagcccctggcagaagaagaggcagaccccacgctgacaggccccaggaagcagagcgctttctccatccagctggccgtcatgccgctccttgccggtacccactgcttgccctgttcccagcagctcctgcttgtcttgtggccagaacggccataagcggatgctcctaatgacaaccctgctgcgtgccacctcatttcatcctcacagccacctcaggaaactcaggggaattggcttcatagtacagggggaaacaaaggcccagagagggtagctaccttgcctgagatcacacagctaggaaatgtgaagcctggacttgaacccagctctgtttgattccaaaatccaaggaagcctatgggaatattaaatgtcatcattgtgtttgttaagaagatgctgcttttaataaatgctttcctacagatttttacaaaaacatctagtaaagggaatgaggaaagggaaccctttttgactgagcccctctgggtgcaggcacttcccgtgtgacacatcacttacttctcagaccaaattctgacccactcagccaacctgtggtgtggtggtggctgtggtggttatcatagttaccatttttttcagtgaggaaaagaactcaaagaggttaagtaactttcctaatcccacacagctcagtggccaaacagggatttaattattttgctttataagatctaccacaatttatgaactggacttyatacatactggtaaatcataactaaatattatatcaatatgttttgatgattgaaagctcagcatatattttggtaaaattatgttgctttgttccaaaaaagagtaatatggggtgaactccccccctttttttttctttttagagaaaattcagactttgttcgtttttttgccatcacgtgtcttgtgcgccctctcctggctactctgcagaagcgcgtgcgttggtcttttctgagctggaaccagcattcatagagaagggggcaaaaaccccgtaagtcagagcctccagttcagttccacaggtgccagtcgtcatcctcctctcgcgctcttgggttggtgtcaattcagtttgagaaagtgctattaacttttcagtttgcactttttttttttttgagatagggtcttgctctctcacccaggctggagtgtaagtgacatgatcatagctcactccagcctgaagcaagcctcccgcctctgccacccgcatagctaagactacaggtgcacaccaccacacctggctattttttttattttctgtagagacaaggtcttgctatgttgcccaggctggtctcaaactcctggtcacaagtaatcctcctgcttcagcctctcagagttctagaattacaggcatgagctgccgcatttggcagtttgcagttttaaatgactttttgaaaatgatacttcacctacagcttgtccttcctgatcaccttcactttctcgtagcatcagaacctcttgagaggcaacagtgacagagagtaaactttcagagggtcttaccccaccccacgctccagcctgaccctccagcatacctattgcacncagtagctttgagcgaacgcctttgctagctgcttccttcgtcctncagtcccaaggaggaacccatgatcctcctgggggagcgtaccatgggacctgccccgctttggattttactgtgagaggaaaaagaarttcaaccatttgggcctgcctggcatgactgtttccagcagaatgaagccaggacatggtcccctctctcttttttttttttcgagatggagtcttgctctgtcgcccaggctggagtgcagtggcgcgatctcggctcactacagcctctgcccccccaggtttaagcaattctcctgcytcaacctctagagtagctgggattacaggcgcatgccaccatgccaggctaatttttgtattttttgtagagatggggtttcacaattttggccaggctggtcttgaactcctgacctcgtgattgtcttacatgtccgtgtgaagagaccaaacaggctttgtgtaagtaacaaggctgtttatttcacctgggtgcaggcaggctgagtctgaaaagagagtcagcaaagggtggtgggattatcattagttcttacaggttttgggataggcagtggagttaagagcaatgttttgggggcagggggtggatctcacaaagtacattctcaagggtggggagaattacaaaaaaaccttcttaagggtgggggagattataaagaaccttcttaagtgtgggggagattacaaagtacattgatagttagggtggggcagaaacaaatcacaatggtggaatgtcatcagttaaggctattttcacttcttttgtggatcttcagttgcttcaggccatctggatgtatacatgcaggtcactggggatatgatggcttagcttgggctcagaggcctgacagtgatccacctgcctcagcctcccaaagtgctgggattacaggcgtgagctaccgcactggacctagcctcccctctctataacctgccccgtcatgtacaatgctgtacagtgcaggggttcacatgtaagaactttggtgaccaaaacactttgatcatggctcagccacttaccagcaagttacctactttctctgagtctcactttcctcctctgtgaaatgggggtgattactcctacctcagagcgttgttttaaggatcacaggagctgacgtgtgtaaactgcttagcacagtgggacccagggggtgcaggtgtggaggcagcagctgtcctgaggccatgtgtgtgggccgctccattatacccatgacatagcctatggtcatcgacagagaacgggtcagctcagcaggccagttgtatgtctggttttgccagaaactaatagcataagattatttactgtaagcccagcataattatttttggtaatcatcttcaatttcaaattaggccatagatcatgtatgtataccttattagtaaatattggttggctagtaacccagtaagattctagaaagattctgtgtctgggaatgagctcttattttaaaaggatagtattgcatagcggaggggccccacttagcccaacagaactggtttggatgctggttctacaacgtattttctaagagaccttggatgattgcgtcagaactctgggcctcatttcccccatctgtaatgtggagatgacagcaaccacacaaggttaaggatgaaatgacattagcgcatgtttgggacnggctgttggaggagcacaaacattcccttacaccattccactcttaaccagggctcttaactcagggggcttgtgtctgctggggacacttggctgtgtgtggaggcattttggttggcacgactgagagtgggatgccactggcatctagtaagatactgttaaacatgccataatgcacaggactgtcccctgagcaaagaatggtctgccccaactgtcagcagtgtggaggctgtgagcccgcagcctggaattctgttctggtgtatgtctccctgactctgatgatttgagcactttttttttatttttatttttgcaatggggattccttctaccttgagtagtcttttttttttttttgagacggagttttgctcttgttgcccaggctggagtacaatggcgcgatctcagctcaccgcaacctccgcctcccgggttcaagcgattctcctgcattagccttcctgagtagttgggaatacaggcatgcgctaccacgtccggctgattttgtatttttggtagagacgaggtttctccattttggtcaggctggtctcaaactcccgacttcaggtgatccgcctgcctcggcctgccaaactgctgggattataggcgtgagccaccgtacccggcctacccttgggtagtctttcatgtgaaaaggctcacaaaattatagaacacaggcgtaatgggtgacagcttttatgaatcagctttgttaaagaggatcctgcgggagcatgagggctacccccaggagctgtgcacgcctctgttcacagcctgtgcagatggctgtgcacacctggcccgggacttgttttagaagtgcctactctttctgaatgtgagcgacttggcttttacatgccctagaaatacatttacaggcatgttgaaaggaatagactgatctttttgagcaccatctcatatatcatctttcttaatcctttaaacccaaggaaggtggtgtctatccccatttygaagatgaaattgagccttggagactctagcttatcacatgacaaagagtcagatctgggattcaaacccaggtcaatcctgcctccaaaacttgaggtgattttttttgtttatttgttttgttttttccttacctagtacatctctgactggtgaaatacatggataccttttatagaaaaagcattctgggctgggtgtggtggctcacgcctgtaatccctacactttgggaggccgaggcgggtggatcacgaggtcaggagatcgagaacagcctggctaacacggtgaaaccccgtctttactaacaatacaaaaaattagccaggcatgttgtcgggcacctgtagtcccagctacttgggaggctgaggcaggagaatggcgtgaacccaggaggcgtagctagcagtgagccaagaccgtgccactgtactccagcctgggcagcagagcaagactctgtctcaaaaaaaaaaaaaaaaaaaagaaaaagcattctgacagctctgacagctacctatatgccttgcaatggctcaattcacccaccctttttgcgaggcgcactagtgcaaaaccaccctggtgggaggtatgcacgcttgtatttggctcagatgtgccagttgtgttctacatcagtatctgtgctttcctcatcaaatcacaacagatgaagcaacccactgagtaccaaatgtacacactggcatgatatgtccttggtgggagaactgcctggagcactccatccagtagccttcctgcaacgatggccaggctctctgctgacccatacaggagcccatagccacatgagggtactgggcatttggaatgcggcttgtgtggggaaggaagtgcattttatatcttatttaattttaattagttacaattcaagtagctacctatggcccatagctaccatagtggatagcacaggtttagaacgttggttttcaagttacctggagagcttttaaacctcccattgtggaggccacaccccagaccaattaaatcagactgtctgggagtggcacccacacataggtgttcctattgtgtcctagatgattcaggaaatacttgtattacttcttaaaagatgtcatcaagattaagtcacacaaattcaattctagagaatttacgggacctcagtttgagaaactagcacaggtcatgctgcctgtgggtgtttcccaattctttcttttcttttttttttttaattaaagttttcacttttgggttgtgattttatcattggctcatctcaggttgcttgatccctctgtgcgtgtcttgggggtgtcgggaggaaaggtctaatgctgggtgtatttcccccaggatggcaaactgtcgtgagtcgtggcagtgagaagtctgccaacattttagattgccttttgactttaaaaacagaagttccgatcatgaccgaggagcaaaagcaggatttaaatcccctgaccataaagatcaagtgtgcttcctgccttccatcacagcctgtacccattcaggaactagaggtaagaatgagccggacccatggagtttagagctcctccccttccacccacctgcccgtcacatgccacctctagtcctcctgatggccccacatgagaaatgtggtcattctcatacgggtccgtgtgaagagactaccaaacaggctttgtgtgagcaacatggctgtttatttcacctgggtgcaggcgggctgagtccgaaaagagagtcagcaaagggagataggggtggggccgttttataggatttgggaaggtaatggaaaattacagtcaaagggggttgttctctggtgggcaggggtggatctcacaaagtacattctcaagagtggggagaattacaaagaaccttcttaagggtgggggagattacaaagtacattgatcagttagggtggggcaggaacaaatcacaatggtggaatgtcatcagttaaggcagtttttatttcttttgtggatcttcagttacttcaggccatctggatgtatacgtgcaagtcacaggggatgtgatggcctggcctgggctcagaggcctgacattcctgccttcttatattaataagacaaataaaacaaaatagtgttgaagtgtyggagcggcaaaaatttttgggggrtggtgtggagagagaacgggcgatgtttctcagggctgcttcaagcgggattaggggcagcgtgggaacctagagtgggagagattaagctgaagggaggtcttgtggtaaggggtgatattgtggggatgttagaagaaacatttgtygtatagaatgattggtgatggcctggatatggttttggatgaattgagaaactaaatggaataagagagggagaaaaacaggtataaaaggtctaagaattgggaggacctaggacatctgattagagagtgcctaaggagattcagcatagtcctgccagcaaagattatttatttacttcaagagtttagagtggcagtttggggatagcaccaggagatatcagctgtgatggcttggagaaacagtgtaaaccggcagtgtaaacaagagcagggcacgtatgagtagttgagaacggtgaataggagtatgactagacaaaagatagtagggatgacaagttttttgggggcacagtctcagttggtctggtgtcaaatgagactggggcctaataaaaaggagcatctacacaggagcttaaatgggctgtaccttgtagaagcgaaagtggtaaaagtattgtccagtcctttttaagttggtggctgagcttggtgagctgtgtttttaaaagacctttagtccgttctayttttcttgaagacggaggaccgtaagggatataaaggtttcactgaaacctactaagagcctgaaaaactgcttggctgatttgactaataaaggctggtctattatcagactgtatagaggtgggaaggctaaactgaggaattatgtctgacagaagggaagaaatgactgcggtggccttctcagaccctgtaggaaaggcctttacttattcagtgaaagtgtctatttgaactaagaggtattttagtttcctgactcgggcatgttgagtaaagctaatttgccagtcctgggtgggggcaaatcctcgagcttgatgtgtagggaagggagggggcctgaataatccctgaggagtagtagaatagcagatggaacactgagaagttatttccttgaggatagatttccaggatggaaaggaaatgagaggttctgagaggcgggctagtggcttgtactatagcatagcctgcctttgctggtgtgtggcgattaggcctggtggaactgccgtcaataaatcaagcgtgatcagggtgaggaacaggaaagaaggaaatatggggaaatggggtgaatatcaggtggatcagagagatacagtcatgggggtcaggtgtggtatcaggaataatgtgggaggccagattgaagtccgggccaggaacgatggtaattgtgagacttaaagagtgagtacagctgaaggagccggggagcagaaagtatatgcstcaggtatgaggaagaaaatagattttgggaaatgtagagagtgagttgagcatagtttgtgacttttagggcctctaacagtattaaagcagcggcagccgctgcacgcagacatgagggctaggctaaaacagtaaggtcaagttgtttggacagaaaggctacacggtgtggtcctggctcttgtttaagaattctgaccgcactaagcatgcctaggaaggaaaggagttgttcttttgtaagggattgaggtttgggagattaatcagacacgatcagcagggagagcacatgtgtttttatgagaattatgccaagataggtaacagatgaggacgaaatttgggcttgactgaagtaatgggggctgtctgtgaagccttgcggcagtacagcccaggtaatttgctgagcctaatgggtgtcagggtcagtctaagtgaaggcaaagagaggctgggatgacgggtgcaaaggaatagtaaagaaagcatgtttgagatccagaacagaataatgggtagtagaggaaggtattgaggataggagagtatatgggtttggcaccacggggtggataggcaaaacaatttggttgataaggcgcagattctgaactaacttgtaagccttgtctggttttaggacaggtaaaatgggggaatggtaaggagagtttataggttttagaagcccgtgctgtagcaggcgagtgatcacaggctttaatccttttaaatcgtgctgtgggataggatattggcattgagcggggtaaggatgattaggttttaatgagatggtaaggggtgcgtgatcagttgccaaggagggagtagaggtctcttatacttgtgggttaaggtgggggaatacaagaggaggacgcaaaggaggctttggattgggaagaagggcagcaatgagatgcagctgtagtccaggaatagtcagggaagcagataatttggttaaaatatctcggtctaataagggaactgggcaggtggrgataactaaaaaagagtgcataaaagagtattgtctaagttggcaccagagttggggagttttaagaggtttagaagcctgtctgtcaatacccacaacagttatggaggcaagggaaacaggcccttgaaaagaaggtaatgtggagtgggtagcctccgtattgcttaagaaggggacgggcttaccttccgctgtgagagttaccggaagctcggcgtccgtgatggtctatggggcttccgaggcgatcgggcagcatcagtcttcagccgctaagccgagaaggagtcagtcagagagcctcgggccagagttccaggggctctgggagtggctgccaggtgagttgaacagtccaatttccagtggggtcccgcacagatgggacacggcttaggaggaatcctgggctgcgggcattccttggcctggtggtcagatttctggcacttgtagcaagctcctgggggaggaggttctggaggaacacctggccactgcggttcaggcgtttggaagttcttgtgtgctggagatgtggctgggatttgtctcacagtggaggcaaggaattgcaactttttcctattattgtacaccttgaaggagaggttaattcaatcctgttgtggggtttgagggccggaatttaatttttggagttttatttaatgtcgggagcagattgggtaataaaatgtatattgagaataagacagccttttgaccttttagggtctagggctgtaaagcgtctcagggttgctgccatgaactgggttgggtttttatatttgatgaaaaagagcctaaacgctatctgatttgggataaagaaaaaggagcattaaccttgactatgccttcagctccagccacctttttaagagtaaattgctgggcaggtgggggagggctagtcacggaatgaaaccataagcaggaccaggtgtgaggaggggaggtgataaaaggattatagggtggaggagcggaggctgaggaagaattgggacctagctcggcctggtgaggaggggagaggtcagatgggtctgtagaaaaggaagattagaaagagtcagtgatgcttggggttgggactgaggggacaggcgggagggaaagaaggaagatttgggaggagttgccctgggcacagcgactaggaagggactgatgtgtaaaagaatgccgggacgtcaggcacctcagaccgtttgcctattttacgacaagaattatttagatcttgcaggatggaaaaatttaaagtgccattttctggctatttggaactactgttgagtttgtattggggtcaagcggcattgcagaagaaaataaggcatttaggttttaggtcaggtgtgagttgaagaggttttaagttcttgagcacacaggctaagggagaaggaggaggaatggagggtggaaggttgcccatagtgaaggaagcaaacccagagaaaagagagcatagagacccggagggaaggggtttgggggttcttgccccctagaaaagcgggacttgccgctaagggtgaaggagaaggggttgaggggtacttgcccctgccccaggaaagtgggacttgccgctgagggtgaaggagaaggggttgaggggtacttgcccctgccccaggaaagcgggacttgccgctgagggtgaaggagaaggggttcacgggtacttgccccttccccagaaaagcgggactagccgctaagggtgaaggaccaaggcaggcgtccctgcgtggtctgacacccttgaaacgtgggtgtataatcagagagcgtccctgcaatgattaaacaccaagggaaggctgccttcccagtccgtgaccggcgccggagttttgggtccacggataaaacgtgtctcttttgtctctaccagaaaatgaaaggaattgaaattaagggagagattgaagtgtggcaccaagattgaaaggagaaagaggttgagggatagygagggaggttggagaagagagtcaaaagaggccgcttaccggatttgaaattggtgagatgtttcttgggctggtcggtctgaggacctgaggtcatagaggtggatctttctcacggagcaaagagcaggaggacgggggattgatctcccaagggaggtcccccgatccgagtcacggcaccacatttcatgcgcgtccgtgtgaagagaccaccaaacaggctttgtgtgagcaacatggctgtttatttcacctgggtgcaggcgggctgagtccgaaaagagagtcagcgaagggagtggggccgttttataggatttgggaaggtaatggaaaattacagtcaaagggggttgttctctggtgggcaggggtggatctcacaaaatacattctcaagagtggggagaattacaaagaaccttcttaagggtgggggagactacaaagtacattgatcagttagggtggggcgggaacaaatcacaatggtggaatgtcatcagttaaggctgtttttatttcttttgtggatcttcagttacttcaggccatctggatgtatacgtgcaagtcacaggggatgtgatggcctggcctgggctcagaggcctgacagttatcacctgtattttaccatttaggatcccacagtgagatacaaaagagatggggttcctgggattaggtgtgaccagtcctgaggtctcctactatgccgcaggtgctcttcacatgcaggtcatgaacctcccttcaggagcccccaggcttccctcttcctgtggcagttgccagcgggatgctmactcattgtgaaccaaccaggttcagcactgctgtttattctgtgagttccttgttccctcttctggttggatccctgtctcctgaattctctccctttatttgctgtctggttttgctggagtgcatcctctagtagcttctcgagaaaaggtcaatgggagatttatttttgagatctcatatgtctgcagatatatttttttctacctttttttatccttacacatgactggtagtttggctgcatatagaattctaggctaaaaatcatttgccttcagagttttgaaggcattgttccatcatcttttattttcattgaagttgaacctttgtatgcgaactgttttttgtttctccaaatgcttataaaatcctttttgtcgtcttttttattttatttatttatttatttgaggcagaattttgctcttgttgcccaggctggagtgcaggggtgcaatctcagctcaccacaacctccacctcctgggttcaagcgattcttctgcctcagcctcccgagtagctgggattacaggcatttgccaccacgcccggctaattttgtatttttagtagagacagggtttctccatgttggtcaatctggtctcaaactcctgacctcaggtgatccacctgccttggcctcccaaagtgttgggattacaggtgtcagccactgcgtccaaccttgtctccttttttaaaaaaatttttttgagacagggtctcactccactgccctgtctggagtgcagtggtgtgatcataacttactgcagcctcaacctcctgggctcaggtgatcctcctgccttagcctccctagtagctgagactgcaggcacacgccaccacacccagctagtttttgtattttttgtagagacagggttttgccatgttgcgcaggctggtcctgaactcctgggatcaagtgatcctcctgccgtggcctcccaaagtgctaggattataggtgtaagccacagtgccagccctttttgtcttctgaaactgcttgtgtgtcttagtgtgagtatgtccatatacatatgtcatactttaaaatatagattcacggaaagttgcaaagacagtacagagaggtcccatgtatcctttgtccaatttcctcagtaattaggtgtttcataactatagcacaatatcaaaatcagcacattgacatgagtctaatgtgtatataggtctgtgccattttattgtacatgtatgtaactgtcacagcacttgagatgtagaaatattctrtcatcacaaagatctccttcgtgctacccttttatagtcacaacaacccctaacacccaccatccctaaccactaatttgctatctctayacttttgtcaatttgaaaatgttattgttaaggattgaattgtgttcctccaaaaaatggtatgttgaactcctaacgcccagtatctcagaatgtgatcttatttggaaagagggtctttgcagaggtagtcaagttgaaatgaggtcattagggtatccttatgaaagggggaaaattggacccagagacagacacacgtagagggaagactatgcaaagtgacacacagagaacgccacatggaaagtggatgctgccacatgccaggggacatctggggccaccagaagctggaagaggcaaggaaggaccttcctgagcaccttctgaggaaatgtggccctgccaacagcttaatttctgacttctagcctcagaacagggagacaataaatttctgtcattttaagccmcccccagtttatggcgcttcgtaggaaactggtgtggttatataaatgaaaacatccagcatgtgaccttttgagactggccttctcccccactccaggataatggccttgcatgtagtttggtcatgtttctttatttactctgccttttaattgacgtatttagaccattatatttagagtaaatgttgatatattagagcttaagtctaccattttaatttttgttttctgtctgttccttctgtttttttgtttctcttggtttttattcctgctttcttgtgggttacttgacccatttttagaattccattttgatttatctgtagtatttttgaatttatatctcttggtatagatttttagtggcactctggatattatatttaacgcataacataacttttcgcaatctcttggtatcaatattttaccagtttgagtgaaatatagaaactttacctccctccatacccctttagtttccctaaatatttcctctacatagattgataaccacatgagatgatgttatactttttgcttcaactgtcaaacataacacataacctagaaaactcaagggttgaaggaaagtgtatttgtttacccgtggttctacttattccattatcctttcttcctttctaatgttccaagacttcttttgtcatttcctttctgtttcaagaacttcctttcgcctttcttctaggataaatctgctgaaaacaaattcttttagttgttctttgtctcagggtgtttttatttttccttcattctggaaggatagtcttactggatatagaattggtatagaatggggttgatttctttcttttttttttttttttttttgagagagtctggctctgtcacccaggctggagtgtagtggcatgatgttggctcactgcaacgtctgcctcctgggttcaagtgattctcctgcctcagcctcctgagtagctgggattatgagcatgcaccaccatgcctggctaatttttgtatttttagtagagacagaatttcaccatgttagccaggctagtgtcaaactcctgacctcaggtgatgcacgcacctcggcctcccaaagtgctggggttacaggtgtgagccactgtgcctggctggatttttttttttaacacttgaaaaatgttataccactttcttcttaccactacagtttctgatgggaaatctgctgtcattcaaattacttttttttccctataagtaaggtggcatttatctcttgcagctttcaagattttctttctttgtcattaatttacagaagtttgactatgacatgtcttggtgtggatttctttgtgtttatcttatttggggttctctcagctctttgaatctataggcttatgtattttgccaaatttgagaaaattttagccattatttattggaatacttttcagcaccaccttttttctcctctccttctgaaactccaatgacatgaatattagttcttttgttttagtcccacagggccctgaagttctgattttgatttttgtgtcttttttcccctgtgttgttcagattgggtaatttctttttttctttcttttattttctttttttttttttatttttttattttttttttatttttttttttaatttatttttttattgataattcttgggtgtttctcacagagggggatttggcagggtcatgggacaatagtggagggaaggtcagcagataaacaagtgaacaaaggtctctggttttcctaggcagaggaccctgcggccttccgcagtgtttgtgtccctgattacttgagattagggattggtgatgactcttaacgagcatgctgccttcaagcatctgtttaacaaagcacatcttgcaccgcccttaatccatttaaccctgagtggacacagcacatgtttcagagagcacagggttgggggtaaggtcacagatcaacaggatcccaaggcagaggaatttttcttagtgcagaacaaaatgaaaagtctcccatgtctacttctttctacacagacacggcaaccatccgatttctcaatcttttccccacctttcccgcctttctattccacaaagccgccattgtcatcctggcccgttctcaatgagctgttgggcacacctcccagacggggtggtggccgggcagaggggctcctcacttcccagtaggggcggccggnnnnnnnnnnnnnnnnnnnnnnnnnnnnnnnnnnnnnnnnnnnnnnnnnnnnnnnnnnnnnnnnnnnnnnnnnnnnnnnnnnnnnnnnnnnnnnnnnnnnnnnnnnnnnnnnnnnnnnnnnnnnnnnnnnnnnnnnnnnnnnnnnnnnnnnnnnnnnnnnnnnnnnnnnnnnnnnnnnnnnnnnnnnnnnnnnnnnnnnnnnnnnnnnnnnnnnnnnnnnnnnnnnnnnnnnnnnnnnnnnnnnnnnnnnnnnnnnnnnnnnnnnnnnnnnnnnnnnnnnnnnnnnnnnnnnnnnnnnnnnnnnnnnnnnnnnnnnnnnnnnnnnnnnnnnnnnnnnnnnnnnnnnnnnnnnnnnnnnnnnnnnnnnnnnnnnnnnnnnnnnnnnnnnnnnnnnnnnnnnnnnnnnnnnnnnnnnnnnnnnnnnnnnnnnnnnnnnnnnnnnnnnnnnnnnnnnnnnnnnnnnnnnnnnnnnnnnnnnnnnnnnnnnnnnnnnnnnnnnnnnnnnnnnnnnnnnnnnnnnnnnnnnnnnnnnnnnnnnnnnnnnnnnnnnnnnnnnnnnnnnnnnnnnnnnnnnnnnnnnnnnnnnnnnnnnnnnnnnnnnnnnnnnnnnnnnnnnnnnnnnnnnnnnnnnnnnnnnnnnnnnnnnnnnnnnnnnnnnnnnnnnnnnnnnnnnnnnnnnnnnnnnnnnnnnnnnnnnnnnnnnnnnnnnnnnnnnnnnnnnnnnnnnnnnnnnnnnnnnnnnnnnnnnnnnnnnnnnnnnnnnnnnnnnnnnnnnnnnnnnnnnnnnnnnnnnnnnnnnnnnnnnnnnnnnnnnnnnnnnnnnnnnnnnnnnnnnnnnnnnnnnnnnnnnnnnnnnnnnnnnnnnnnnnnnnnnnnnnnnnnnnnnnnnnnnnnnnnnnnnnnnnnnnnnnnnnnnnnnnnnnnnnnnnnnnnnnnnnnnnnnnnnnnnnnnnnnnnnnnnnnnnnnnnnnnnnnnnnnnnnnnnnnnnnnnnnnnnnnnnnnnnnnnnnnnnnnnnnnnnnnnnnnnnnnnnnnnnnnnnnnnnnnnnnnnnnnnnnnnnnnnnnnnnnnnnnnnnnnnnnnnnnnnnnnnnnnnnnnnnnnnnnnnnnnnnnnnnnnnnnnnnnnnnnnnnnnnnnnnnnnnnnnnnnnnnnnnnnnnnnnnnnnnnnnnnnnnnnnnnnnnnnnnnnnnnnnnnnnnnnnnnnnnnnnnnnnnnnnnnnnnnnnnnnnnnnnnnnnnnnnnnnnnnnnnnnnnnnnnnnnnnnnnnnnnnnnnnnnnnnnnnnnnnnnnnnnnnnnnnnnnnnnnnnnnnnnnnnnnnnnnnnnnnnnnnnnnnnnnnnnnnnnnnnnnnnnnnnnnnnnnnnnnnnnnnnnnnnnnnnnnnnnnnnnnntttttttttgttggtcgttaacgcccagaaacaagcggggaacggaaggaaaaggagcccggcaaacaaccacgaccgaacagcggcggaaagcgccgcaggccaagggacggaacaacgactgccgaccgcaccgcacaaacgagagcacgacaagaaccagagaacaagccaccaaaaacgggagcacaaaggcgagggagaggacagagccaccgcaacacacacgacagaaaaagagcggcggcgcaacgacgcggacaggaacacgagaaggaaccgcggacacgaagcaacgccggggcacaggccacacccgcccgcccgccacacaaaaacacaacaacgccaaccgcaggcgcgcccccagggagagggagagggagagggagagggagaccgtgttgctgcttcttaagcgagtgattatccctctttctttttattttcttgagacagagtcttgctctctcgccctggctggagtgcagtggcgcgatcttggctcactgcaagctccgcctcctgggttcatgccattctcctccctcagcctcctgagtagctgggactacaggcacccaccaccacgcccggctaattttttgtatttttagtagagactgggtttcaccgtgttagccaggctggtctcgatctcctgacctcgtgatctacccacctcagcctcccaaagtgctgggattacaggcgtgagccaccgcgcccggcccagattgggtatttctatttctattgttttgtcttcaggtttacagattctttcctctgtacattccattctgcattgagtccatctattgagtttttttattgcagttattgtatttttcagttctaagatttccatttttgttttgttttgctttttgagttggagtcttactctgtcgcccagtgcaatggtgccatcttggcccactgcaacctccgcatcctgggttcaagcagttctctgcctcagcttcccaaatagctgggattacaggcacctgtcaacatgcctggctaatttttgtatttttagtagatatggggtttcactatcttggtcaggctggtcttgaactcctgatctcgtgagccacccccttggcctcccaaagtgctggatttacaggtgtgagccaccgcacccggcctatttactttctttttaagagatggggtcttgtcttgctctgtcacccaggctggagtacaatggcactatcatggctcactgcagccttgaactcctgagctcaagtgaccctgccacctcagcctcccgagcagctgggactaaaggcatgcaccaccacaccttgtttattctttatatctcctgtttctttgctgagcaactaattttttcatttgtttcaagcatgttcattactgcttcagattccttttcagataattccaagatctgtatcatctcagtgttggtgtctgttcattggtttttcccattcaagttgatttttctggtatgacaggtgattttttaaaaattctatcttggatatattgagtattacattatgagactgtatcttatttgaatcttacgtttaagctgggtgctggagaatcacttgagcccaggagtttaagaccagcctgggcaacacagtgtgatcccttcttaattttttwttttaattagctagatgtggtggcatacacctgtagcccagctattcaagaggccggggtgggaggatggcttgaacccaggaggctgaggctgcagtgagctatgattgcaccactgcactmcagcctggatgacagagaccctgtctctcaaaaaaaaaaaaaagaagaagaagaagaaaagaaagaaaaaaattgtatgtgtagcaggccttctccaacaccaaactgcatgtgtagcaggcctgtggagggggagatgagagagttaccatctcaatactgccaggtgagactccaggttccccacttggccactgtaccctgtgggtagggatatcttgttactgctcttgtggacttcactgatacatgatgggaggcttcatttccattgagggttggggaaagtcctggctccccaccaggtcttttctgacactaccccagtgaggtaaggagcaccaagttaaagtcagtgagggtagaagtccaggcttcccatgtagcctttgtttctggggtggggcatgattttttccatggtgtgtgtctggggtagggaggttatttgcctaaaagtttgctgttctgctgagttgtccctttcttcgtctttgatatggagaaagcagacttttcttggggtcctttctgcctactctcactggtatttctggatactgccttctccagcacycagtccggaatatatgaggcaaatagaagacccaggatcccatgttccctaaacaccttttctgtacttttcaaagtctttgtattttttttttatatatacaacctgcagagttttaaagctgtacttagtagaactagaagtgtgtctattccatcttgatccagaacaggaactctgtaagtgtatttttacccgtgaagctggggattcagtgggccatttcaacctagaagcccacatccttcagcaccgggaaattgtcttaaattatttcactgattatttcttcatttttttccccctttctttttgggactctgttagctagatgctgactctcctgggctttccttttttttttttctgagatggagtctcgctctgtcacccaggctggagtgcagtggcacgatctcagctcactgcaacctctgcctcccagattcaagcaattctcctgcctcagcttcctgaacagctggaattacaggtgcctggcaccacacccagctatcttctacttgtttttattgttctttctctcctaattgatcctttttctaggaaatgttcagaaaagagtgaacagagtgggcctgagactaccgtccttaaaaagtcctgtttgcagagttgacccaggctggtatatgggaacttgcattttgagagggttccccgcactccccgttaagaatggctcactgtgcctaaatggcttttgcaaacagtatcgtttgtgctgaatgcctgctttccctttgggaggctgagattttcatacatgctargcagggggtgctatgtgaccaggcctcagcaaaagccctaggcagtgagtccctcatgggcttccccagtggacagcatttcacacgttgctgcactgcatcagggaggagttgagcaccccctgtgtgtatcccctgggagaggacttcagcagcttgtgcctgccccctttgttgtttgctttgtctcttttgctgtaataaatcacagacacaagtgcgctgcacccatgctgagttctgtgagttctcctagcgaatcactgaacttgagggtgtcgggggcctgggacacagcacttccagcttgcttcatgggcactgtcgtcacgtgtgtagtccgcttcctttaggttgatcttcctgtttgtttcactccaccttccaggtcagacgttttcctccactgtctgttaatcccctggcccactgctcatggctgagagagcacagacctaaaaggcgagctttgggtgcacggtgggcttctcagctctgagcttcaccatcgggtgatctgagtggggcgttggtgggaacccctgggttctacagggctttcctagttccctgcctggggggtcagggtctagcctgctgcattctgaatgcccacagacagaaaggagctgggaatttgcactaagcagtgagcatttggtcacctaatctccctatttgggaacggcacagatgccctcaactatcccctattccagagaccctctgttattttttttaaaaaacaaatttttctacagtaaaattgatgtttatcttttggtttataggtctataaatttaaaattatgtatagatcaggccaggtgcagtggctaacacctgtaatcccagcattttgggaggctgaggcaggtggatcatttcaggtcaggagtttcagaccagcctggccaacatgggggaaaccctgtctctactaaaaacacaaaaatcagctgagcgtggtggcacgtgcctgtgatcccagctcctcaggaggctgaagcaggagaattgcttgagcctgggaggcagaggttgccgtgagccaagatcgcgccattgcactccagcctgggctatgagagagaaactctgtctcagaaaaataaaataaaatcacgtatagatcaatattatcaccactacagttaggatacagttctgttaccccaaacccctcctttgtactcgcccttcataatcacttttgcttcacacacataacctctgacagccactgatgtgttctttatgactatagttttaactctggaagaatgtcatgtaaatggggctctgtgttttgcagcatcatgcagctgtaacctttgattcagcagataacaatgtgcatggcctctccactcaaggtaatgcctttcagattcattcaagtggccgcatctatcggtagttctttccttttcattgctgagcagtattccatcacaagggtgtaccacagtttgttcgtgcactcatcaaaggacatttaggttgcttctagtttttggtaattatgaatagagctgcttaaaaacagtgtacacatgtttttataggaacrtaagttttcagttctttagggtaaatgccaacaaatgaaattgctaggctatatgttaagtatatgcctgactatgaaaaactgcccaccattttccagtgcggctgatcactctgcattctcatcagcagtgaacaagggttctagttgctccctaccctctccagaatgtggtattgtcagtattttaagtttagccagtctaagaagtttgtattgttatcayatcatggttttaatttgtagttccctgacggataatgatgttgagcatcttttgatgtgtttatttgccattttacatcccatttggtgaaatttctgctcaaatttttgctcatttttcagttgggttgtttactgtcttactgctgagttttgggagttttaaaaaatatatattctaggctgggcacggtggctcacgcctgtaatcccaacactttgggaggctaaggcgggcggatcacttgaggtcaggagttcaagaccagcctggccaacatggtgaaaccccatctcttctaaaaacacaaaaattagccaggcctggtggcgcgtgcctgtaatcccagctactcaggaggctgaggcaggagaattgcttgaactggggaggtggtggttgcagtgagctgagattgagccactgtactctagcctgggcaatggagcgagagcctgtctcagggaaaaaaaaaaaaaaattccgggatgggcacrgtggctcacgcctgttatcctggcaatttgggaggctgaggcaggaggatcacttgagctcaggagttcaagaccagcctgggcaacatggtaaaactctgtctctacaaaaaaaaaaaaaaaaaaaaaaaaaaaaggaaagaaaagaaaaattagtggggcatggtagcacacacctgtagtcccagctactagggaagctgaggtgggaggatcagctgagcccagggaggttggggctgcagtgagccatgattgcactactgcactccagcccggggcaacagagcaagaccctgtctcaccataaatatatatatataataaatgtgtgtttacatacacattctggatttaagtctgttgttggatatattatttgctaatattttctcccagtctgtagtttgtcttgtcattctcttttatttttaacccaatctgtgacaagcacatcttttcattctctttacagtgtcttttgcagagcaaaaattttaattttgatgaagtccaaattatacattttttttcatgtatgcattgtgtttctgtgtcacatctaagaactctttgcctaacccctggtcagaaggattttttttttctgttttcttctcaatgctttaatagttttatagttaacatttatatcttcgatcaatttttttcttttttgagacagaatctcatttgttgtccaggttggtgtgcagtggtgcagttgtagctcgttgaaacctcaaacctcctggcctcaagcagtcctcctgcgtcagcctcccaaagtgctgggattaaaggtgtgagccaccacacccagcctttgatcaattttgaatgaatttttgtatatggtgtgaggtttacgttgaagtttctttcttttgcacttttgataaacatagattagccatacttgtgtggatctgtttccggtttctcttttctgatccgtgggtctgtgtctgtcctttcagcaacacgacactgtcttgcttatagtagctttgtagtaagtcgtaaaaatgggtgaagtggttcctccaactttagttttcaacattgttttagctcttccagtttcctggctcttctatacaaattttagaatcagtttatcaatatctacaaaaagttgtgctgggattttgattggaattgcattacatttgtaaacctataaactgattggtttgaggagagttgacatctttgctatattgtyttccaatctatgtatatagtacatctctccatttatttacatcttttttttttttcatcagtgctttgaagttttcaggaccccctatttacattttgcmtggagagcaaactagtagacttctgccgagccactggggggacacctagggatctgattgcttcttaaggaacttgcacccagtcctccctgctccagccgttcctttttactgccagttccagagatactaggtttgccattcccaagtcttttgagagttttacagagaaaatctggttggttctcagcttctccattgtgtggttggtatttggctttctcaactgtgccaagccagttacaaataaatagaaatacaataggttttaccttgattatattctttcttttcttaaacttatatccttattttatatctctgatcattctaatatcttatgcctyggtgcatctgatttcactagtagtgcctttgtctttacgtgttctgtgatttttaccatgatctcgtgttcaatggaactttcttgatgggaattctttgaggcctaggttgaaagtgactatctccagaggtattgtgtctctgcccactgctctgggagcaccgccaatccgggattattttagaataaattctcagcttccgtgtaaaataaatagtgcctttagattacgaattcagaccacagacttgtgtaaggcttaatttgtgatgataaaatctcagcaccaaggtcaaaccatgcaaatgtccctgctttctgcctcagcatagcttggctcttcctttccaccctgttctccgtgctctctgaggcccagacctctctgaggctgtctcctgcccagagtgtcagttttcagcttggcacctgtggctctgctaaaggggtctgtgtcgacccccagatatatatttggaaaacagagatttcctttctaaaaatcacttctctgtaccttttctgtgcccagcctcgggataggaactagaagtacaggtatgaaaaaggacacatggcctatcttcatggcactcacattttgggaggaaaataagtaacgaatgctttttgagtccttgtttcatgccagtcgccatcctggtgcgttcacatgcatgatgtctgcagtcctagtaatgaccttgcacagtagtgtctcttatggatattttgtggatgagaaaacttgggctacagggacaggcaatgagcctggcactgggatttgagctcctcatgctggggctgagtgactgtccttgtggctgggtgacctgctgtggccctgctctctcgtagaggctgtgcatgcctgtgtactgcaagtaccagttccataagactccagttcacaagaccaagggggagccccatggaacccacgtttatttccaggacatcaacgtcatcttccttggggcactgcaccccagtgacctaagggaatacctggagggcccccccatggtggtggaagttcacgaccgggaccgcaagtcagaggagtgttctcagaagcccgtgctgtttggggaggaccctctggattcatacctcaacttccaggcmctcatctctcccagagagacagagaacaacccctttgagtcccagaacaagatgtggtacccttatggcatcgcccaggtcagttttgctgacctcctccttggccacaagtacttgaatctggccgtccccatccacagctgtgaggttcagcccacacactgcggccaggacagcaggagaaggaaggttgtggggcttggggtccccagagatggccaccagcacggcccaatgcccaggggcaactacytagaggctgactcccagctcaagttgcgagtggacatcgcggtgccactgagggccggggccagagctgctgatcctgaccttgggggctcccagtttggccgcatcatcttcgtctttgactttaagaaggtctccctgctccacagcctgctgcaggacatcaccatgatcaacgctaaggccctcggcctggactcctaccctgtcaggaccctgcagcagatcctgtcagccttcaaggtgcgtgtgcgggtccaggagcagcagcacctggatgtgctcactggcttccacctgctggaygggaagacacaccttttcatcctggaaggcctggcygaccaaggcttgaggcagctgtgggagaaccaccaaagctggtaggtggtttgttttacattttacataaaaatgatggcatctggatgccgagggagtggagaggtctttcagagccaagcctaggtttagcatccttgtctgtgagtctcctttcggggttcattgtgaggtacttaccagggtttagtcattggacttgaagactcgattggctttggttccagggaggaattcgggagtatctaagatgactgaggggtccaggagagtggggcctgtcttcagggttctgagccaagggctactgtggctaaacaggagcagaatattctgtattagatttcaccttgccccagggaagatcattttgaagatggaggggctgcttaggctgcaggaaattgcccttccctgaaggccttcagggtacctgggggccactcagtgggaacactagaagtgaataattaaagtgtccaattctgggctgcagcgggtagccctttgcagttcctccattttttagttttggtgacatgacacctctcccttcctttcacaatttgcaagtatactagtttgggtagatcggatctccgtcctttagtctggagggcccccatctgtcctcagagttcagatgccccaggacccacttggatgcagtggggagtcccggagttgaggctgtctgcccagaaggggattgcacctctgggagacctgccttcctgtgctgatgggcccagaggcaccgggagaagctggccttgtatctattataagcccaggmgaagtgaaaacatatgtccacacaagagcttgtacacacatgttcacagcagcattatgtataatagtcaaaaagtgaaaacaggccaggtgcagtagctcacgcctgtaatcccagcactttgggaggctaaggtgatcctggaatcacttgagcccaggagttcaagaccagcctgggcaacatagtgataccttgttactacaaaaaatacaaaaattagccaagcatggtggctcatgcctgtaatcacagctacttgggtggccaaggtgggagaatcacttgagcccaggaggcggaggttgcagtgagccagtatcacgccactgaattccagcctggacaacagagccagaccctgtctcaaattaaaaaaaaaaamaaaaaaaaacggggggggaaataacccaaatgtttatcaactgataaacaaaagataataagtccatagaataattgagccataaaaggaaatgaaagccaggcacggtggctcacacctgttatcccagcactttgggaggctgaggcgggaggattgcctgaggtcaggagttcgggaccagyctggccaacatggtgaaaccctgtctctactaaaaatagaaaaacttacccaggcatggtggcacgtgcctgtaatcccagctactcgggagactgaggcaggagaattccttgaaccctggagagggaggttgcggtgagccgagatcgtgccactgcactccagcctgggaaacaagagcgaaactccgtctcaagaaaaaaaaaaaagaaatgaaatactgatacacatatctcaaccttgaaacattatgctaagtcaaagaagccagacacaaaatggcacatattgtatgattctgtgtttgtgaaatgtcccgaaccggcaaatccatagagataggtaggccggtggttgccagggataaccactcgggagggcaagagagaagcggggagccactgccagtgggcacagagttgcctttagggatgtggaggatgttctagaactagatagtgtttatggctgcacaacattgtgaatgtagtctaaaccactcattcatgcgctttaaaaggttgagttttgccgggcacagtggctcacgcctggaatcccagcactttgggaggatgaggcaggcagatcacgaggtcaggagatcaagaccagcctgaccaacaagtgaaaccccatctctactaaaaatacaaaaatgagccaggctgtggtggcgtgtgcctgtaatcccagctactcaggaggctgaggcaggagaatcgcttgaacccaggaggtggaggttgcagtgagtgagatcgcgccactgcactccagcctgggtgacagagctagactccgtctcaaaaaaaaaaaaaaaaaaaaaaaggttgagttttgttcaagaccagctttgccaacacggtgaaaccccatctctactaaatacacaaaaattagccaggcgtggtggcaggcacctgtaatcccagctacttgggaacttgggaggctgaggcaggagaattgcttgaacccgtgggcggaggttgcagtgagccgagatcatgccactgcactccagcctgggtggcagagcaagattccatctcaaaaaaaaaaaaaagattgagttttgtggtgtgtagcaaagaatgtggcctggcccaggagcagtctgggctctgcccttggctcctgggaggcgatctgagtcacacctaataggagtgtctttgttcagggaggggactggtcacacctgacagtcacaggatggaggctgaccttccagaaagaccaaccaggtgcttcgggatgggggctttgggtcatgcagaatcaggagactgagttcagccatgtaggcggtcagccagcctgccatacctgtgcagtggagccccctggaaactgtggccgccagggctggggcgagctgcctggctgcagtgtgcttgcatgccgccactcaccagtgctaggagggtagcacatctggctccacgagaagacagtagaagctttgtgtctggagccatcgtggactctgctccatgtgtttgttcccttggcggattttagtctgtattctttccctgtaatacaactgtaactgtgagtgtagaactcattttcagtaagttctgtgagcccttctagygcattatcaaaccagagggcggtctcagaaaccttctgaacttgcagtyggcgtcagaagtaagggcggtcttggggactgtgccctcaaactttgtggtttggctaatgctgggcagatagtatatgaattatatctcaaaagctttttccagtggcagaaatatcatgaagcatgctcattgaacccagttgaattaggctagaaataaaacacaaatcattaaccagaaaaaagttcatatgcagggaaattaataaccatacttccaaataacttgtgggtcaaaaagaaatcataatggaaattagacatttttgaactgaacaataatgaaaataatatattatctaaatttgcagggtgggccgggcacagtggctcatgtctgtaatcccaacactttgggaggccaaggtgggcrgatcrcctgaggtcaggagtttgagaccagcctggccaacatggtgaaaccccatctctactaaaaatacaaaaattagctgggcgtggtggcacatgcttgtattcccagctacttgggaggctgaggcaggagaatcgcctgaacccaggaggcagagattgcagtgagccaagatcatgccactgcactccaatctggacaacagagtgagactctgtctcaaaataaataaataaataaaaatttgcagagtgatattgaagcattagtcagaagaaaatgtataaccttaaaatgcttatttggaaatgaaaaatgcctgaaaattattgagacataactatagttgttgcagacattgatatgtgtttcaaattatgccaatatatttaaaaaattataagaaatttaaaaaataccaaaagtatgttcagataagattatttaatgtggtatcgaatataaaaattagtataaaaatctatcaaattttgaataccatctacmtacaaaaactaatttttaaaaattggaacacatttaaagtaaaatgtatgaaattcataggactaaatttgacaaaaagatgtgaaagacatccatcatgaatattatagaacttcaggaaacattaaggaagacataaataagtggagagagataccatgttcatgaatttgaagactcaatattctaaaggctcagttatcttcaaatttgaactatagattcagtgcacttccagttttaaaaatcccaacagcttttaaagtatggacattgattttaaaattttaaacttccgcatgttaataaaggttcatacttttttttttcatcaaagtccatactttaaaagctgttggaattttaaaccctttacagcaacatgtaaaggtcttttttaaagaagatacccttgaataagaacaagatagaagaacttgctgtactagatatcaagactcatgataaaactatagtcattaagatagtgtggtattggttcagagatagacaagcagacctatggaatataatagagaatccagaaacagacctacacataagtgttcatttgacatatgacatatgtgatattgcaaaattggtggggaataaatacactaaaaaacactgaattttctacttcaaaagaatgaatcttacacaatgggatgctatttcatactcattaggatgggtagaaaccaaaagtccaataatgacaagtgttggcaaggatgtggagaaatcagaagtgtcctctgctgggaggaatgtaggtgcagccactttggaaaacattctggcagttcctcaagtgattaaacacagagttcccatatgacccaggaatatcactcctagatctgtgcccaagaaaatgaaaacatgtatccacactaatgtgtggattatcgccaattagtgtactaaactttgtacactcatgtttataacagcattattcataatagccaaaagatggaaacagcccaaatgtccatcaagtagtaaaagggtaaacaaataatggatatgcatacactggaatcctatttggacataaaaaggaatgaaacaccatgacatgctgcactatggatgaaccttgaaaacatgctgaggagaggcggccggccacaagatgtcacatatgacgtgattcaatttatgcggaatgtccagaagaggccaatctatcagaaagtagattagtacaggcgtctccaacccctaggccatggacctgtaccggtctctggcctgttaggaactgggctgcacagcaggaggtcagcaagctctgcctgagcttcgccacctgtcagatcagcagyggcattagattctcataggagcgggaacacttttgtgaactgtgcatgcgagggacctaggttgcgcattccttatgagaatctaatgcctggtgatctgaggtgcaacagtttcatcctgaaatcatcctcccaaccccgtccgtggaaaaattgtcttccacgaaaccagtccgtggtaccaaataggttggggaccgctggattggtagatacttagggyggtggatcaggggtgggggtattcagggggttgggagtatacggagcgatagctgaggggtgtggggtttctttttgaggtgatgagatgttctaaaattgatgatggtggtggtggttgcactaaatagatgaaaaactattgaattatactttacaaatgggtaagttgtctgtcatgtaaattatatctcaattaaaaaataactctaggctgggcacagtggctcacgcctgtaatctcagcactttgggaggctgaggtgggcaattacccaaggtcaggagtttgagaccagcctggccaacatggtgaaaacccgtctctactaaaaatacaaaagttagccaggcgtggtggcgcacacctgtaatcccagctactcgggaggctgaggcaggagaattgcttgagcccaggagacagaggttgtagtgagccgagatcgcgccactgcactccagcctggctgacagagccagactctgtctcagaaaaataaataaataactctagcagacaaaaaaagttcagtagggaaaggataaacttttcaataaatggtgttgggataattgttttcataggaaagaaggacagacatccttaacccctggcaaccactgctatatctgaaaatagacgtgatttttgaatgttgatcttatatcctaaagccttgctgaaactcactggttctaggagtttttgttttgttttttgggagattgcttgggattttctacactgaccatcatgtcatttgcaaatagggataattacatttctttctttcagtctgtataccttcatctccttgttgtactggcctggatgtgcagtcctgttttatataagaatggtgaaggtggctcactcctgtaatcccagcactttgggaggctgaggcgggcggatcaccaggtcaggagatggagaccatcctggctaacacagtgaaaccctgtctctactaaaaatacaaaaattagccgggcgtggtggtgggcgcctgtagtcccagctactcaggaggctgaggcaggagaatggcatgaacccgggaggtggagcttgcagtgagccgagatcgcgccactgtactccagcctgggagacagagcgagactccatctcttaaaaaaaaaaaaaaaaaagaatggtgaaggcacacacacttgccttgtttctggtctctgcggcagaaggcatcagtgtttccccactatctatgatgttaggtgtagggtttttgtagatgtcctttatgggtctgaggaagttccattctgttcctaatttgctggctcacacaattcatgaaaatcaactctagtctaggtagaccaagcccgtttttaaacttttaactttgtcgtttttttkagctttttctttctttttctttctttttattgagacagggtttattgctgttacccaggctggagtgcagtggtgcgatcacaattcactgcagccttgacccccccacctcaagcaatcctcccacctcagcctctcaagtagctgggaccgacaagcatgtgccaccatgcccagctaattttttttttcttttgtttgaaacagagtctcacgctgttgcccaggctggagtgcaatggtgcgatctcggctcactgcaacctctgcctcctgggttcaagcaactctcctgcctcaacctccatagtagctgagattacagrcacctaccaccatgctcagctaattttttgtatttgtagtagagacagggttttgccatgttgggaaggctggtctcgaactcctgacctcaggtgatccacctgcctctcagcctcccaaagtgctgggattacaggtgtgagccagtgcacctggcctaaacttttaactttgaaattgcaaaaatagtggagaggttgcatgtactcattactcaacctcccccaatggtgacatcttatataactactgttgattgacacagtacaactaagtagactacaatgatctgatcttactcagatttcaccagaaaaatctttttttttttggatatggagtctcgctctgtcgcccaagctggagtgctgtggtgcgatctcagctcacccaccgcaagctccgcctcctgagttcacgccattctcctgcctcagcctcccaagtagctggaactacaggcacccgccactgcgcccagctaattttttgtatttttagtagagacggggtttcaccttggtctcgatctcctgacctcgtgatctgcccgcctyggcctcccatagtactgggattacaggcgtaaaccacyacgcgtggttttttttttttttttttttgagacagggtctatctctgtcacccaggctgagtggtacaaaggctcactgcagcggtacaagggctcactgcaacctctacctccaggggtcaagccatcctcccatctcagcctcccaggcagctaggactacaggtgtgcaccaccatgcccagattatttttgtattttttgtagagatggggtttcaccaggttgccaaggctggtctcctactcctggactcaagcaacctgcccacctcgacctcccaaagtgaaaaatctgtttttggaaagcaaaattaaaaagcttatagatgaaaatatagaagaacatattcatgaccccagaatggagaaagagttcttgaaccttgaaccagacaaggacaaagaagaaaagaatcrtacatttggcaacgttaaaagtaacttctgctcatcaaaagacactgtcaaagtcaaaatacagagatgaatctctaaatttaaaaattttatttgggaagcaagaattacaatttgaggtacacacacagactgggcagtcttcagtatgtctgaaaaacagaaggttggaggttttataacaaggaggggcattataaaaatgttaggtattgttttgagaatttggggcactggcaacctctgactggtgagtgccagtgagtaaaagtagtcttggagtcgcagcaggtggtgtcagtagctataagataagactggcttcaggttggagcaggcagcctcagcagccaggctgcagagaatgacattcctggagcagtgctacgtgccctgggtgctttctccccgcctgtcgactctgttttagttgggtgtgatgagaatgacccaatgcatgtgctcaactttcacaacaccataaaagtcatgaaaagacaagctacaaacaaaattatttgcagtgtctggaactgaccaataattagtatcctaaatatattttttaaagtcctgtgaatcaataagaaaaactcccagtggaaagaaagtatgggcaaaatacccaaaccaatacttcacaaaagaggacctacccctgaccaagcacacagattcctgaaggggagatgaaggcattgtagacttcaccaggttcaaaaaggcagaggaatggcataggccagtgcagggcaatgacagcaggctgtgcatagaaaccctgccaggctggtattgccacagtgcagaccgcgagtgccagggcagggcttggaggggtggtgaggggctgagtgggggcaggaaggggggtgagacaggcacaggccatgagccagatcaggtcagtttcagcctttcactgccagctctctgtcaaggtcccaggtgttgaaagatgttgtgtctaccaggaggcattcatcatcatcatattccttttgttttttttctatccttttagttaattttttatacttctaaattgctattatttttatcttagtatagtcttcattaccaaccttgtcttttgttgttttgagacagggtctcactctgttgtccgggctagagtacagtggtgccatcagggctcgctgcagcctccacctgcctgggcttgtttttttgttttgtttttgttttgagacggagtttcgctcttgttacccaggctggagtgcaatgtcgcgatcttggctcaccacaacctccgcctcctaggttcaagtgattctactgcctcagcctccccagtagctgggattacagacatgtgccaccacgcccggctaattttgtattttttactagagatggggtttctccatgttcgtcaggctggtctcgaactcccgacctcatgtgatctgcccacctcagcctcccaaagtgctgggattataggcgtgagtcaccatacccggcccctgggtttgtttttaaataacataaaagctgtacctgacagcgcaccctcaccacggtgtcccaggaagctgccatgcaagttagctcttggccttctgtctcttgcaggattcccaggtcagaacacaggaaatacaaggtgctgtacaactcacagctgctgttccgcagccggctctatggggacctggaggccatcctgtaccacgtgcacctcttccagcccacggagctgctgctgcagcaggcggtgttcttcctgcgagacactgagcggaggcgggtcttscaggctctagccaggtgggcagtggcagcycgcatgtggtcctgcgccccggcgggaggggcacttcttaacactctgcacccaaacaggcaagctggggcatccaacaactagatagtggccccaacagatggtggggggaggaggaccatccgcccagatgctgtgactctgtggcgtctactgttcttggggcatgtcctagaattgcctgaggagggagtggctggttaaaacccattttctaacctgggcaacagagcgagacctcatctccacaaaaatttgttaaaaattagccaggtgtgggctgggcacagtggctcacacctgtaatcccagcactttgggaggctgaggtgggaggatggcttgagccccggagtttgagaccagcctaggcaacatagtgagaccccatctctactaaaaatacaaaaattagccaggtgtagtggtgcacgcctgtaatcccatctacttgggagactgaggcaggagaatctcttgaacctggaaggcagagattgcagtgagctgagaccgagccactgtactccagcctgggcgacagtgagacttccatctcagaaacaaacaaacaaacaaaagcaaaaacaggccggatgcggtggctcatgcctgtaatcccaacactttgagaggccaaggcgggtggatcacctgaggtcggcagttcgagaccagcctgaccaacatggagaaaccccatctctactaaaaatacaaaattagccaggcatggtggcgcatgcctgtaatcccagctactcgggaggctgaggcaggagaatcacttgaacctgggaggtggaggttgcagtgagccgagattgcgtcattgcactccagcctgggcaaccagggtctcaccattccctcattgagcagctgctggctcacactggctctagggggcctgtgggcacaccagtccccactctcaggaggctacagttcagaagcagagatgacataaagaacacaggcagtgggataccctgggacccagcgggggcacggaggagggggctgcttctttccccagggcaggagaggctgctgttgaggaagggccagagatgttcagcaggcagacagttcacttgctgctgggtgtggggcaggaggtacaaaccctgtctttatatttttagagccagcaacaggtctggccctagctagtgcttgctggatgtattaatgaaggaggaggaggaggctggagagataggaaggagaaagaacttggtcggggctaagaggcttttctttgattctgtggccctcacctttggcatgtggggtggtgccacagcatttggaaggaggccagacccggtcctgcctggtaggtgacaggaggtagctgagggttctatgaaggaaacagaagaacactttttaggaagtgcttactgcatccaaggtagctgcatccatatggctttatttctgtctgagggtgaggaaaccagattcagaaaggctaaggctgggccagggtcactgggacagtgagtgcaaaggcaggcacctaccgcacagtggacttcggaggcagctgagacagtgagccgccaacagccatgactgagcatggtttctggacccaatgcccactgcacaccaggccatggcagagggcacccaggaggaggctttggggctggggaggtccttgagctttgctgaggactctctctccagcctcctccttctcctctattaacagccagccccctgaggctcggtgtatgatgtcctcctggtgcggaaggctctgtgctctacatccctgatgggcagctggtggggctgtgtcccgatggggtatgggaggaggggaagcatggctaaggacacaggaacagagcagcactcagagcaaaccgtgggcagcctttggcttctgggggctggggagaagatggagaaggaggcttttgccaggagcccaggctcagcagactggaattggagctctttagtcacaagctccaggacttgggaccagctaagcagcctctgagtgttcatttcctgctgtaggatgggagtgattacacctgtcttgcawggtaggagaggttcagtggggcagtggttctttgttccaggatccacgacatctgctataacagcaccaccctctgggacgtgayggtgagggacctgctgccctcctctgctatgataaaagacttgagccaagagtttgggatgcccctttcgcaagaagaactcacagatgagaaactgtttgccctaccacctcagcctgcccccaatcttgaggactaccacagtcggaactccaccctcaccttagagatccacgcccaccaggagaagtacctgcagtggcggagtgccatgcttatgaagaacaaagacaaaaagcacagtttcatccaggtgggcygccttcctccccaacttggggttcccaggcctcacctgggcggtccaggygcctgctgagaggcatagggcatattcctgagtgggacatttgcctctggtcgtgcctgcgctcctggcctgggctaccctgctggatgggcaagaagtgcaggatgtggggctgagccatgtcagaaaccttcactcccagtcctagataaccttgtccttcctgaaaggtgagaaggaatgctattagctatattacctttaccatggctcccagagttcattgtagagaaagaactgtggcatgtgtgtgtgtgtgtgtgtgtaacatgttgcttacgctgctcagggcmtaagtgtcataagatgtccaagcaacatgggacataaactaatctgcatgacagagggagagaatgggagactgagaagctggtgagggggtagaaggctggtgctgtgtggcctgaatgggcaaggagaacctcgctcaccccatgccaaccaaaaagacatgaaaacacagacatctgtggtatgacttggagttgtgtgcctgtggtctgtgtgaaggccctaccatccctgcaattctccagtttaaaacaaagactcctagaagcttgtaagctttgtatgtgtgcagtctttatgaaaaccaaagaacagacttcttttatgttttttgaatcggggtctcactctgttgcccaggctagagtactatgacttgatcatgggtcactgcagcctccaactcctgggctcaagcagtcctcccacctcggcctcctgagtaggcaggcatgcgccaccacacctggttaattttttttactttttttttagagattgggtcttgctgtgttgcctaggctggtctccagctcctaggctcaagggattctcctgcctcggcctcccaaagtgttgggattacaggtgtgagtcactgtgcctggctgttttttccattagtggaaaaaactttttagctttttcaaaagaatcagttcttggatttatcaattctgctttttctgtttttctaattcattaacttcagcttttatttttatgatactttaaaacttacacctttctccttttttctatcttctctagttggctatttcattcatttttatttctcttgtgtaatatatatatatatatatacacatacatacatatatatacatatatacatatacatacatacatatatatacatacatatatatgtatgtgtatatatatatacacacatatatatatctcatascactttgggaggccgaggtgggcaggttgcttaagctcaggagttcgagaccagcctgggcaacatggcgaaaccgtctctacagaaaattagctgggcatgctggcatgtacttgtagtcccagctactcaggagactgaagcttgagcctgggaagcacaggttgcagtgagctgagatcacgccattacattccagcctggatggcagagtgagaccctgtctcaatgcggcacagtgcctaatgcctgtaatcccagcattttgggaggttgaggcggtcagatcccttgaggccaggagttcgaaaccagcctggccaacatggcaaaacccgtctctactaaaaatactaaaattagctgggtgtcgtggtgcacacttgtaatctcatctacttgggaggctgaagcaggagaatcacttgaatctgggaggtaaggttgcagtgagccaagatcgcgccactgcattccagcactcagagcaacagaatgagaccctgtctcaaaaaaacaaacaaacaaaaaaagtcaaacaatgttgagagtatttgcagtcttccttatcctacctcttaatgcacttagatatgtacaagaatatatattcatttcatgggttaatataattttgttaatgccacataacaaggaagtgttttaaatttatttttatttttgagacagtcttgctctgatgcccaggctcaagtgtagtggcgtgatctcggctcactgcggtatctgcctcccaggctcaagtgattctcctgcctcagcctcctgagtagctgggattacaggcacacaccaccatgcctgcctaatttttgtatttttagtagagatggggtttcgccatgttgcccaggctggtctcgaactcctggcctcaagtgatccacctcagcctcccaaagagctaggattacaggtgaccacgcctggccatgaggaagggtttttaaagattttgcagggccaggcacagtactcacacctgtaatcccagcactttgggaggctgaggcaggcggatcatgaaatcaggagatcgagaccatcctggctaacacaatgaaaccccatctctactaaaaatacaaaaaaattagctgggcgtggtggcgggcacctgtagtcccagctacttgggaggctgagacaggagaatggcgtgaacccaggaggcagaggttgcagtgagccaaattcacgccactgcactccagcctgggcgacagagcgagactccatctcaaaaaaaatgcaataatatggagaattttataatatagtagtatacaatttatttactagccccctatctcttacaaatttgctaaaatctcttgtaaatattgttccagctttttaaaaaatcatgttcctattatcttagatatggctactctaaaatggctttaaatttcctattcatactataataattgaaacccaaccataatttaattttttcacatttttacaccttgagatataatttacataccataaaattcacctattgtaagtatatataaatcagtagtttttagtaaatttatagttataacaccatcatcacaatccagttttagaacatttccatcaccacaaaaagtattctcatgctagtttacagtcaatctctgctccattcttagtcccacataaccactgatctactttctgtcttgatagatttgacttgtctgaatatttcaggtaattggaaccatataattatgtaaacttttgtgtctggcttctttcactgagcataaagttcctgtggttcatccacgtacctgaatatatcagcggtgtgttctttttttattgctgaatattattccattgaattgatgtaccacatttatccattcaccactttttggaattactattatttcttgcttggggctattataaatattgctcctataaacatttgcatacaaatcattacgtgaaaatatgttttcatttctcttgggtagaacctaggagtggaattgctgggtcatataggtaggtttatatttatgattttaagaaattacattgtaagaaaagcggtttttacagtgtagttgcacaatcttaacatccctaccagcaatgcatgagggttctagtttctctgcattcmtacaaacacttatccgtccttttgattatagccattctagtgtgtatctcatgattttaatttgcattttataatgactgacgatgctagatatcttttaatgtgcttattaggaatttataacgcttctttgatgtaatatatatttgtatctttttgaattaatctcttttttcaaattgagacagggtctcactgtgttacccaggctggtcttgaaccccttgggctcaggcagtcctcccacgttggcttcccgaagtgctgggattacagttatgagtcactgtgccyggccatctgtatcatttatccattttaaaatcaagttgtctttttattgttgagttgttatatattctggatacaagtacttaatgagaaatatgatttgcaaatattttctccatatttgtggcttttcttttttttcttaatggtataagaaaattttgaagtataaaagttcttaattttaataaattccaatttatgttttttctgttagcaatcatgcttttggtgttatagttaaggactctgcttaaagttacgaagatcatttcatatcctttctcttacacttactcttagctctcacatttagatctgtgaaccattttttttgaggtccaatgtaagggtctaaattaatctttttgcatatggatatccagttgtcctcacatcatttcttgcaaagactagctattcccccattaaattgacttagcatctttttgtcaagaattgaccataaatgtaagggtgtatatctgagttctaaactatgttccattaacttatatgcctctccatataccagcaacacattgtcttgatgactttaattatagttagttagttggattgtgtaagtcctttaactttgttctttttcaaaattgctttgactactttgggtcctttgcatttccacatatattttaagatcagcttgccaatttctgcaacaaattctataggaatttcatggggattttgtttatttattttttttgggacggagtcttgctctgtcacccaggctggagtgcagtggcacgatctcggctcactgcaagcttggcctcccaggttcacgccattctcctgcctcagcctcccaagtagctgggactacacatacccgccaccactcccggctaattttttgtattttttagtagagacggggtttcaccatgttagccaggatggggtcaatctcttgaccttgtgatccgcctgccttggcctcccaaagtgctgggattacaggcttgagccaccgcacctggcggggattttattgaatctatagattgatttgggaaaaactgccaaacttaacaattttggggttgccaatttatgaacatggaatgtctctgctgttatttaggtcttcagttttcctcagagatttctgtagttcttagtgtgcaagtcttgcacttcttttgtgaaattaatggtgttatgaattgaattactttttgtattgtttccataatatagaaatagaattaatttttttttttttttttgagacagagtcttgctcagtcgcccaggctggagtgcagtggcacaatctccgctcactgcaagctccgcctcctgggttcacgccattctcctgcctcagcttcctgagtagctgggactacaggcgcccgccaccacgcccagctaattttgttttgtatttttactagagacagggtttcaccatgttagccaggatggtctcgatctcctgacctcgttgatccacccgcctcggcctcccaaagtgctgggattacaggtgtgagccaccgcgcccggccctagaattaattttttgtccattgatcttgtatcttacaaccttttgaactggatcacgtcatctgtgaagaaaggtcattttcttttccaatctggatactcttccttccttccttcctttccttctgcctggggtgccacaagctcagaggctcaaacaacagaaaattatttcctcactattctggaggctggaacgtccaaaattaagagtctgacaagttcggtttaattctgaggccttttctcttggcttgtaggtggccaccatcttgctgcgtactcatatgatctctttgttgtgtgtgaatggagagagtctctaatatctctctcttttttttcttttgagacagagtcttgctttgtcaccaagctggagtgcagtggtgcaatctcggctcactgcaacctccacctcccgggttcaaaccattctcctgcctcagcctctcaagtagctgggactacaagcatgcgccaccacacccagctaatttttgtatttttagtagagacagggtttcaccatgttggccacactggtctcratctcctgaccttgtgatctgcccgcctcagcctaccaaagtgctgggattacaggtgtgagcaacctcgcccagcctctgatgtctcttcttgcaaagacactaatcctatcagatctgggccccaaccttatgacctcatttaaccttaattacttccctactccaaatagagccaggctggggtttagagcttcagtagaggaatttgagggtgaagacattcagtccataacacttcctttccttgctcttttcttccttctctgtccttccctttctccctttgcattgtctagaatgtctggtataaagaagtgcagtgttgaagaggagtggtgagagcagacatgcttgccttgcttgtgatcttggggagaaagtattcaggctttctccccaagcctgaatgcagtggtgtgatctcagctcactgcaacttctgcctcctgggttcaagcagttctccctgcttcagcctcctgagtggctggaactacaggtgtgtgccaccatgcctggctaatttttgtatttttagagacagggtttcaccatattggccaggctggtcttgaactcctaacctcaggtgattcacctgtctcagccttccaaaagtgctgggattacaggctacaggcgtgagccaccatgcccagccacattcaggctttaatgtctgtctctctctsaataatgttgagcaccttttcacgattggctatttggatatctccttttataaagtgcttgttcaaatttatttattttctccatttaaaataaatctagttgtatttttctaattgacagtgttttacttttattcaaatgagttgttagatgtgtatcttttcccagtctgtgactcgtcttttcattgtttcagtrttgagaagtgtttgtgagtatcarttaatttttctgtgattagattttttgggtatttttcctgggtttagaattctagcttggcagttattaacactttaaagacatcattccgttgtcctctgacttccattgtttctgttggtcagctgccagtcttgttcttttgaagataatttggttgtctctggctgcttaaattttttgtttttattttctttggttttcggcagttttatgatgaygtttgtaggtgtgtttttctttgtatttaacttgccatgggtttctagaacttgttaaatctgtagcttgattttttttaagttttaaaagttctaggacagtatttctcttcagatattacttatattcatcttcycttcctctcctcctgggactccaatgttagatattttcaccatgatctgcatctgatattacttatacatctcatactttttattttacagtctttttttctccttttcatccttcaacctgattattttcaaccaatatatcttctgatgcaggggtccccaacccccaggctatggaacagtagcagttcgaggcctgttagaaactgggtggcacaacaggaggtgagagtgggcaagtgagcattaccacctgagctccacctcctgtcagatcagtggtggcattagattctcataagagcatgaatactattgtgaactgaacatgcaagggttctaggttgcatgttccttatgagactctaaccaatgcctgatgagctgaggtggaacagtttcatccccaaaccatgcccatacaaccctctcccactggccrtggaaaaactgtcttccacgaaaccagtccctggtgccaaaaaggttggaaactgctattttgctaaatcactaatcttatcccctgctgtatgttggggtgatcagacccaacaccaggctgtgggggccacaaagtccagcggagtcaaaggaatgagacaaaacaagttaagagtgcataaagtgggactagggrgccartgctagtatggaggctgtgaaggtcccaagttctggaagcctgcactatttattggtgatcaaacaaagaagcagstggtgaggatgtgggggttgaaagaaagcagtgtatcagcacatgatctatagctgtgacagtttagcattttctttgaagcatgtggaacatgttctgctacttgagataatgggaaacatgttcttctagtttaagatacaatcggtcgggcgtggtggctcacgcctataatcccagcactttgggaggctgaggcaggcagatcacctgaggttgggagttcgggactagcctgaccaacatggagaaaccccatctgtgctaaaaaaaaaaatacaaaatgagccggacgtggtggtacatgactgtaatcccagctacttgggaggctgaggcaggagaatcacatgaacccaggggryggaggttgcagtgagccaagatcgcgccattgcactccagcctgggcaacaagagcraaactctgtctcaaaaaaaaaaaaaaaaaaaaaaagatacaatcgttctatgagcctgggagtgctagaaggaaggagccagcaagtctagacacattccagaggccgcaaggggttttatgccctgagccctggattccatccaagccatgaggrgttttgtgccytgggcttagattgtggtgcagcagggcagccttccaccctttggcacagagcttggtgttccaaaggccatgaggggttttggaccctggaccccagacatgttccaagactcttttacattatatcagacatgcaagtcctgcctcagcttttttcccaacactcagcttttccccaacatgcccccttttcttttttgtaaaaccrccacagctatcatagcttgttctcgacggcagctgtctctcccgaggtggcttccgcatctgcagactaaaaggagacagcacaaacacataattattagaacaaaatctgccaagtatagagcttccaatggccttaatccatttaagaggattgattgtggacaacccattggctgtcttgttcaaaatatcagttccagggagcagggctaagtgagcctgagaggcttcaaaaaccttctcttttagttttacaatatcaagggtgagattttcatctttgccctccagatggcatttaagagtaacatttcctattgctagcataaaaggtggccgaacacaactttgaatccaaaaggtctttctgtttttaaattaattgagcaaggcaattgcaggctgttcagcccttaattgccagttggtgatccagcttcatttgtcttagcccttattcaaaatgtagtcgctctggtttgaatgcttcttacatatttcccccttcccttttacaaaaggacctttaatcctaagggctgcagaaggatgaaggtccatcttctgcaacttcttcatgctgaacaggggcgatgatattcctgcctattagggtctcttgtattcagggtagagaggagctcagtcagaaagcattggtccattaagcatctgttgtgcccctgagttcctgcaaaaggtaaaaccctggcgctgcagcagtttctcagcttcctgtgtggttttcttgatctgcccccatgttatgggggttgatgtcagcgtgactccagtcggtcctcattccatcttcgcattcagattcaactggcccatggctcgtactgggggaaccccctccatggttgggtccctccagtctccygttccatggtcgtacacatcttgagggcacccacacggcttgttcatctcctgcaaaaacacaagcataccctcaaccccacgttagtaaatctagcgaaacagaagcaaaaacttttgtggctgtagctgggaggcataccattggtgaagcatttgttctacaagctgtaactcagcttctgcctctttggttaattaccatggggtaaaactttccactgataatgagaagcaggccccttctaacagaaggcacagagagcaaatcgaagcttatccttcttgtgcaacagtatagcaaaaaagcaatccttaaaccttaaatttgcaccatacaggtgggtccactagatgctgtggctcatgatagatcttcagatgtttggtgggcactccattgttgcaataagtctctacctcataaattgataggaataggtgtaataataggttgaattgttccttcctggccatctggcccgtgacatggtaaaatcaaggaactttgaaaaacttctgaagcaggccctatgccagtgatacccatggaagtcttttgtttgggccagtgttggggccattgatttaaagcaataatagagacatcagcttcagtatttactagtccttcaaaatcctttccctgaatagttactgtacaaataggtcttctgtcagacactagattaacccaatatacagcctttcctgctggattactaccaaagcctcctgttcttttcactgtgctgcttcctagttttgtgtaaggtaacagcaataactaagcaattctttctcctggggaagaagaccactgagtcgaggaactaataactaattgaattttttttttttttgagatggagccttgctctattgcccaggctggagtgcagtggcacgatcttgactcactgcaagctccacctcctgggttcactccattctcctgcctcagcctccctgagagctgggactacaggtgcccgccaccatgcccagctaattttttttttgtatttttagtagagacggggtttcaccgtgttagccagratggtctcgatctcctgacctcgtgatctgcccacctcagcctcccaaagtgctaggattacaggcatgagccaccgcgcccagcaaactaattgaatttctccggtataatcagagtcaattattcccgtatgcactgacacctcttaaatttaaactagaccttccaagtaacagaccaactgttcctgagggtaagggttccctaacacccgtggggaccttctttggtggctccccaggaaggagatgggaattgtgctgcaaaggtctatagcagcactgcctactatggtgggagacaattgttgtatgtttgtaagggcactggctgtgccggatatgccttggtttgttgaggggcctgaggcaggcccctcttcccatttcccgaaagaggttgtccatctttgctaaatttagaatgacactgatttgcccagtgattgcctttcttacactgggggcatacactgggacttttctgttgattgatggtagtttttgccttttgatttccttttctacattccttttttctgtgtccaaattgcccacaattgaaacaatggcccaagaaatggggcatattctttcctactttcaatccagccatagcctgagctaaaagattagccttatgtaagttacctccaatgccatcgcaagccttaatacattcagctaactgaaccttccctgtcaggggyctaatagcagtttgacactgcattagcattaytgtatrtaagaagctgtattaaaacatcctgagcagaatgtttgctttcactttgtgccattgttaccctggtccttccgagtgctcagctttcctgctgagcttctttcagtcgtcctcgggtgtcctctgatgatrcatcctctttcacacactctagtgttccttcactggggtgttcgttgcctcatattgggcgccaggaatgttggggtgatcagacccaactccaggctgtggggactatgaagtccggcagagtcaaacagatgagacaagagtgcataaagtgggaccagggggccaacactagtatggaggctgtgaaggccccgagctctggaagcccacactatttattggtgatcaaagaagcaggtggtgaggatgtgggggttgaaagaaagcagtgtatcaagtgcatgatctacagctgtgatggtttagaattttctttgaagcatatggaacatgttctgctacttgagataatgggaaacgtattcttctagtttaagacacaatcgatctatgagccttggagtgctagaagcaaggagccaacaagtcgagacacattccagaggccacgaggggttttatgcgctgttccctggattccgtccaagccacgcccttgtggcttgtgccctgggcttagattgtagtgcggcagggcagccttccaccctttggaacagagcttggtgttccaaaggccacaaggggttttagaccctggacgccggacatgttccaagactcttttacgttacgtcagacatgcaagccctgcctcagcctttttcccaacactcagcttttccccaacactgtgtccaagctgcaattaaacccatccactggattgtaactttaatgatgatttcttcaattctatgatttccatttattttttctataggttccaggtgtctggtgaaattctcattttcatttattttgattaatcataattattttaatttttttttcttgagatggagtcttgctctgtggcccaggctagagtgcagtagcactatcttggctcactgcaaactccgcctcctgggttcaagcaattctccctgcctcagccttctgaatagctgagattacaggcacctactgccacacccagctaatttttgtatattagtagaaacagggtttcaccatgttggttaggctggtctctaactcctcacctcaggtgattcacccacctcagcctcccaaagtgctgtgattacaggcatgagccaccatgtccagactagttytaatgttcttgtctgatacttccaatatctggattacctggggtctgtttctattgtcttttttcttggtttccatcttttcatcctgttacctggcatgtctgttattttttgttaaatggtaaagagggtattgaaaactatagagactcttgatgtcttattccagagatgataaagcaggagacagaggacagataaatctccttaatcagagtcaggcttgcccttactcctaaagcagattttctgaattctaaactggaggcctagaggtaccagggcccttcctccttggcacaatttccaattttgaaatccaattttgtttctctagcaatgcagcattttccaaaatacctccttagcttctaaacttcttaagcttctttttctgcttatgttcttatttctgccttatccatgtgcaaattaggagtcagtaaatcccttgagagaaaactgcaaaaagaaaatggaaccaccattatttcccttttctccagattcttggactctcaaatcctggttgccttggttgttctccagtgatgttagatagatgtctatttcttcttgtaatcctgtcagttgtttcttaatatattttgagactatattgctaggtgcatatatatttacaagttatccctttttgttgtcctcaatatacaatatccttttgccccttttgatagatttttaacttgaattgtttcagcagatattaagaatgccacacagcttttttgtctttgttttctcatgcctttttgcctagtgtatatgctgtctccctttagttgtcaaacctgtatctttgtgttgaaagttttgtagatagcatattgttagcttgaaaaaaaaatccaggctgggtgcagtggctcacgcctgtaatcccaacactttgggaagctgaagtgggtggatcgcttgaagtctggcgttcgagaccagcctgaacatggtgaaaccctgtctctactaaaaatacaaaattagccaggcgtggtggcacacgcctgtaatcccagctacttgggaggctgaggcaggagaatcacttcatctcgggaggcggaggttgtagtaagccaagatcgcgccattccactccaacctgggcaacaagagcaaaactctgtctcaaaaaaaaaaaaaaaaaaaaaaaatccaatctgagattctttaattggcaagcttaacattaattactgttaggttaggcatttttgccacctaatctacttttaaaccctccgttcctgtgttccttggatagatcaagttttcttctgtggacttaagttatacattctatctttctttttaaggtggttatcctgaagaccatatggttaggcattcctactgaacattaaactcataaaactatattctctttataagacaaattgtacatttacatcccttttatctcatctcctacccacactccaccatcccttttatagtctctagaatttcaattccaggctctgaaattttattttcctagtccttttaagacaactttactaggctatcggacattacttgctaaccttgaatcctcctgcatgttcctcctccattttgaatttctccaaagagttttgtgacttttgttttgtttttttgagacggagtctggctctgtcacccaggctggagtagagtggcatgatctcggctcaatgcaacctctgcctcctggattcaagcgattctcctgcctcagcttcccaagtggctgggactacaggcgtgtgccaccatgcccagctaatttttgtattttttagtatggaaagggtttcactgtatgttggccaagctggtcttgaacttctgacctcagatgatctgcctgcctaggcttcccaaagtactgggattacaggcatgagccaccacatctggccccaagrgtttttaaaggagggttttatgtaaaacctaaggcctttaaacctaagccctcacaattagttkgcttggatatgaaattgtaggttgaagttaacttaccttgttgctgttgtggatctgatcacaagtgatagtttttctttacaggtggcctgctcttttcctctagaagctttgagagtttatctttgtatttgtttgcttaaatcccactaataatagtgtacccaggcttggaagttttgwcttttctgacattcattattgcttcaaattttcttgttctcacttttcccctccttttgggayttctgttatttggatgttatttccatcctctatactcagtttctaattttatcttttttatacaggactgctttctgaaagcatatctcaagtggatattccagttcattcattcgttctacaacagtatcacttctgcaatatatctcattctcttgtcttctatttcaactattttcatactcaatactttttcttttagttttacttctgcttcatattgctatcttcactcttattttaaaacaatttcttatgttaaattcttagcccatcttttccaataatttagcttcagttgttcagtctgtggccttttttaaatactgtatttacttctccagcatctagttacttttgctctgagtccaaattctcctgcaggtgtcacccctcagcagagaatctcaggcacccagaagaactacggaacagtttgctttccctgtaataagcattaggtcagaatttcaacttcaaattgtaagaaaggagtagcatggaaagaagaatctgtccccctaggttgtaattcacgaattctaggatttggaaggagcaggggacttctaggaatggctaactgagaaactcagatcaactcccccactaaggacaactagaaaaactggacacatcaagaaatattgattgaagttccatgtgggccatgacaggatccttgctctatgtggcatccctagtataatcttctcgcaggtgctccaaagtctgaggacctagacttgcctttaccttgcatcccttgttgcctggacagtctgttctttcatgtgtgtgaatcacaaattttgtcctcccctgattattttaaattcttgtgcattaattcctcaaagattccaaagtcaagccactgtagttgagctaaggtcaccatcttgtgctaaaaaattttttaaaggtaaaagatggtattttgctgaaggttactgtgaaatatgcatatgaaacactgcacagtgcccaacaatttagagtggtaactttcccagttctcccttgttttgggtcccagccacctttccccccagccttctgtgttgtcttttatctccttccacatttctattttcattcacaaaggaagccaacagaccatcttatttctctctgttcagggaagagttcccatttccttactgggcctgctggacagaatgagggtcataatccttatgcacacttgacagttaaccatggtcaaggatggcagtccttgctgctttaggttgtaatatcccctgtccacactctcctacttctgaccatgtgagacacaaattctgtctttatcacaaggtggttgggagatgagtggccagatgatgtgtgttccagttacagtgaccttaggggtctcaattttttggtcctcttaaattccattttggatagtgagaggttggactagttggccctttgccctggttctatgatgaaataacagcaccagtattgaagaatcaatcaatacctgcaccacagctaagtcccagagatcatctcactgcatatgagctggcatggggggtgaggatgacctggtgtgggtagtgactggtgtctctttcttcagaaaaatatcacagaagcctaccaggtcagcaagaagcctccgaagtccgtggcgaaggtgattaaaatttcagcccctgccaacaaggccgtctacaactatagtacccagaccatgaattctacagagcttgccaagaaggagctgtatcaagagatagccaaggtgagagacccagacaggatgatggcagttggcaaatcccatgagttctttattctgaccatgcctgcctggaggtcagtgggggatctcaactatacagatgaaagccaatcagctaggggaagtagacaaggctcagatgttgagaggtgttctgttccacactaaatgtgaatcctccacacctgagggtaagcccaagatcctcaatgtaagctcagatgtacataaaggagaacaactgtagcatccttacctctggggaacactttatgattgctgcttatcaaggcagctaccaacagaagggaaagccatggtttaggcttccagcacatattaactttaggaaacggcttctcccatcaaaggggacaataatatgtcccttacagggctactgcacagtcatttcctctcaatgcactatttacattgtcaggaactatgattatgcccccagctgtttctgattcctacttggaaataaatccaagattgctattagcccttccaccccaacctgtctgcccccatttctaggagccaagaaagagattcacgtactcacaggattacctctcagccatggtggagcccctggacttgaaggaagaggagaagaaagcccagaagaaatcccgccaggcctggctcacagccaggggattccaagtgacaggtcttcagagcgacaccgaaagcagctttcaggatctcaagctgccacccatcaaagagctgaatgaggtccacagggaagagcagggtctcaggtggggtgtccatagggacctttctcctcctgatttacttactcccccaatttaggagtggaaggaaaactccctgtttgctaatgtactggagcctgtgttggatcgagacaggtggagctgggacaggcaccacgtggactttgatctgtacaagaaaccaccacctttcctcgagctgctcccttcgcccgcaccaaagcctgtaacaggtaacaggcaagggtttgccaagctgggcctcctgatgccgtgggcaggcaggagctctgtgccactctgcatcttcagtggtatccattttgtttacactatcaaccaaactttctatgctaagaaaagcaagatgcagaatgggtctgaaaraagagattgaatgctgggctggaactcagaccaggattctagccccaagtgtgacatttgtgtgacttgaggcaaatcccttcatgccctgggtctggtttcttggctataaagtggggaagttggaagacaggtctaaaggcttcctgagcttcaacactattacccatgactgatctctaggtgtccagccaagagctgggggcagaggctctgggcttcactgggaccttccarcggcaaagatactgacagttctttctttggggtaaggcagagacaggaaacgtaggtcttgctgtaccagtccctccaagtcctcttcctctttatccctgtttatgaaaattgatctcaggatcatctggaggttaacatagaacccaaacttggttaacagagccagaacctttgttcagggagaaagagacatgagcctatctaaaaacaaggtctgccagagaaacttctcccagaaaactaggtcaggtgaacgtgatggcttcctctcctcctcgactcctaaggacaactgatcacagctccatggaagtgctaacaagtttgctgaaatgtcactttctccatttgcctagacttggctccctccctccccagtaggccctagatctcccaggttgcctgaagagacctgctctctgtgggcatgtcccaggcccacagttactgctgtggctctcaaggaggctccagctaggagagctgtctagcctaagaacacaaggcttttccttggtaagaaggcttcctagtgagctccactgccagccttcccagcaaaagtctcctgggggtttcactggtgaaatcacttaagaaacacttgctggggtctcctcttcccacaacatgtttaagaaaagttagcaactacagatgagagggagaggcttgaactggtcgctaggccttttcaacccagatggatgaatggagaacttgccattctccattggcatgtaagactgaggccttacacgccaccagcctagagtgaagcccccttccagaaggctgcacagaaggggggtgggtctgacagcccctccccaaacttctcctgtgcaaagaaactctaagcagccttctgtccagaggtatgcatgcttcattttgtgcaaaatgctgccctgctatcactaacagaacttcaggtttcactgagaggttatttacacggtcacaatatttacaaactttccccattttaaaaactagttaccaaacccctggcagaatgctcaggccagccccactcagccagctcagctctccaagttcccagtctcctccttgcctatttccagcatcacagtaaattgggaatatacttggaggaaaaagagtcggctgccttctctgtgctcaagggagtgtccacaataggcattttagagctccagaccacccaaggaccacatcaaagcttaaagttcaccacagtgagcacgctgggacctggtgtaatctttcaagtgccagcagaagggaggctggagaaatgcaaaggcctgctggcctggagataccattcatcctctcctcaagagtagaagccagttcttgtaaagaaactaaagtccctaggtgggaacatcatcagctgagacagcctccccatcatctcctgagaaggataaaaactaagggctcataaccccaagggattgtggcctgcactgtgtgtctgctccttagcattctgggccctccttgcagggtgaggacaaaggggacccgaggccatcaccaaagggtggttctcagggtcctgctgtcacccattaaaggctggttctaaggaacagtgtgacaagtacagcaaaggctaacagtacacagattgtgacattttatattctttgttaaatggttcctggtacatgttttaagtgcctctgcttctagtttaaatgaatgacccagacagagctttcaagctgtttcttagagaatgtgtggttgagcagaaatggctatccacacctgacacaggtccccacccacctcacaccctggaggcagcagcataagccccagtttccactatggtgtctcctcaatgaccagaatacccgccagttccaggggtcagcaattccattctctctctccggctcagttcaraagctgtgatggtcctgttagagagcactgcctgcaggtcaaaacctggaagaggctctcccaggccaggcgacaacccttcaggtgcagacggggaacaaaaggcttaacctgtgataatcccaacaccttctgaaaaaagagtaacagtcatccagcaacgggccatgggtaggggygggcggtagcaggggacactgtcccctgcctcagcatgtcctgtccagagggtgggcacagatataggctcgcttctcaaggatctgctgggacactttcttaatctgctcatctaggttttctggagcatctgggaaggaaaaggagagatggtgggtgatctttctgcaccgtgataagacaaacatggctgaagtgggggcatttttccacaaagtcagcccacccaccatgaagcagccctaagggtgaacccctcctccagacccccagcaagtgattcagggctgcagggagagaaaggggtacagcttcattctcagttacaaaggactcatcctgctcatctctaacccccagatctcatggggtggagccggcacttgctccgtaaacagcccatctgtgattccagcccactggaggagaaaccatttcagcaccctccacagcacataacctgtcagcactgggggggtgtctgggctacccccagggctaggacctgcaaaaaatcatatgccactctcagcaagtgccacagtgctggcgcctacacccatcacttggcaacacgactgggctttgtggggacactgatccagaacctcaggtcaacaggactgtgagggtcagaggtagactgagctgggcattcctagatatggtcgagtggctatagaagaggaagagcactgcagacagagcggggagcacgagcaaagccctctgttctctaggccaaggcctgagacctctgcagggcactgcagggtcattttggatggagtacagtgggtaaaggggcaggtaaaatgctgtctccagaatcaggtacaaccagrtgctcctcccttcgtgagccttccccgggcagcttcaagaatacagccagggctgggcacagtggctcatgcctgtaatcccagcactttgggaggccaaggtgggcggatcacctgaggtcaggggttggagaccagcttggccaacatggtgaaaccctgtttgtttctactaaaaatacaaatattagctgggcatggtggtgcgtgcctataatcccaactactcaggaggctgaggcacaggagttgcttgaacccaggaggtggaggttgcagtgagccaagatcatgccactgcactccagccagcctgggtgacaaagtgagactatgtctccaaaaaaaagagaatacagccaggcatgctgggcagatgccaggggtcctgcgcaaagggctctgcacttgctcaatctaaaattgccttggcaggcccggtgcggtggctcatgcctgtaatcccagcatttttggaggctgaggcaggcagatcacctgaggtcaggagttggagaccagcctggctaacatggtgaaaccctgtttctactaaaaatacaaaaaattagccgggcgtggtggcgtgcgcctgtaatcccagctactcgggaggctggggcagaagaatcgcttgaacccaagaggtggagtttgcagggagccaagactgcgccattacactccagcttgggcaacaagagcgaaactccatctcgaaataaatacatacatacatacatacacacacacacatatatacatacaactgccttggtgaatggggcaggtatgcacctacagtgcctggtgggcactgctgcagctaagcccaggcctacccaggccctcgctcaaggcagaggtctgtgagtagctagcaggctctgggagcttgacagggtccagaaacagctcaccatcaataggggcctagaagtgggcccttccttccctcccccaagacatgccactcacacttgtccagctgagagaggctgaagagattctgcaagtaagcttccacgcagaaggtgttggccaagagaacctgccagaaccgaggacagaaaagatatgcccaaattcctggaatcagacctctgagcttcaaaaacccagcctatcaatcagccaaactgggtagcatggcaggggtcacaaggcctggcacaggagtcaccccgtcttgggttctaattccagccctgatccaacagcctttccccaacagcaagtgactcaacatctctgaccctgtttcctctgaaaggcagatgtcacaatcctggtatctgcaggtgctytggaaagtgcaggcagagatcctggtatacagtgggtcctcagagactgcacccgcctccctccagcacagcgggcaatgtgcagggtctgtcccttgctgggggtaggggcactgggatcaggaacccctgtcactcaccccctcttctctcagtcaggaagaagaaagggaacagccccatctcctgagcagcacagaccctcccacggccaccgcatggtgaacctgcacagcctcccccacacccgaccacaccctcctcaacaatcaacttcattaaagtgcagcaggacagatggcagcagccaggccctgtgtgaggctgggctgggctcacctcgtggtcgtggttgcggagcccaatgcggatggagcggctggcccgcgacagcacggccgtcatgccatacaggttgatgaggatgttggccacccgcttcagtaccagctgctcctccatgatggtctgggatcacagaggctccaagtggggactcactacctagaccagtcccccacatggtccctccctgggctgcatctttgcctgtcttagtctcctgtgttccttgagaaagtggagtcaataacacctttctcttcaggttgtgggagaacggctcccagccaccttctgttttcccttctctttgagctctagattcagggaggggttaaggcaagaccaggtcccagaagcttggctgagaccagaagccagtgcttactgtgctactgccaccttcagcagcaagggccccaccaatcaggtccctagattcaggccccaggtggagctgccctcccgattctagggagcctctctacctgaaaggtgcacagaaaaacactgcagaaaactcacccagcaagggtacccatccgagtagctaagtgggccccaggctgacaaagtcagcctgacctcaccaccccatccctccagggtgatcaacatttctgttctaggcctggtcccaaaggatgcttgacaaaaagtagtctcatgaatgctggccaaattggaggaccgcttgcgacccaggcctgggagggcctggttaccttgccaaagcggagcagcagtgtctccacggtccggccgaagcagtaggtgttctcctcaaacttgttggcactgtcctattaaccaagacaggactcagttcagcacctcatccctacagtgccctgtcctgtctcacagcccgggtaccaggcagagatgccccatctgggggaagcaatccagggtgtcatggactagctggtgttccccaacttcccctggagaagcccagaccccccacagtgagatcttttctgccacaaggagatctggcaggagggcattgaaatagggggtatgcctgttaggcccactcaccgcaagactagggtgcacaactccatggttgcctgtcagccccaggtccacagttcggcccagggagtcccgaagcctccggccaacggtatccatgactgtgctcactttggcctgtttaagctcactgcagaaagtccatggtcctgtgactggaggcctcgctgctggcgctcactgtccagcaacgtggcccattcggcacccagaagctccgtgcccccctctggcctgggtatgctgggcccctggctacagcctgaacccccccaaacccaccacctgccagagagcagccagtctcctcaggggagccacacatatgctcccccatgaggggtggagtcacagccagcttcccagcagctgtctcctgtgaaggagacaaaatgctactagcaacctgtacttggcctccagcagtgattttggattactgtgcccctagggtgggggtggaggggagcatgaggggaagaagggcagagaagagaaacactggcttatgttggctgtgaggcctggcacctttaaagggacacctctcattcttcaggttctgaaaaaccagctgcctctagtgtgagggaccagatgggggatacggtatttatgctgaagctgtagggtgctgtggccataagggcagggcagcgagggcttccctgggcagcaagccccccactaccacaggggaaggtcccctccacaaggctgcgccacacccccatgcccccactccaggtcaaggcagctctttcctcccactgccctggactggcccctgctgggcaggtatgggacctgagaagcacacggtgacaatggcacctactggatcctggtagtcaggatgcggccggcatgctgcagacccgtcagggcgatgtacatccggagaatctcattggttccctgtggccagtagtgtagaggtcaaaggctgccccccggccaggcagccatggtagtgccacgtgtgctgggtagggccggccactgcctgcttgcccattgccacaaaagccactgctcctgaagtagctgggagcagggctctggccagggctcagggagtgcacagggatgaggagggaggtgaccagatggccatgagctcccactgggacccccccacctctccgtgaccagcctcacgtgtgtcaagcctttctccaagtctccaggtcctctgtaaaatggaaaccagctttccccgggtggtgaggggtgctgatgcctggggctcagccagtgccagacagacattgctggctccaggtggaggccagattcctcacggaagccagaaattgctgagtggcagctagaacctcctcagtgccaggtgtcaacacacccagagggccacatgctccccactcccccaacccatgattctgatcagtgagaggccagtgggcttctgcccactctgcacaatggtactgtgtgtcaggtgcaggggcctgacccaggctacacagccagcactagggactgaggactgtcccctgcagtcaggctgacatcacggacagcaggactccctacaggaaaaggggggactgcaggggcctcctggcaggaccacccagctccgagcaggctccagacaggagctctcaccctacatcgagagccctgtgttcttccaaggccttgagggcttcctgaaccctgctgaccaccccagccctggagaaccccaaccctcccaggctaagggaagggcctttggagaagaccctttgcagggctgagaccactccagtgccctcaggctggcccttgccccgtatgtccactgcaacagtggagatggctggaacccaatgggtaggccaggaacaaaagcagccaaggaggcctcccactgggcaggacggcccaggagacaagactacactcccagaggctgatgatgcctctcatcaccagacctgctgctcaggcccaaaccctctccctgtctcaggcctgcctcctgtatacccatgcccaccatcatatcccactcatcctgctgtgctctcttaggtccagcccctccctcccagcaggagagcccctggtctccggcctcatcactgcaactcactctccacatgagccccgtccacatgtccagcacttgctgagcccctgggggaatttcccacaacacagatacaaccaaataatgccctgcttaaagacgttttgtggcttccaaattcctctgctgtcaatcaaggtcctccacagtctggctacttttttagccttcccatataccttcttcaacacccccaaacccactgcctgccccagcccacctagcagggctgactgctgctcccagaaagcccttcactctctcttcattcaccttgtgccagcagatcagtcccatctgggcctggcgcgctctattaccctgcccttagggacaaactgccctccacccggccctggttgaagccctttctttctgcccctaggggccaggagcgcatgcttcacaaaactctggctgcctctggaggatgcccgctccctgcctctttacactctgtcatctcccttggtcggccctgctgcacaatcagaacacagcatccgaagtcatctctgtggccccagttccctcccctgccacctggcacatgctaactgaactgactcctcaggcttgtgacttcatggagggcagcagtcgggaaggagacgtgccagggctaggagagcccctgagagcatgcgacccagccctgggctgcgggggcctctgcgaggccctgagcagcatctttaggaccaggcagggtgggggtggagcacagcttagctggtggcggggccactcacctcgaagatgaggaggatgcgggtgtcacgcagtatgcgctcgtacggatagtcccttgtgtagcccaagcccccgaggatctgcagcgcctcactcacacactgccaggcggcctcggagctgaacacctgtggggtgtcacactgaatcctttccaaaaggaggacctacgctgcagggagctgggtggctggggaggcatgggaggcacccgggcttggggaggagatcggccagggaggaacttgaggggtgatgtggtcaagtcctttgccttccgtgaccacactggccagcttgtgttccctaccccaccatgaccttctgtacctctgggcctgccttcaccctatctgcacctggctgagctcctgttcctttaaaacccacctaagatctccccttcccgagaaaacctgacctgttcctgccaagccccagcggccgtgatttctttctgtctgtgcacactataagtgccttgggggcaaacatactgccatgtttagccctaggcttagcatctggaagaggctggcctacagcaaactaatgtctgtggtcactgttcaagggtgacaagaaaacgagatgataaaacacatgcaaatgcacccagtacacagactgcacctagaaaagactcaaacacggtccaagatgcccagcctttttgtttttaattttttatttttttagggaccttgccacttcaggatcccaaccttttaggtagactctcctgccgacaccaggatgtttgcttctgtaagctgccatacctctcactatttctctcaagagctcaattccagagaccagcttaaaaacaattgtggggggcacaaagtagggtccccccaagtgtggccatcttttttattacagctaaaaaatgacaccctccaccctcaacaaaacaaaagcaaattctagtatctaccttaaccaaataagatgctcttcccacctcagcctcccaggtagcagggactataggcgtgtgccaccatgccagctaatttttgtattttttgtagagatggggtttcgccatgttgcccaggctcatacatgttttttgttttttgtttttttttgagatggagttttgctcttgttgcctaggctggtgtgcaatggcacaacctcggctcactgcaacctccgcccccaccgggttcaagtgattctcttgcctcagcttcccaagtagctggggttacaggtgcccgccactatgcccggctaattttttgtgtttttagtagagatggggttttaccatgttggccaggctggtctcgaactccagacctcaggtgatccatccacctcggccccccaaagtgctgggattacaggtgtgagccaccgcgccctgccatatgcttagtttttaagataaagttttgataccagaaagtaggaaggccataaactaaggaaaaaagaagtctttctcacacaagccagatgcaatgttattactctaaaaggatattatcataacggtctccttctgctataaactactgatccactggcccactggacacttccctactgctgctccccgctgcctgcctatccctggagtgctacacagggcaagtgcatcataaatactggatcaatgacaggaggaagatgacaggcaacagcatgggcttgaaaggtcacagtgagggagatttcccaagcctccctccagcgccagctctctggctatgccagggttaccttcaccatggctgcctcgatggagcagtcgggaaagccaggttggtccagcatccctgctgtgaggtaggtcatactctccatgacgtaagccttctgagccatcagtgcaaatttctcctggagtgttcagaaaaaacacaagaaacaatttgcatgtgctgagagccaaatctgtgaaacaggagagaaagtaattaagtcagaagcctcaatgcccaagagaagcaagcccagtgacccgtgtcaaataaagccttaactagtcttcttcccaaatcaccacagaagtcaccagtacagagacatcaaaagaacacaccgttcatgtcacacagtgaaatgcacaaatacagtactcaaccattggtacctgaatcaatccaaattcactgagcctcttgttaaactgtttccttgtgcaggcgtactcagcagtcatttctgaggaagagcagagttattagaatgaactggaatatttctgtggttcaaacatgatttcctatggccatcatccttacccttcccacaggtgggcactgtgagaagcgtgtctgctgaggtcaaataccccagaagctggcaaccccacttgccagcacccgtgggtcagaggagaaccacccctcctcatggca

SEQ ID NO: 97050 - DNA, 14877 bp, Homo sapiens
caccccacagcccagaggacctgagatgccccaacatttcagatccccaccctcaggaactgccccacctgaagcttactgggggtcatgcccctccagaaagaggcctccttccacagctcacacgggtctgccccttctcatgccagtgatggcctggaaggaggtggaaggtgcccaggggccctgtagtcttacctggagcatctccatccttggtgcatcccctgcctcgtgtatctggctatatacctcggggttgtgggggcggcaaggccaccaggaggtgataggatgctggggtaacctggacactaatccccccgggggcgagaggtgcacatggccagggaggcgcaggagtggctcagcagagtgccccagccctctcccctcagtggtctagcgccagaggtgaggcagagaccacggtgaagtgacctcagagactcagttgtcgagtgctagggactagtcgagcctggaagcacagggagtagggtgtaggaaggcctgcctctgccaattgtggggtcttgggagccaggaggaggccatgacccgagaaaggtgctggactgaagcctcaaccctccacttgaggctttcctgcaccacagtccaacctaacaggaggggcgctgcttcggacttagcttctgcccagtgagagagggtctccccgtgactgtgctgccagggaagccacttgacccagatgcccccaaggagggattaagcccgagccccacctctcccttagggacctccgcccaccctaccctcaagccaggatgcccggagcgtccccggaagtgggtgtggttcaggtgatttaactcattatttaatacgcccgcagggtgcgtgtcttgcccccggggccacagcctgcaaggacattatctggacttagtcccctctccgtgatgccgcagctgagtgggtgtctgggctagtcccgcccccacgttgccaatagacgtaatgagtgcgactcaggctgggtccggaacccttcctagtgagcggaggtcccgagctccgctcggcagcgcggccctgggggcgggtctggggtggggctggccctgacggctcacaccagcgccggcttcaagctgccatagctggagttctcggtactgtaggctttcggcacgctgtagatgccccgcaggggcttccagtgcgggccgccccagggcgcctccagcgggcagaagcggtcgagccgccggagcgggtgcagcagggggctgtaggactcctgagccagagacagggctccccggtgcggcatggccgaggtcaccgggctgacgcgcggcacgcggacccgcggtggtcggggcggccgggaggagcgcggacagggcggccgctgcgggccgtggctccagacctggggcgtctcttcgaagctccagtaggtcagggagtccttgcgggggtatccggacagctccgtcctgtgggagcagggcgggatggtgaggatacagctggatccttggggacgagtttcagacctcgggatctaaggagtctgcacattcaaactcctgcatttccaggcgagcaccccttaggaaggacgcgacccggcacgcgttgcctgcgttcctgggtcctcgaggtacttaacgtcctggaaactgagctttcgcatcctagggaagtaaaaggggactttcgcttccttgggaaggagtatctgggggctcaagtaccgaaggaggccctgccctcagatccggaatcccctcgagccgctgtgcaggcttcctgtccctaccgcggttcctgagaggtgacactaaggactcctgggtgcttaaaaaaaaaagggaggggctgaggcctgaactttggttcttgctgctacagaagtcgaggctgagaccaccggctcagggaatgggagccagcccaggggctcggcgtgcaccggccacggcgggggctgtgcaggaggcggtgccgagcgagagcccggcttacttgggatagaaccgaaagtcccgcgccgaggtggtcagatagagctggcggcggtccaggacgccccggtcggatactgtgaaaggccggccagacagctcggggttcttcgtccaggcaattagagcctgagcaagattgggggaggaggcatacccaagacatagatttcataccccatcccaagccctgggtcccgagttcagaatccctctccttcggcctcgacagccatgacggccacggccctcacaccccgccccagggttagagcccttcctgccacccacgccagggaacttcagcttcctttctcatacccgaacccttcccagcctcacctccctaaatccaagcaccttctgctgttcaaggaactcaaacccaagcccccagccaccaaaaacaacctccctggttccgctctgtcttaaaccgtcttggtgtggccactggagctgagctgcatcttgggcagcaactccaagttacctctcccaactcccacctgaccccgtctcagaatattctagtctcctccccacccacagcccgccgtctagctccgcagcagcttaggagccctgaaggtgagtttgtagtccctggtccttctggcctggcctaatgcccagcccctcccccggctcctctaacctcgcgatcccgccccagaccctttagccacgccccaaagccgtgattccttctggccccgccccaggctcccggagctccgccccgtctcgccggcgccggcttccacccagacacctgggaaggacccccgcggtggtggtctgcgagttgtgggggctggggcccgaagtattccggggcgcgcgggtccccgctgggagagccagtgtactgcgccctcgtctcgctgctctggtactttgtggtcagtgggaggcgccagccgcggtgtctgagctgcggaaaggcgacccagagactcacgtgaaggagcaggggactcaaatgcagtcccccgccctgtcccctgcggactccggcactccccaaactttaccttttctcctaaatccttgatccccacagtccgcgtggggtctgcaggctctggggctctgggctgggcgcagggcccgccatgggtcttgggcacgtaggccgagccagaggttgtctcccatctgctgaggacctcgtcgaaagcccagttgtgagaatcctgctttgcaacttggggtagagggtccgcgaccgtggactggagagaaggcgccgcacatcagctagaaagactcaggagtccctatcaccccccaccccaaactctgacctcttccagtcggcccccagccctttcctctgcagtccctggcattcagcttccctggtgcctcctctctcagacccagaactccaggaccctcctccttcagagaggagtccaagctcccaatccgctttatttagcccctatctttctgggtctccaggcccggcagggctgcagcgtagggtccgctcacctgcaccgtgggcggggtgaagggtatgggtgggataatgcggtgggaaaagtagctgctggtgagatggcagttgggcctggatccaggtacctcggttgcagagatacgacagcccggagccagggtgccactggccatggttccacccccactccgtagccaagcaggagctggcttattgtggttgttgccccaggtgacagaacccgcccacccagaacctagtcaatcaagggcctgcaggcacctggatggatggaatgagaaagagacccagagacagggaccccaagaggggtacaaagaaacacaaggagggggaatggagactcaaagataggagggtggaaagggaaggagaagttcagtatttcagagacccagggggtgggggagagagaaacccaaaaagagggacagggacctggaggtgtcagagatccagacagagagacagagacccctgcgctgcacctagcaactcaggacatccatgagaaacacccccctttcttccagggcccagatgctcctggctgcttcctccctctaccaggcctgcccacctcagggtaacgatttccatacatccccggggctccccgaccctccctgcatgcacgtgctgaagtaatcagcactagcattggctgtcctgcctgcctttgattggcttgaaaagttccacctgggtaggcggggtgtggaaacagggaggcacccacagagaagtgcaccggaccatagcgaaaaacatgggctttgatgagtgagaaagaaatacaagagaggagagagacagggaggaagacacagaccacgctggaaacggagctattagtactcacccagaggctagagccaccggaagttagagacagagagaaaggcggcaaaaaagagcaaaatcagagatggtaacaaggagatgtagaaacggaggcagccacacccctccctgccgaggggcctggtctgtacagattggtggagggggtgcctatgtcctttgctcaaagctggacctgagagagagagagggggagagaaagtgagagagagagagtgtgtgtgtgtgtctgtgtctgtgtgttggcaacacatgtggggagatgggtaataggtaaagggctattgtgaagtcctgtggtctgtcccagacagagagaaagagagagagagagagagagacagagtgtgtgtgtgtgtgtgtgtctgtctgtgtgttggcaacacatgtggggagatgggtaataggtgaagggctattgtgaagtcctgtggaccagagagagagagagagagtgagtgtgtgtgtgtctgtatgtctgtgtgttggcaacacatgtagggagatgggtaataggggtcataggtgaagggctactgtgaactcctgtggtctgtccctggcttcccttgtcatttcttcaccatatagagcttttggtcaccgggcacgatgactcactcctgtaatcccagcactttgagaggcagaggcgggcagataacttgaggttaggagtttgaaaccagcctggccaacatggcaaaaccctgtctctatcgaaaaatataaaaagtagccaggcatggtggcgcacacctgtaatcccaactaaggcaggagaatcacttgaactcaggaggtgaaggtggcagtgagctgagatcatgccactgcactccagcctaggggacagagcaagactccatctcaaaaaaaaaaaaaaaaatagcttttggtctaggcctctgcctcctcaaccctcattatctcatcccacgagcccattcttcagacaaggaaacctgaggctgccttctgcagccaggcccacaatcccacttactgttcctccctgaatcatgcttctggggcccttctgttggattttgctgaccctactcaagggctctcaatgacgaataaccccctgatcctagccagggggacggcgagttagtcagaacctcatgtcccactcaaactggacaattttttttttttttgagacggactttccctctttttgcccaggctggagtgcaatggcacagtctccgctcactgcaacctccgcctcccgggttcaagcgattctcctgcctcaccctccagagtagctgggattacaggcacccgcctacacgcccagctaatttctttatgtaattttagtagagacggggtttcaccatgttaaccaggctggtcttgaactcctaacctcaggtgattcgcctgtcttggcctctcaaagtgctgggattacaggcatcagccatcgcacctggccatcaagctggaaaattttaaggtctgtttctttcccaatgtagagtaaagttgcgatgtcatcccccgaccccacactgttttctaccagagttctcatactgtgactctgtataaaatggtttggaagctggacccatcctgtgtgtgtgtggttgccctgagcccacagaaagacacctccagagtgcggattgagaagcctttattgtgggaggatcggggtgtccgagggccccgggagtcgggatggrcttggaaggctsgggggaggggcctttgaggaagaggagtcctggaagcgggggtcatcacaggtcaaggggtggtccttgggacccccgcagtcagtggtgctgcggcggcagagtgcacattgacagctgagagccacggcgtaggagaccacggggttcacgccgcgcgggcagccagggagccggatggactcgaagcgcacatcgcggtagttgcacaccacctgaggcagggccggcaggaccccctgcagcacgcgggtctggaagccgtgtgagtgggagaatgagcatgtgcctggggccagcgcctcagctgagctccccagctgcccccacaggtctcagactcaggggtccaggaagccctctgttcctgccctcccacaccccattccgcagcccctgaccagagaggcagaccacccttcctcccccgctgcctctgtgggtctggccctgaggtggcagcacctgccccggccccgggcagctcaccatggtggggcagtagccggcacagatggtggtgttgacggtgatgcacacggggcagccctccttctccacagccagggtggcattgatggggcggcaccgtggccgaagcggctccttggatgcccatgtcccgcccatgctcagcagcagcaacagcagcagcccctgggacaaggacactgcttcacccgggtctgagaccgcagccccgagtcctggccttcccatcccgcgtggtacaccacccacaaagacccagagacccttcccggcatctcctattcaggacccaccacccggacacctgcctttcagagcccaccccacagcccagaggacctgagataccccaacatttcagatccgcaccttcaggaaatgccccacctgaagcttactgggggtcacgctcctccagaaagaggcctccttccacagctcacactggtctgaccccttctcatgccagtgattgcctggaaggaggtggaaggtgcccaggggccctgcagtcttacctggaacatctccatccttggtgcgtcccctgcctcgtgtacctggctttatacctcggggttgtgggggcggcaaggccaccaggaggttggtaggatgctggggtgagctcgacactaacccctcggggggcaagaggtagacaaggccaggggggcgcaggagtggctcagcggagcgccccagccctctcccctcagtggtccagcgccaagggtgaggcggagaccacggtgaagtgacctcagagactcagtcgtcgagtgctagggactagtcgaggctggaggcacagggagtagggtgtaggaaggcctgcctctgcctatggtggggtcttggaagccaggaggaggccgtgacccgagcaaagtgctggactgaagcctcaaccctcctctacttgaggctttcctgcaccacagtccaacctcccaggaggggcgcggcttcggacttagcttctgcccaatgagagagggcctccccgtgactgtgctgccagggaagccacttgaccctggtgccccccaacgagggattcagcccgagccccacctctcccttagggacctccgcccaccctaccctcaagccaggatgcccggagcggtccccggaaatgcgtgtgcttcaggtgatttaactgattattgaataggcccgcagggggtgtgtcctgcccgcggggccgcagcctcggaggacattatctggacttagtcccttccccgcgatgccatcaagctggacaattttaaggtctgtttctttcccartgtagggtataggttggcacagggaagagggctagaaacctgacttgagctccccrcccagggctgaactctccagcatcctgatcacttctcattgaaccttgcttatactccccgtgtgatcggtagctctttatctcaaaacagaatattctaagccaacccctgccygctctcaccaagtaagatttctcatttgaaccccagctcccagatacttaaaggccttctgtagaccatgtcctcaaggtcccctggccatctgcttgcatgttccagtttcyctcctcccccatgcacatcgtgaaatgtgccctcccactccccaggatgagcaaggtggtgtcctctgtgactgagcagtcagcaacttaacaccaaaggtcaccaatgatcaaatccatgagagttgatccgaggagttatgtattagggctacgaaagagtaaacactcagtaaatagtggctattattattatcatcatcatcatcatcatcatgattaccctcaagttcccctgggagagctcctattcaaccttcaaaaccacatgtggtggcacccatcctgcagagattgagctcaaattcagagagttgtgattttgtgatgatttgatgagttccccaactggggtccgtccgtagagcagctgggccaaccctgaggtctctcagcatccagctctgttctttttctgcctgaccagttcctgggtataagtctcaggcccggccagtccggctgaggagtgtgcagacacaggctgtgccartttgaatccatcgccagtccacacggccctgggcatcagcggtcaatgcccgcacataggactgcttggccttgcactcagacacccagtgccccccggtccacaccccggcggcagcccctccacctacccccgggccaccttcctcagatttatcggcctcgaagygggcaacaaagaagtgctggcggagggaactgccgacagctgcaggcacctcgcccaacacctccacctcgagcacacccaagtccacagcagtccaggggtctgtcacccagacactgactgcatcgcacacggccagctcaccctgatgactcgccggtgaagtatcgctcacccctcgctggctgcggttggcccgggcgcctgctgactcccgaaaggctccagtctccagcaggaagaccagagggggcccggcagcggcacccctagacaggaccactcgggggaaaagaaggtcccactctggaggaggaaaaggcgacaatgtcgaggatggggttaggactccattgacacactggggaggaggaaaatgagggggatgcggagggagcctgggggagtgggagcatctctcagagcatctctcagagcacacggagacagggaaaaggaggctggggttagagaagaggataaacacttcagtggggtcagaagttggaaaccccaggggaggcctgcctgccaggattatggggaagcccttgctctagaagtttgggggactccatatataggacttgcatcacacccaacttgtagattaataataaatattcaacaactacaggtcaggcactatggctcacacctgtaatcccagcactttgggaggctgaggcgggtggatgacttgaggtcaggagttcgagagcagcctggccaacactgtgaaacaacatctctactgataataccaaaattagccaggcctggtgctgcacgcctgtgatctcagctactcaggaggctgaggcaggagaatcgcttgaacccgggaggccgagattgcagtgagccaagatggtgccactgcacttccgcctggacaacagagtgagactctgtctcacaaaaaaaataaaaataaaaataaggccgggcatggtggctcacacttgtaatgccagcattgtcggaggctgcagtgggtggatcagctgaggtgaggagttccagaccagcctgaccaacatagagaaaccgcacctctactaaaaatacaaaatatcctccagcgtggtgctgcatgcttataatcccagctacttgggaggctaaggcaggagaatcacttgatcccaggaggcagaggttgcagtgagccaagatcgcgccattgcacttcagcttgggcaacaaaaacaaagctccatcttaaaaaaataataataataatcataaaataaagataaaaatgttcggccgggtgcagtggttcacgcctgcaatcccagcgctttgggaggccgaggtgggtgcatcacctgaggtcaagactttgagaccagcctggccaacatggtgaatccctgtctctactaaaaaaaaaacacaaaaattagctgggtatggtggtgcgcacctgtactcccagctactcaggaggctgaggcaggagaatcgcttggacccatgaagcagaggtgtagtgagccgagagcgcgccactgcactccagcctaggtgacagggccagactccgtctcaaaaaaaataaaaataaaaataaaataaaaataaaagtagaaaatattcaactactattactcaatagcaacagatggtaaaatacaggctcagagaaattaatgatttgtgcctggtcacacagccaacaaatggcagagatgggacttcacctctgggcaactgcactctgctatccttcctgtagaactctgaggaaccgagggtcttgcaccctggaggatgttccaatcaatttttttttgagggggtgtctcacttgtcgcccaggctggactgcagtggcgcgatctcggctaactgcaggtccacctcccgggtttacaccactctcctgcctcagcctcccgagtagctgggactacaggcacccaccactatgcctggctaatttgttgtattttttagtagagacggggtttccccgtgttagccaggatggtcttgatctcctgaccttgtgatctgcctgcctcggcctcccaaagtgctgggattacaggcatgagccactgcacccggcccaatttttttttttttttttttgagacagagcctcactctgtctggccaggctggagtacagtggcacaatcctggctcactgtagcgcctgcctcctgggttcaagtgactctcctgcctcagccttctgagtaactggaattacaagcgcctgccaccgtgccctgctaatttttgtatttttagtagagatgcagtttcacaacattggccagactggtctcaaactcccaacctccagtgatactcctgccctggcctcccagagtgctgggattataggcctgagaaaccacgcctggccccaaacaaattgctttaagacgaggtctccctatgtttccccactgcacttgaactcctgggctcaagccatcctcctgctgtggctcctgagtagctgggactacagactcaagccaccacgcctggccacattccacaatttagagaaagtgcacaacctggaatcctagggagaccccgattcacctcaaaactgccactaaggaggtaaaacgctgcccctctgaggcaggcttcagtttccctgtgtgtgaaattgacctggcgctgggagaggctggtggaggcgcggattttgcagtttccctacaacattctggaagcctgtggttctgggaaaggttggcgtggagaagactgggaaacaaccagtggtcaccagagctgtagcacctcctccacctccgagctctggggctgggaaccccaggcttcggggcccctgtggaggacgcaggtggccccctctttcctgacatctcaggagagggaggggcaaccggctagcagaagaaaagcacaggaaggttatacagccaggtggggaaggggccaaatccctgaacaaccccttcccagagttcctcttcaagtgcagggtacccaagagtcaaggccccgccccctttccagaggccccttttctacccaggtgatgggtcctagctgggatgggaggcagatggacggaggggaggggggaggaggggaagggagaggcagtggatgaaggaggatggaagagatgacatccccctcggcccattcatcccattcaggtccccaagccgcgcccctctccgccccacctgcactgccagtgccaacatcagagggaggaagagggagctcggcttagaaggctgaggccctgccacctgggccacaccgatcacgtggccttccttctccccacagaaggccagaccatggacacctcctgagctggaggtcatcctgcatctccaccctgttttctttttctttctttctttctttttttttttttttttgagatggagtctcgctctgtcgtggaggctggagtgcagtggcgcgatctctgctcactgcaagctccccctcctaggttcactccattctcctgcctcagccttccaagtagcttggactacaggggcccgcgaccaagcccagataagtttttgtatttttagtagagacggggtttcaccgtgttagccaggaaggtctcgatcccctgaccacatgatccgcccgcctgggcctcccaaagtggtgggattacaggagcgcagcaccacgcccagctaattttggtattaacagtagagatgttgtttcacagtgttggccaggctgcttttgaactcctgacctcaagtcaaacacccgcctcagcctcccaaagtgctgggaccacaggtgtgagccatagtgcctgacctgtagttgttgaatatttattattaatctacaagttgggtgtgatgcaagtcccatacatggagtcccccaaacttctagagcaagggcttccccataatcctggcaggcaggcctcccctggggttcccaacttctgacctcactgaagtgtttatcctcttctctaatcccagcctccttttccctgtttccatgtcctctgagagatgctcccgctcccccaggctccctctgcatccccctcatttgcttcctccccagtgtgtcaatggagtcctaacccccacccttgacattgtccccttttcctcctccagagtgggaccttattttcccccaagtggtcctgtctaggggtgccgctgccgggccccctctggtcttcctgctggagactggggccttttgggagtcagcaggcacccgggccaaccgcagccagcgaggggtgagcgatacttcaccggcgagtcatcagggtgagctggccgtgtgcgatgcagtcagtgtctgggtgacagacccccggaccgctgtggacttggttgtgctcgaggtggaggtgttgggtgaggtgcctgcagctggcagcagttccctccaccaacacttctttgtcacctgcttcaaggccgataactctgaagaaggtggcccaggggtaggtggaggggctgccgctggggtgtggaccggggggcactgggtgtctgagtgcaaggccaagcagtcctatgtgcgggcattgaccgctgatgcccagggccgtgtggactggcgatggattcaaactggcacagcctgtgtctgcacactcctcagccggactggccgggcctgagacttatacccaggaactggtcaggcagaaaaagaacagagctggatgctgagagacctcagggttggcccagctgctctacggacggaccccagttggggaactcatcaaatcatcgcaaaatcacaactctctgaatttgagctcaatctctgtaggatgggtgcaacaacgtggggttttgaaggttgaataggagctctcccaggggaacttgagggtaatcatgatgatgatgataataataatagccactatttactgagtgtttactctttcgtagccctaatacataactcctcggatcaactctcatggatttgatcattggtgacctttggtgttaagttgctgactgctcagtcacagaggacaccaccttgctcatcctggggagtgggagggcacatttcacgatgtgcatgggggaggagggaaactggaacatgcaagcagatggccaggggaccttgaggacatggtctacagaaggcctttaagtatctgggagctggggttcaaatgagaaatcttacttggtgagagtgggcaggggtcggcttagaatattttgttttgagataaagagctaccgatcacacggggagtataagcaaggttcaatgagaagtgatcaggatgctggagagttcagccctgggcggggagctcaagtcaggtttctagccctcttccctgtgccaacctataccctacactgggaaagaaacagaccttaaaattgtccagcttgatggcatcgcggggaagggactaagtccagataatgtcctctgaggctgaggcctcgggggcaggacacacctcctgcgggcctattcaataatcagttaaatcacctgaagcacacgcatttccggggaccgctccgggcatcctggcttgagggtagagtgggcagaggtccctaagggagaggtggggctcgggctgaatccctcgttggcggcaccagggtcaagtggctaacctggcagcacagtcacggggaggccctctctcattgggcagaaactaagtccgaagccgcgcccctcctgggcgaggaggttccacctcctaggttcctgtgattctcctgcctcagcccgagtagtgggacatcccacttgctcccgccattctgtttaccacaggtgacgaccgccatggctgacaggcagggaggtcccccgaggaccgagcaagcctcggtctcccaaaaaaaaaaaagatacattgaagtaatttaaaaacacttaggaagatgtcatttcttcctatcaaggcgtcctccctttatgttttgttattatatagggaacgataaaaaaatttttttctcaaccaatgtggacccggttggcctcgaactcgtaccctcgaaccctcccctccctgaggg

SEQ ID NO: 97051 - DNA, 12615 bp, Homo sapiens
cgcgggctgggggcggcagacaggcagccggcacgctcgcttgtttttcctattggagagttgctcgctctccgggcaggaaacctggaaatgggggcggttttgggggacagcggcgagggaggggcccgcgctttgtaccagcgcccccagatgtcgcacccgtgggcgttctcccctggcggccgctccgtgcccgtggagtgcgcacctagaatacgcgcccgcgcccacatgtgggatgctttgatggactgccgtgagcccagaccttaaacgtaaacattcagcttcgcaggtactttgggctgcacacgcttctccggacccaaaagatgcacatgcttttcagaaaccgtaaggtttacctggggctgtaaaaccgcacatcgcgactttgcaccgtgcacacgcttgccccgatgtgagatttcccctgggttcgcgctcgggtccgcttcttaaatacactgcctcagcggtgtggatggcacagagctgtggcagccctactgaaaccttaaacaggcttcctggggtcataaacatggataccgagacttagatcacctcccacaacttaaacgtaccccttcactccactgccttcgccccttcctgcagcattcgcatctagttgttcaaaagtgctttccgggtcctcagacatgcaccccaaggttttaaacctcagtgcaagtactagatgggcttccctgtgcaatagggatgtcaggcgcgcagttttgcacacgattgccaagatgtgagatttactttaggttgcaccttaaccgtcgtttttaaatatgatcgtcccatcttgatgtgctgctcctgctgtggaaggtatccctgggttttaggcaagcatatgtgttctttactatggctccagatcccagcatatttgaagtcctgagtcaacctgctctcctagacaagcagacattaagtatgtcgcttgggctcttaagtgcgttctcctgacttttacccatctttgtggcagtaaatgcatacgtgtcactgtatatgcggactagatacctcaggtcccagcgccataaacaacttgtatgttgtaagtgtaccctcatctcgaaagtcacctccagctgtgcgttttaactcatctcagatgctggatgtccggtatggtgcctgaagcccccggggcaacatccactctctgtccaactcattctaacgccaagatactcaggttttctatctgatcttctgacgactgcccaaaagtcagaatcacctgcgtgggtgaagaatcacctgcgtgggtggagaatcacctgcgtgggtggagagcaagtttgttcaggtttttctctttttaagcactcacaaaataaaattttttgtgtttgctagtattctggaaggaaagatctccttgtgcttcatagaaaatttggaaaatacctgtttgtaataagataaaaataaatcacccttataatttgttttcccccgcctggaggcgcctattacggggaaactctcgtgggtttcctgctgccaggctgtttgcggagctttcccttgtttgctttgagatgtttttggttttaaaaaacaataagtgaggtcaggcttggtggccctcgtctgtaatcccagcactttgggaggccgaggcgggcggatcacttgaggtcaggagttcgagaccagtctggccaacatggtgaaaccccatctctactaaaaaaaaaaaaaaaaaaaaaattagccgggcatgatggcgcggcttgcagtgagcgaggttgcagtgagctgagatcgcaccactgcactccagtctgggaaatgagtgaaactctgtctcaaaaaaaaaatagtaataaaaatagtggggagagtgcctgtgagtagcatttgtggcgttgcttggctttattgctagaactttctcttggtgttctacatgttttggtctgtgagacccctctgggggtggtgtcccagctgtcttccaaatgtttcccccttttcctcgctgtctttctcctggatggtttagtcccctctgtgtttcttgtcatctccttcctgcctccccccggggtcagacttataaggccagagaggtgggcactggcctgagccagaggaaggaattgaactttgggatgacagggagctttaggagagtttcagcctgggaaagacagggcaagctggtgtgtgggacagacacagcgcaagccggcttgtgcctgtggaggctgcaaggaagccctgggcccagcctggggcacggggaaagccccctacagctggcttctaacttgggtctcaagaatcgatcaggcgcacagctggggcaaaggctggaggtggggctggctgaaggcttcaggactctgctgggccagtgtcaaggtgacagcaggctctgggaaggaagggtcctgagggtgggcagcgggaaaggacatgaggaccagcgtgtgggggtcctgaggggtgagcagagggtttggacatggccccgtgggcttccagcaggggatttggggctgaatattgggacgtcccctctggggtgtgtggggactgcctgtccttgcaggccccggcctcagttttcccacctatcccccactccattgcaggaaggtgctcgggtcttcggggcactgggtcccatcggtccctcctcacctgggctcaccctcgggggtctggccgtgagcgagcaccggctcagcaacaagctgctggcttggagcggcgtcctcgagtggcaggaggtgagtctctgtggggctgcggctggcctccagggtcttgtcttgtccctgcggggacaggccagggcatctaggctgtgcacagtgacgcccctcctgcccccacagaagcgcagaccctactctgactccactgcaaagctgaagcggaccctgccctgccaagcctacgtgaaccaaggcgagaacctgtgagtgccggggcgtggcagccagggcggtggcaggggcagtggctgtggccgtggggatcagggcagccctttctgaccagctccttcccatagggagaccgaccagtggccgcagaagctgatcatgcagctgatccctcagcagctgctggtgagacccgcccctcccaccccacccactctgagcacccccatgcctggctgacccagctgtctgtcctgtcgcccccagaccaccctgggccccctgttccggaactcccagttggcacagttccacttcaccaacagagactgcgactcgctcaaggggctctgccgcatcatgggcaacggcttcgtgagtggggcgggctcccttgtagcactgtggtgacaagtacagctggaggcagcgctctgctcacacagtccaggcgggggtcggggggtctcccctggggccgagggtagccctcgtggcctctcggaccccatctggaaatgactgactccaggcaccctccgtagagcacagggtgaaggaactcagcctgagaggcctccagtttctgcatctgtgcccagcttcgaggtggccctgggggcgtgagtgcagggagggactggggccagccctgttggggcccaggagcctgtcggggacacatagcgtatggcagggacctggtaaatgggtgtgctaggcacaagagccagccaggagggagtggcacgttggggcttggtattctggtctgtaaaatgggctaacctccccgagtggcctgagctggccgtgagggagcagagctgagggtgctgaagcaggcgcggtgagtaggtcctcaggcctggctccaaggggacccaggtatccagccagtggctgtgcagggactgagtggggcaggcgcggccatgacctggacccggggggctgccaagggatctgagagcggcttccgcagcactccagggttgggctggttgaggggtagagatgacattttctgaggtagggaggacaggggagccgtgcttcctagggccaccgggaggctggagggagggaatttgtgtaaagcgcttgagatggtgactttagtacctagtgagtgctgggtgaacccagctggtgaggctgttcaggtgactgagattctggcgcagggcaggtcagaaagggggcttgggctgtgaaagatggcaggtgctggagaggaggcaggggtggggtgggagcgagttgtctgcccagaggacctggctctgggacattcccagtccctgttccctgttgggacagtctgcctctacccgtcccagctgccgttgagcgccctgggttccgctagggcctcccttctccctcaggagaccaggggcagaccagggcttgtgcctggcatgaggtctcttaagtgacccgttcccccttcacccagcaccgtttgttgagggcctgccatatctgggccccgagtacccagtctgtagggaaagtggacatccatactcaccccccaggcatggccctgggaggctgactgtgcatggctccagggaggccagggacagggccctgagcgggtgatccctgggctggacaccaaggttgagaagttaggccggcagcgtggaggggacagcactgtgggggtggcccggtgtggggaggggacatggggttttgggacggtcacaccacttcatctagacaccacagccaggcacatctgtcaggcttagttctcccatgcgccatcctcaagaggcaccagcactttatctgttgagcctttatgtggcaccaactgtgtgcactattacccggttttacagatgatggaggcccagaagcaggaggtggctggtgttaggtcacacagctaggaggcagcagaacggtggggcgctgcctgtgctcttaacccccaggccaagtcaccccatcaggcagtcaggagggctggcggcagggggtgatgtgggtgggaggtagtgccttcttggcattctcaccgcagcctgggtgccgggtgccactctgacctcagccatggcagggtcgggggatgccgatgggcgctgcacgggctctcagaggcccctcacctatggccatggccttgactgtgggggcctctgtccaccgatgatctcccttcatcccctacaggtggggcggtccagggtggtgggggcacagtggccccgggcagtgaccacagggtcctgacccgcggcccccgcaggcgggctgcatgctgttcccccacatctccccctgtgaggtgcgcgtgctcatgctcctgtactcgtccaagaagaagatcttcatgggcctcatcccctacgaccagagcggcttcgtcagtgccatccggcaggtcatcaccacccgcaagcaggtgtgccagccaagcacagcccctctggggacagagggggattagaccccactgccctggttgggcagccagacttggtgtgggcggagtgtgatgcgatggctggagcaaggagctgcaggggagcccggaggatgccgggcgggttcccaccagggctccatggaaaagcggccactgggcggctctgcagggctggagggtgggtcttggcgcggcggcagggaagccagcggagcggggagctgggcaggggttgggatcgtcctgcggctggaaggccctgcctggtaaccacgtgtcctggtcatgccttgccagttgaggcagactctgcaggtcctgtgcaccaggtgagggccgggacctgtctcaggccactggggagccatggggggctgtgagcagatgaggggcagggcctgttcccctgggactagagaatggacccagctggggctaacaggccaaggctcggagggagggatggcaggccccaggacagacagacaggtttcccaggagcctgggcccctcttcccaccccgttcccttccaacaggcagtgggacctggtggtgtcaactcaggcccagtccagatcgtcaacaacaagtttctggcatggagtggtgtcatggagtggcaggaggtgagcactcggcagcccrgggacttgggacccccagatcctcacggactgtggctgggaggggacactggcattgggggtctccagccctgagggctcctctttgcctctcccccaaaagcccaggcctgagcccaacagtcggtccaagaggtggctgccatcccacgtctacgtgaaccagggggagatcctgtgagtgctgggctggggggtggaggcagcatccaggggagctggggcttcctgaccctcgtccctttgtgccccacaggaggaccgagcaktggccaaggaagctgtacatgcagctyatcccgcagcagctgctggtgaggggctggggccgggtgctggagcctgcacgcagtagctcttccagagggcggggctgggggcaagagcgcctccccaggtggcctgagctggctgtgagggagcggagctgagggtgctgaagcaggtgtggtgggtagctcctcaggcttggcttcaaggggtcccaggcagccagctggtggctgtgcagggactgagcggggcaggggcagccacgacctgcacctggggggctgccaagggatctgagagcggcttccacagcactccagggttgggctggttgagcggtggagatgacgtttcctgaggtagggaggacaggggagtctcagtttggtcctgggcccgggggactcagcgggctgggagccgggaggccgtggtgggagaagccagagctgggggtcccctcgcttccccgcagaccaccctagtgccgctgttccggaactcgcgcctggtccagttccacttcaccaaggacctggagacactgaagagcctgtgccggatcatggacaatggcttcgtgagtggtgccagcagacgcaggggaggggccggccagggcagagcgagcccggaccgctcacgggggcggacatgggagaggaacagagcaccatgtcccagaccagctggggagagagggtggctagtgtgggcgtgacttctgggggctctgtgctgtccccacggcactggatggggcactgaccctggttctgcgggggcctgctcctcctctgccacatcagggctgactcagcaccaactccgcgctctccactcctcagggacaggcgcccttgtcactcctggtttcccgggagcttgtgccacatcccaaaggcccattgctgggcagggagggctgtctgcccccagcaaggtcccagaatatttggcgattgtcttatctgggggaggctcagctgactcctcttctctctctcgggctcagtttctccatctgtgaggtggagaaggttggactttggtgtttctgagccctccccccgatgtccaccttccagctgggccatacttgggtaatatcccgaaactaccttaaaattaccttcgactcagtctgagtaaactgtccacgaagctgttcgtgggtggggggggcctgggtgtaggtgcttttacatgaaagcaatttcaagcattccctcaggggccgggtgcggtggctcacgcctgcaatcccagcactttgggaggccgaggcgggtggatcacctgaggtcaggagtttgagaccagcctggccaacatggtgaaaccccgtctctactaaaaatacaaaaattagccaggcatgatggccactcaggaggctgagtcacaagaatggcttgaacccgggaggcagaggttgcagtgagctgagatcatgccattgtactccagcctgggcgacaagagcgaaactcagtctcaaaaaaaaaaaaaaagtttcctcaaggaaacccagaaaggctccatgtacctcagcccttgcttgtgctgggccggccgctgcagatccctcgggctcctgagttgaagccatggccggttggctcaggtggctgtggtgaggtggccccagacacagcctggcctgcccaggagctctgaaatgcaggttcttgggcccttcccgacagagcctgttggcctttggcccacccattgctcttggccaccgtgtcatcccaataagggggcccacctccagggtgggtggggggtgtgaggacagagcagttaggctgtgcctggctcatggagcccacggcatggtgccgtggttggagggatgctggtccctgtggtgctgtctggtgacaccacgccctgtgcctgccaggccggctgcgtgcacttttcctacaaagcatcgtgtgagatccgcgtgcttatgctcctgtactcttcagagaagaaaatcttcattggcctcatcccccatgaccagggcaactttgtcaacggcatccggcgtgtcattgccaaccagcagcaggtcctgcagcggaacctggagcaggagcaacagcaacgaggggtgaggtggccggcctccagggctgctcagtctccctccacccccgctgcctgctcaccactggcctctgatttctcgccgtagatgggggggtagtggttaccccgggctgggcccctccaggagtcacagatgaggcccccgcagagactggtgagtggtgaccctgtcatgtacaggagggaccctggggcatgtggggggggtggggttgggaaagaagcagggcgaccttggccttggggagagcagagcagagggagaggcagcagtcccagcggtcctaggctgtcgggaaactgcagcccagcctcagggccatgggaggtggtatccaggcctgggtggggccaggcctctgctcacagggatgtggggtcagtgcttgggagcctgtggccagcagcccccactgcacccctgcccccaggtgacacgcttctgagcaggggcccctggggacttcaactgcccagcaacatggaggatggtgtcctgaggcctccaaggacggtccccacccctctacgtttccccaataaagccttttaaaaacctgcctgccttctctgctcactgcccgatgccttgcagccccctagctctaaggtggcccagcaggctggacagcccgggaactcactgggtctggctctcggctgtccacaccctcttcccccccgaatctccagacccgcaggccttgggttcaagttcagtgtcacagaacctgagctggattttgtcctcaggggtcacacctggccttgagccagcccctcggttgaggctcgtgggctcaccagctggctctcggggggccacacagcgccctccctgtgtgttccccggctaatgtctaaagtgctcatgccaggtcccagctggactcccctcggtagggccccaccttttgttacctgaaaatgtccttaaagcctcctccatgtaagaaactggcaggcctggagcccctcccccgtggggaccaccctccttccagcaaaatgccggccaagctcaaggagaaacagcgtttattgtggaggggagctgggcggggctcagccctcggagaactggcagtacagccgccccagcctcggctccacccatagccggaacgggatctccaggatggcagagaagccttcagccagcgttggggcctcgaactgcttcctggcagtggtgggaacagtgagggacagcctggatcatgtggcccagccagtgcccctgccccctgctatccccaacagtacctgtagccatacatgaccatgtctgacacggggatatgagaggagtccgtcatctctcgaaactgtggggaacatcagaggggcggcaggcccaggggtcaggggaggaggggggtcagggggtgcagcccggggggtgtccgggctgagcgggctcacccggttgttgtggcgcgcctgctccagagtggcggtgaagaggaagcagcggcaggggacgcccgcggctcgggcacactggacgtacctgtgggggaaggagctggatgtgcaggccccgcccaccccgccgcaggccacctacggccccgcggtcacgctacctggcgcggctcgcggcgtctgggtttgtgttgtcgatggcgacccgtttcccttgcttcagggctgtctcacacgtggtcacacagcgctgccaggagcctagcgtgtcctggggacacgagaggtcacaaacagatcggcagacccagggggagagaagaccccgagcggggacggggaggcaatgatggaggaaagccgccccaaaccagttgagaggtggagatgggaactttataatagatttggggcggcaaaagcctggtcataccctgttcacgtggacatatccggccgacacgaggtgcttcttgagaaaggtggacttcccggctgtgtggggggcagtgtcggtgggtggcctaggacccaggcggggctcagggcacgcgcacaggaacaggacacttacccccagggaatcccactgcgacaaccacctccgggctggcgctcaggagggccctggactcggggaggcagagaggccctgagcgggagacagtcctctgcgaggggcgggggacacgcgtgagatgccgtccccatccccgggagccctcccatccccacccccacccccgccccagggcctcaccggatcaaaggctgggagctcgaagccggctgctggccacttgagaaagaactcctcaggcgtggcgaagggcaggccaaggttgagggcaaactaggggttgaggacgaacatcagacacaggccagggtcgggctcgggcgcggggcagggggcaggggcctcaccaggcgatcggcgcaggagaagtctttcttcttccgccccggggcccagttggccgggcgtccggctgcgtctggaacacacgggacaccccgttcccaccagctcggagggaggcgtcccagcccaccctcagcagcctccaggcccttacctcccacaaagatgctgtccccgatggatatgggcgtgccgtcgttggcctacgggagacggtagtgaggaggcccttcccacaaatgtccccccgcagcggtagcgggtccctggggctgcttcgcctggtctgtgccccacatcaggaatcatcccccgacctttcatgtcctcactctccagccactttgcaccgtgctcctggccccctcccccctccgtggtctctccacacagccccctccctccaggtctcccgacttcacctcctcccgttccccacgcggccaccggagggcacccaccctgctacagctccagcctccggcgtgccggcgcctcccaggttccccctccctcagggcaaaagcggggccctccctgtggccctgccctctcccctccctcgcttagagccagccgcatgggcctcgctgtccctaactagcccaggctagggactgcctcagggcctttgcacttgctgtcactcccacaaggggggggaccgctttccccaggtgtccacctggctccctcctttccctgccttaggccttttcctctgatgtcacctcctcagaggccatccctgcccaccacgggtgatgcctgctttctccagctccctccctcctgctgttttacacgccagtctgcccatccgcctagagtcaccgccctcgccgtgagggccctgctggagcaggccgtcccgctcactgataccttcagctcaagaatgcgctaaacttcagaacaaatgcacacacaaacgaatgaacgaaggaatgaacagcttccctactactctgatgtagaaagtctgaaagcactggtctcgtaaaccaacatctaagatgtcacagcaaaaaacagaaggagggagcgagagaggacagaggagtaaggaggccccaaccggaggccggggagcccaggagtgaggggctggagtgaggaaaaggaggggggccgggcaggctgcaagactcacctgctcctgcagatggtcccacatgcccgtcaccggcttccggtacaagcctgcgtgcgtggccaccagcacctgtggatgggagggggccaccagctttagctccccctcaagcacctactggatgccaccccagcccagaatttgtagctgatgatgggttcctatcagcatcacactgcctgaggcctccgccccgcttaccctggagtctaaagccctcgctctggatctctgtgcccccacatagctcccagcctcccttccagccatacctggaaggggacccccagcttctccaccacagcctccaccttggccttgaactcctcggctggcagcttcccgcgcccgatgctcatctggttggtgaagatcaccagctggggagcaaagggtgtcaccagacgctctgctcaccagggccttggtctgactgcggtcggaccgccacgtgcacgtgcccatgcagacaggcggctgcacataccttgtagccctcggcttccagctctcggagcttacggggaatctctgggtacaagatcctacggcaggtatgaagcggcaggggtgacccggggccagaggtggactccaggcctcactcactcccttgttttgcctcttatcacctccagtcactggggccagtgggaaagaccttcccagagcgtgtggtgatgagcgtcccgt

SEQ ID NO: 97052 - DNA, 12348 bp, Homo sapiens
tttcagactttctacatcagagtagtagggaagctgttcattccttcgttcattcgtttgtgtgtgcatttgttctgaagtttagcgcattcttgagctgaaggtatcagtgagcgggacggcctgctccagcagggccctcacggcgagggcggtgactctaggcggatgggcagactggcgtgtaaaacagcaggagggagggagctggagaaagcaggcatcacccgtggtgggcagggatggcctctgaggaggtgacatcagaggaaaaggcctaaggcagggaaaggagggagccaggtggacacctggggaaagcggtccccccccttgtgggagtgacagcaagtgcaaaggccctgaggcagtccctagcctgggctagttagggacagcgaggcccatgcggctggctctaagcgagggaggggagagggcagggccacagggagggccccgcttttgccctgagggagggggaacctgggaggcgccggcacgccggaggctggagctgtagcagggtgggtgccctccggtggccgcgtggggaacgggaggaggtgaagtcgggagacctggagggagggggctgtgtggagagaccacggaggggggagggggccaggagcacggtgcaaagtggctggagagtgaggacatgaaaggtcgggggatgattcctgatgtggggcacagaccaggcgaagcagccccagggacccgctaccgctgcggggggacatttgtgggaagggcctcctcactaccgtctcccgtaggccaacgacggcacgcccatatccatcggggacagcatctttgtgggaggtaagggcctggaggctgctgagggtgggctgggacgcctccctccgagctggtgggaacggggtgtcccgtgtgttccagacgcagccggacgcccggccaactgggccccggggcggaagaagaaagacttctcctgcgccgatcgcctggtgaggcccctgccccctgccccgcgcccgagcccgaccctggcctgtgtctgatgttcgtcctcaacccctagtttgccctcaaccttggcctgcccttcgccacgcctgaggagttctttctcaagtggccagcagccggcttcgagctcccagcctttgatccggtgaggccctggggcgggggtgggggtggggatgggagggctcccggggatggggacggcatctcacgcgtgtcccccgcccctcgcagaggactgtctcccgctcagggcctctctgcctccccgagtccagggccctcctgagcgccagcccggaggtggttgtcgcagtgggattccctgggggtaagtgtcctgttcctgtgcgcgtgccctgagccccgcctgggtcctaggccacccaccgacactgccccccacacagccgggaagtccacctttctcaagaagcacctcgtgtcggccggatatgtccacgtgaacagggtatgaccaggcttttgccgccccaaatctattataaagttcccatctccacctctcaactggtttggggcggctttcctccatcattgcctccccgtccccgctcggggtcttctctccccctgggtctgccgatctgtttgtgacctctcgtgtccccaggacacgctaggctcctggcagcgctgtgtgaccacgtgtgagacagccctgaagcaagggaaacgggtcgccatcgacaacacaaacccagacgccgcgagccgcgccaggtagcgtgaccgcggggccgtaggtggcctgcggcggggtgggcggggcctgcacatccagctccttcccccacaggtacgtccagtgtgcccgagccgcgggcgtcccctgccgctgcttcctcttcaccgccactctggagcaggcgcgccacaacaaccgggtgagcccgctcagcccggacaccccccgggctgcaccccctgacccccctcctcccctgacccctgggcctgccgcccctctgatgttccccacagtttcgagagatgacggactcctctcatatccccgtgtcagacatggtcatgtatggctacaggtactgttggggatagcagggggcaggggcactggctgggccacatgatccaggctgtccctcactgttcccaccactgccaggaagcagttcgaggccccaacgctggctgaaggcttctctgccatcctggagatcccgttccggctatgggtggagccgaggctggggcggctgtactgccagttctccgagggctgagccccgcccagctcccctccacaataaacgctgtttctccttgagcttggccggcattttgctggaaggagggtggtccccacgggggaggggctccaggcctgccagtttcttacatggaggaggctttaaggacattttcaggtaacaaaaggtggggccctaccgaggggagtccagctgggacctggcatgagcactttagacattagccggggaacacacagggagggcgctgtgtggccccccgagagccagctggtgagcccacgagcctcaaccgaggggctggctcaaggccaggtgtgacccctgaggacaaaatccagctcaggttctgtgacactgaacttgaacccaaggcctgcgggtctggagattcgggggggaagagggtgtggacagccgagagccagacccagtgagttcccgggctgtccagcctgctgggccaccttagagctagggggctgcaaggcatcgggcagtgagcagagaaggcaggcaggtttttaaaaggctttattggggaaacgtagaggggtggggaccgtccttggaggcctcaggacaccatcctccatgttgctgggcagttgaagtccccaggggcccctgctcagaagcgtgtcacctgggggcaggggtgcagtgggggctgctggccacaggctcccaagcactgaccccacatccctgtgagcagaggcctggccccacccaggcctggataccacctcccatggccctgaggctgggctgcagtttcccgacagcctaggaccgctgggactgctgcctctccctctgctctgctctccccaaggccaaggtcgccctgcttctttcccaaccccaccccccccacatgccccagggtccctcctgtacatgacagggtcaccactcaccagtctctgcgggggcctcatctgtgactcctggaggggcccagcccggggtaaccactacccccccatctacggcgagaaatcagaggccagtggtgagcaggcagcgggggtggagggagactgagcagccctggaggccggccacctcacccctcgttgctgttgctcctgctccaggttccgctgcaggacctgctgctggttggcaatgacacgccggatgccgttgacaaagttgccctggtcatgggggatgaggccaatgaagattttcttctctgaagagtacaggagcataagcacgcggatctcacacgatgctttgtaggaaaagtgcacgcagccggcctggcaggcacagggcgtggtgtcaccagacagcaccacagggaccagcatccctccaaccacggcaccatgccgtgggctccatgagccaggcacagcctaactgctctgtcctcacaccccccacccaccctggaggtgggcccccttattgggatgacacggtggccaagagcaatgggtgggccaaaggccaacaggctctgtcgggaagggcccaagaacctgcatttcagagctcctgggcaggccaggctgtgtctggggccacctcaccacagccacctgagccaaccggccatggcttcaactcaggagcccgagggatctgcagcggccggcccagcacaagcaagggctgaggtacatggagcctttctgggtttccttgaggaaactttttttttttttttgagactgagtttcgctcttgtcgcccaggctggagtacaatggcatgatctcagctcactgcaacctctgcctcccgggttcaagccattcttgtgactcagcctcctgagtggccatcatgcctggctaatttttgtatttttagtagagacggggtttcaccatgttggccaggctggtctcaaactcctgacctcaggtgatccacccgcctcggcctcccaaagtgctgggattgcaggcgtgagccaccgcacccggcccctgagggaatgcttgaaattgctttcatgtaaaagcacctacacccaggccccccccacccacgaacagcttcgtggacagtttactcagactgagtcgaaggtaattttaaggtagtttcgggatattacccaagtatggcccagctggaaggtggacatcggggggagggctcagaaacaccaaagtccaaccttctccacctcacagatggagaaactgagcccgagagagagaagaggagtcagctgagcctcccccagataagacaatcgccaaatattctgggaccttgctgggggcagacagccctccctgcccagcaatgggcctttgggatgtggcacaagctcccgggaaaccaggagtgacaagggcgcctgtccctgaggagtggagagcgcggagttggtgctgagtcagccctgatgtggcagaggaggagcaggcccccgcagaaccagggtcagtgccccatccagtgccgtggggacagcacagagcccccagaagtcacgcccacactagccaccctctctccccagctggtctgggacatggtgctctgttcctctcccatgtccgcccccgtgagcggtccgggctcgctctgccctggccggcccctcccctgcgtctgctggcaccactcacgaagccattgtccatgatccggcacaggctcttcagtgtctccaggtccttggtgaagtggaactggaccaggcgcgagttccggaacagcggcactagggtggtctgcggggaagcgaggggacccccagctctggcttctcccaccacggcctcccggctcccagcccgctgagtcccccgggcccaggaccaaactgagactcccctgtcctccctacctcaggaaacgtcatctccaccgctcaaccagcccaaccctggagtgctgtggaagccgctctcagatcccttggcagccccccaggtgcaggtcgtggctgcccctgccccgctcagtccctgcacagccaccagctggctgcctgggaccccttgaagccaagcctgaggagctacccaccacacctgcttcagcaccctcagctccgctccctcacagccagctcaggccacctggggaggcgctcttgcccccagccccgccctctggaagagctactgcgtgcaggctccagcacccggccccagcccctcaccagcagctgctgcgggatgagctgcatgtacagcttccttggccactgctcggtcctcctgtggggcacaaagggacgagggtcaggaagccccagctcccctggatgctgcctccaccccccagcccagcactcacaggatctccccctggttcacgtagacgtgggatggcagccacctcttggaccgactgttgggctcaggcctgggcttttgggggagaggcaaagaggagccctcagggctggagacccccaatgccagtgtcccctcccagccacagtccgtgaggatctgggggtcccaagtccctgggctgccgagtgctcacctcctgccactccatgacaccactccatgccagaaacttgttgttgacgatctggactgggcctgagttgacaccaccaggtcccactgcctgttggaagggaacggggtgggaagaggggcccaggctcctgggaaacctgtctgtctgtcctggggcctgccatccctccctccgagccttggcctgttagccccagctgggtccattctctagtcccaggggaacaggccctgcccctcatctgctcacagccccccatggctccccagtggcctgagacaggtcccggccctcacctggtgcacaggacctgcagagtctgcctcaactggcaaggcatgaccaggacacgtggttaccaggcagggccttccagccgcaggacgatcccaacccctgcccagctccccgctccgctggcttccctgccgccgcgccaagacccaccctccagccctgcagagccgcccagtggccgcttttccatggagccctggtgggaaccmgcccggcatcctccgggctcccctgcagctccttgctccagccatcgcatcacactccgcccacaccaagtctggctgcccaaccagggcagtggggtctaatccccctctgtccccagaggggctgtgcttggctggcacacctgcttgcgggtggtgatgacctgccggatggcactgacgaagccgctctggtcgtaggggatgaggcccatgaagatcttcttcttggacgagtacaggagcatgagcacgcgcacctcacagggggagatgtgggggaacagcatgcagcccgcctgcgggggccgcgggtcaggaccctgtggtcactgcccggggccactgtgcccccaccaccctggaccgccccacctgtaggggatgaagggagatcatcggtggacagaggcccccacagtcaaggccatggccataggtgaggggcctctgagagcccgtgcagcgcccatcggcatcccccgaccctgccatggctgaggtcagagtggcacccggcacccaggctgcggtgagaatgccaagaaggcactacctcccacccacatcaccccctgccgccagccctcctgactgcctgatggggtgacttggcctgggggttaagagcacaggcagcgccccaccgttctgctgcctcctagctgtgtgacctaacaccagccacctcctgcttctgggcctccatcatctgtaaaaccgggtaatagtgcacacagttggtgccacataaaggctcaacagataaagtgctggtgcctcttgaggatggcgcatgggagaactaagcctgacagatgtgcctggctgtggtgtctagatgaagtggtgtgaccgtcccaaaaccccatgtcccctccccacaccgggccacccccacagtgctgtcccctccacgctgccggcctaacttctcaaccttggtgtccagcccagggatcacccgctcagggccctgtccctggcctccctggagccatgcacagtcagcctcccagggccatgcctggggggtgagtatggatgtccactttccctacagactgggtactcggggcccagatatggcaggccctcaacaaacggtgctgggtgaagggggaacgggtcacttaagagacctcatgccaggcacaagccctggtctgcccctggtctcctgagggagaagggaggccctagcggaacccagggcgctcaacggcagctgggacgggtagaggcagactgtcccaacagggaacagggactgggaatgtcccagagccaggtcctctgggcagacaactcgctcccaccccacccctgcctcctctccagcacctgccatctttcacagcccaagccccctttctgacctgccctgcgccagaatctcagtcacctgaacagcctcaccagctgggttcacccagcactcactaggtactaaagtcaccatctcaagcgctttacacaaattccctccctccagcctcccggtggccctaggaagcacggctcccctgtcctccctacctcagaaaatgtcatctctacccctcaaccagcccaaccctggagtgctgcggaagccgctctcagatcccttggcagccccccgggtccaggtcatggccgcgcctgccccactcagtccctgcacagccactggctggatacctgggtccccttggagccaggcctgaggacctactcaccgcgcctgcttcagcaccctcagctctgctccctcacggccagctcaggccactcggggaggttagcccattttacagaccagaataccaagccccaacgtgccactccctcctggctggctcttgtgcctagcacacccatttaccaggtccctgccatacgctatgtgtccccgacaggctcctgggccccaacagggctggccccagtccctccctgcactcacgcccccagggccacctcgaagctgggcacagatgcagaaactggaggcctctcaggctgagttccttcaccctgtgctctacggagggtgcctggagtcagtcatttccagatggggtccgagaggccacgagggctaccctcggccccaggggagaccccccgacccccgcctggactgtgtgagcagagcgctgcctccagctgtacttgtcaccacagtgctacaagggagcccgccccactcacgaagccgttgcccatgatgcggcagagccccttgagcgagtcgcagtctctgttggtgaagtggaactgtgccaactgggagttccggaacagggggcccagggtggtctgggggcgacaggacagacagctgggtcagccaggcatgggggtgctcagagtgggtggggtgggaggggcgggtctcaccagcagctgctgagggatcagctgcatgatcagcttctgcggccactggtcggtctccctatgggaaggagctggtcagaaagggctgccctgatccccacggccacagccactgcccctgccaccgccctggctgccacgccccggcactcacaggttctcgccttggttcacgtaggcttggcagggcagggtccgcttcagctttgcagtggagtcagagtagggtctgcgcttctgtgggggcaggaggggcgtcactgtgcacagcctagatgccctggcctgtccccgcagggacaagacaagaccctggaggccagccgcagccccacagagactcacctcctgccactcgaggacgccgctccaagccagcagcttgttgctgagccggtgctcgctcacggccagacccccgagggtgagcccaggtgaggagggaccgatgggacccagtgccccgaagacccgagcaccttcctgcaatggagtgggggataggtgggaaaactgaggccggggcctgcaaggacaggcagtccccacacaccccagaggggacgtcccaatattcagccccaaatcccctgctggaagcccacggggccatgtccaaaccctctgctcacccctcaggacccccacacgctggtcctcatgtcctttcccgctgcccaccctcaggacccttccttcccagagcctgctgtcaccttgacactggcccagcagagtcctgaagccttcagccagccccacctccagcctttgccccagctgtgcgcctgatcgattcttgagacccaagttagaagccagctgtagggggctttccccgtgccccaggctgggcccagggcttccttgcagcctccacaggcacaagccggcttgcgctgtgtctgtcccacacaccagcttgccctgtctttcccaggctgaaactctcctaaagctccctgtcatcccaaagttcaattccttcctctggctcaggccagtgcccacctctctggccttataagtctgaccccggggggaggcaggaaggagatgacaagaaacacagaggggactaaaccatccaggagaaagacagcgaggaaaagggggaaacatttggaagacagctgggacaccacccccagaggggtctcacagaccaaaacatgtagaacaccaagagaaagttctagcaataaagccaagcaacgccacaaatgctactcacaggcactctccccactatttttattactattttttttttgagacagagtttcactcatttcccagactggagtgcagtggtgcgatctcagctcactgcaacctcgctcactgcaagccgcgccatcatgcccggctaattttttttttttttttttttttagtagagatggggtttcaccatgttggccagactggtctcgaactcctgacctcaagtgatccgcccgcctcggcctcccaaagtgctgggattacagacgagggccaccaagcctgacctcacttattgttttttaaaaccaaaaacatctcaaagcaaacaagggaaagctccgcaaacagcctggcagcaggaaacccacgagagtttccccgtaataggcgcctccaggcgggggaaaacaaattataagggtgatttatttttatcttattacaaacaggtattttccaaattttctatgaagcacaaggagatctttccttccagaatactagcaaacacaaaaaattttattttgtgagtgcttaaaaagagaaaaacctgaacaaacttgctctccacccacgcaggtgattctccacccacgcaggtgattcttcacccacgcaggtgattctgacttttgggcagtcgtcagaagatcagatagaaaacctgagtatcttggcgttagaatgagttggacagagagtggatgttgccccgggggcttcaggcaccataccggacatccagcatctgagatgagttaaaacgcacagctggaggtgactttcgagatgagggtacacttacaacatacaagttgtttatggcgctgggacctgaggtatctagtccgcatatacagtgacacgtatgcatttactgccacaaagatgggtaaaagtcaggagaacgcacttaagagcccaagcgacatacttaatgtctgcttgtctaggagagcaggttgactcaggacttcaaatatgctgggatctggagccatagtaaagaacacatatgcttgcctaaaacccagggataccttccacagcaggagcagcacatcaagatgggacgatcatatttaaaaacgacggttaaggtgcaacctaaagtaaatctcacatcttggcaatcgtgtgcaaaactgcgcgcctgacatccctattgcacagggaagcccatctagtacttgcactgaggtttaaaaccttggggtgcatgtctgaggacccggaaagcacttttgaacaactagatgcgaatgctgcaggaaggggcgaaggcagtggagtgaaggggtacgtttaagttgtgggaggtgatctaagtctcggtatccatgtttatgaccccaggaagcctgtttaaggtttcagtagggctgccacagctctgtgccatccacaccgctgaggcagtgtatttaagaagcggacccgagcgcgaacccaggggaaatctcacatcggggcaagcgtgtgcacggtgcaaagtcgcgatgtgcggttttacagccccaggtaaaccttacggtttctgaaaagcatgtgcatcttttgggtccggagaagcgtgtgcagcccaaagtacctgcgaagctgaatgtttacgtttaaggtctgggctcacggcagtccatcaaagcatcccacatgtgggcgcgggcgcgtattctaggtgcgcactccacgggcacggagcggccgccaggggagaacgcccacgggtgcgacatctgggggcgctggtacaaagcgcgggcccctccctcgccgctgtcccccaaaaccgcccccatttccaggtttcctgcccggagagcgagcaactctccaataggaaaaacaagcgagcgtgccggctgcctgtctgccgcccccagcccgcgtttaaatcgggccgcggagtcagcagtaatatgagcccgccccgcccccgtcccccaaccccccaccccggcccgaacgcgcaacaaaggggagagcgcggcgcgaaccaccgggtgctccacgggggaacccggccccgggcgggaccacccttcgggccacaggggacaccccggagcggcgggggctgcggacaaaggcgtgagcccgggataggggctgggggggcggggccgtggaaggctctggaaaaagggcggggggctcaccatgggaggggccgagcgggcccggatccgcggaggctgcgggcctcgggggctggcaggccaggagcgcgagcggacggcgcgcaccacgaggggccgcggagggcggccgcgacccccgagggggcccccggcgccggagcggtacggggcacggcgcggacggaccatggcgggcgcgggccgagcgggcggggagctgccgcgggccacaaggggggctgcgggctccaccgactgaggggcgcgggcgcgggcgcgcggcttcgggggagacgggctgagccgtaccaagctcgggggacgcgccgccggagtggggtc

SEQ ID NO: 97053 - DNA, 47660 bp, Homo sapiens
tcttcattttattttatttttcagagacggggtctcaatctatcattcaggctgaagttcagtggtacaatcatagcttactgtagtcttgacctcctggactcatgggatcctcctgcctcagcctcctgagtagatgggactacaggtgcatgccagcatgcccgtctagttttaaatttttttgtagaggtcgggtctcactcttttgcccatgctgatctggaactcctggtcttaagcgatactcccgccttagcctctcaaagtgctgggattacagctgtaatgtgcctggcctgaagagtatctttagtttccttctgcctctcattttactcttgaaactctattgggaccccatgtaagaaagctgatctaggcagggcaaatttgctcatacctgtaatcccagcactttgggaagctgaggcgatcagatctcttgatcccaggagttcaagagtagcctgggcaacatagcaaaaccccctctacaaaaaaatacaaaaattatctgggcatggtggtgcacctgtagtcccagctacttgagggtgctgaggctggaggatgacttgagcctgggaggtcagggatgccgggaactgagatgatgcctctgtactccagcccccaggcaatagagtgagaccctgtctaaataaataaataaataaataaatgcaagcagatctaggtatggcacagtggctcatgctcatgcttgtaatcgcagcaatttggcaggccaaggcaggaagatagcttgaccccaggagttcaagaccagcctaggcaatgtggcaaaaccctgtctctacaaaaattagccaggtgtggtggcacacgcctgtggttccaggtactcgagaggctggggtgggagcctctccctcctgagcccaggaggtcaaggctgcagtgagctgggatcgtgccactgcactccaaccttggccacagactgagaccctgtctcaacaataaaaaggaaacaaggggcggggcgcggtagctcatgcctgtaatcccagcactttgggaggccaaggcaggtggatcatgaggtcaagagatcaagaccatcctggccaacatggtgaaaccctgtctctactaaaaatacaaaaattagctgggcatggtggcacatgcctgtagtcccagctacttgggaggctgaggcaggagaatcgcttgaacccggcaggaggaggttgcaatgagccaagatcacgccactgcactccagcctggcgacagagtgagactctgtctcaaaaaaaaagaaaaagaaagaaagaaaagaaagaaagagaaggaaggaaggagggaaggaagatagaaagacaaaagaaagaaagagagagagagaaagaaagaaagaaagaaagaaagaagctctagtccagggctctgtgcctcttgtctgtagaggactaggaggtaaacactttcatctttgaagtccatgtggcctctgttgagaaccatagctctcatctttcctccttctgtagtgggttgaactacaggctccccacaaaaagatatatccatgccttcgcccccggaacctgttaatgggaccttgtttggaaggagtctttgcaggtgttacttagttaaggatcttgagatgacatcatcctggattatctgagtgggccctaaatccaatgactgatgttgtaaacgggagcgtgaccgctgaagcacagcatcacaggggcacgtttaggcctctggatggctgcgggcgggcctgactaatgtcaggccttccacaagaggtggtggagcagagtcttctctaactcccctggggaaagggagactccctttccaggtcggctaagtaatgggtgccttcccaggcgctggcgttaccgctagaccagggagccctctagtggccctgttcgggcatgacagagggctcacacttgtcttctggtgacttctcactgtgtcccttcagctcctacctctgtatggcctggtttttcctaggttataattgtagaacagagattattttaatattggaataaagagtaatgctacaaactaacgaatgattaataatattcatatataatcatatctatattctatttcttgtataactattcttattctatatattttgtttattatactggaacagtttgtgccctcggtctcttgcctcggcacctgggtggcttgccgcccacagaggtgatcagtccaagactacctggctagaaacgagcagagagcagtttggcccggaagcctgagttttactccctggtccacatctcagtttcctggggataggacagtccccaatccctcatctgaaatccctggggacagctgtgtttgtgaattgggagattttgtattttaggaaaacaactgggggcagaggctgctgtatacccgtgctgttttagggggctcagaaaataatacccaggccgggctcagtggctcatgcctgtaatcccagcactttgggaggccgaggtgggggatcacttgaggtcaggagtttgagaccagcctggccaacatggcaaaaccccatctctactaaaaatacaaaaattagccaggcacggttgtgtgcatctgtaatcccagctactcgggaggctgaggcaggagaatctcttgaacccgggaggcaaaagtcgcagtgagctgagattgggcaactgcactccagcctgggtgacagagcaagactccgactgaaaaaaagaaagagagagagaaagagagagagagagagagagagagagacagacagaaagaaagaaagaaagaaagaaagaaagaaagaaagaaagaaagaaaaaaaacaccccaaaatgaagatctcagaagcaaaagtttttctctgaccttctcctgccctcttgtgtctcagatctattctcccccaaggctggccataaaaactagaatccctctttcccaaggtaggttttagaaactagaactcttggctgggtgtggtgcctcacgtctgtaatcccagcactttgggaggccaaggcaggcggatcgcttgagatcagaagttcgtgaccagcctggtcaacatggtgaaaccctgtctctaccaaaaatacataattagctaggcttggtggcatgcgcctgtaatcccagctcctggggaggctgaggcaggaatcgcgtggacccaggaggcggaggttgcagtgagccaagattgagacattgcactccagcctgtgtgacagagtaagattccatctcaaaacaaacaaacaaactggtaagatggagggggaaaagggaggataggaaaaaaggaaggggggaagagaggaggagggcagggaggaggagagaaaagggcagaaaggagagaaggagggagaaagagagaaggaggaagtggggtaagagaagagagaatcagagcacaagaaaggtggaggggaagtttagagaagaaaaaggaggaggaggggtaagaagagaggaaggaggagggaaaggaggagaggaggggaggagggacagggaacactcagctgacatttatgaatgaatgaatctcaattccaagtaagcatgacagctccagtcctcagtttctttcttccttctttgtttctttcttttctttctttctttctctcttctatttttttttttttaagacagggtcttgctttgtcacccaggctggagtatagtgacgcgatctcggctcactggatcctctgccttccgggttcaagtgattctgctccctcagcctccggagtagctgggattacaggtgtgctccaccatgcctgactaatttttgtatttttagtagagacggggtttcgtcatgttggtcaggctggtttcgaacttctggcctcaagtgatccacccaactcggcctcccaaaatgctgggattacaggcgtgagtcaccacgcccagcctgccctcagtttctttacctgtcaaatggggtgatcacagcggtgctacctggctaggtaagagtgcaactgcagttactggtcattgctgactcttccaggcccagaaagcagcaggccagtggctggctctgggcctgtcctccggatcttcctcgtgatccctcattccagccaccctgctgcccgcagggaccaatggcagcgtagggggtgagtgcctgcccagccctgtcctccaaatgcattggaatcaggcccgggccgcctcctaaggagaacgctggaaaggtcggccaaggagagcagaaaacaagcagtggtggagtcggcagtggggcagaggagggggagctggaagggaaggaccccaaagcagaagcccgcacagtaggcacagcgcacccaagaagggtccaggagtctgcagaaacagaaaggtccccggcctcagcctcctagtccctgcctgcctcctgcctgagcttctgggagactgaaggcacggcttgcagcttcaggtcagccagagaatggggttgtgcgtgcccccaggccagcgctggcagcgcctgggggagcatctaggaccccggggtgcaagtaaagggcctgtaggtgcttctaggaaggatggggacctggcgtgtggattttgtcctccctgggatcctggggtgtgacggtgagacttaaccgacaaggcttcgggacatggattaagaattagctgtgtccttgaatcacacgtgttaagaccgcggcggtgtttacagttagagacttctgaggccccaatggtgtgagttgagcactcccccgggccctggaacgtgtttttaagaccgaaagaggctttggggcttggatttaggacaagctggagcaagaatacagcccgcgcgggccgtgggtgtggactgggatatttttggtcccccggggtagagatcctgcacgccaactagggctcgggtcctgatatcttgcgagccacgccccaaggctgcaggacacgtgtgtttcctaaaaggagagggggtggggcaaggcttggttgtcatggagacagcggacgaccctggcgggccgttctagcacccatgtctctttggccgtcgcctctccggtccggttgcctctctatggtcgtggcttctggaagacggccggcctcggctctgcgggctgaggggcttcgaagtagacaggagggaagaggggcggggcctaggtcctaggggggccggagtgaaacccaggaggtggcgaccgagccaaagcctgagggcggggcccgtggccaggatagaacctgagcctgggaacttgggctaggcccggaactggggtggggcttgaacggattggggagggctctagtttcgggagggtggggcgtgtgcttattgcgggggggtggggaggcatatgtctaacctagggggtggggcctggctgagaggggcgggactcggggagagggcttgtacctgtgggctgggctagaagcataacctaagggcggggcccagtgagtggtgaaaaggccacggggtagaggcaggaccaggaggaaaggggacaggacgtgaagggtaattcggggatcgaggatagaggctagatgaaggcatgtggcgaggcctgacagtgaccgacaaggtggacatgctggctctgggggcggggactgttgtaagattggcagggaaggatgggctcaaaaatatggaatagagcggacccagggtccgggggcggagcctggccaggacctggccaatcccaggcctggggccctggtctggttcctagttagcgggcgggtgtaaaagcctggaaaggggcgatgcctggcctgaggagttgaccaatcccaggcctgggggcggagtctgactcggagcgcgttcccggactcgcggggggcgcagagccgaggcctgggggcgcggctcgctgtagaggcgggggcggtcgtggggcggagcgggtcgtggggcggggctggagcggcccgcggcctcagctctctctgcttccccaggatgcgggctccgggtgcgggcgcggcctcggtggtctcgctggcgctgttgtggctgctggggctgccgtggacctggagcgcggcagcggcgctcggcgtgtacgtgggcagcggcggctggcgcttcctgcgcatcgtctgcaagaccgcgaggcgagacctcttgtgagtgttgccgggatccgtccagggctgggggcggggctgagggctctgggggcgcacggtgcagggctgggttgcggggacggcttggagggtccggagagctgagggtgctttgtaggttgggggcggggctgggccgagggctgggcgggggcggggcctgagagggtgaccagttgggggtctctgagggggctacaggggacactttaaggatttctcgaggaagatgagtagcctctaaggtgcttcgggcgttgcaggctgcttaggagatgatctcaggggatttggggggcaatttgggggtctttgggcaactggtggaaattccagggagctggggctgactggaaatccgtggcggtgtgggggtctttttggagccgtgataactgtgagagacttcagggggctctccagtaggtcaccggggctcacagggacgacccaatagatagtctctggggggttgccaagacactttgggtctatctagggctttctctgagggatgagcgagctgctctataaaggacttcccgggtttctgaaggtgtgagtttcctcgggatcgtttacagctggggcactgtttgagattttggggtctgtgtgggactttgggtttgggagttgttcggagtgtgtcgggaggctgctgtgtattccaggacttgtttggggggtctcttctggagactgggacactggattcatgctaggggggcagattctggtgtcctgtgcaaggatccttggagggtttttgcggtgtctctgagggacttgctcaaacgagccgttgggggtccttctgggatgaaacaggcattgctgggggcttctatcagagcagacctcaggaacagcaccacgtgggagcaggtgagcgccggctagcggggcagggctcaacaccttcacagctccttgtaagatggagtagcaagagggactgaacccattgtaaggagggcacagagggtgtggagatgggaaagatcccaccgtaagttgactggttctgaactttctaaaactcaccccttctgcatgccatggccccctgcccccggctccttggttgttctgatgtggaaatctgactgtgccctctgctcagacaccttccatggccagcccatccttggcagaaggaagactcagcccctagctgggcactcaaggtcctaccatctgttccctgcccacctgccactccccccatccatatgttcacctggtcttcagaaagacttgcagtgtcaagctcaagctgcccagaacatactggaccccttttagccagggcaggctctccctcygggaacctttgctgaattttcctgctcagcaccctcccatagctccttgttgcccttagaattgacgccatactggccgggagcggtggctcacgcctgtaatcccagcactttgggaggccgaggcaggcagatcacgaggtcaggagatcaaaaccatcctggctaacacggtgaaaccccgtttctaataaaaatacaaaaaaattagccaggcgtggtggtggacgcctgtagtcccagctactcgggaggctgaggcaggagaatggtgtgaaccccggaggcggagcttgcagtgagcggagatcatgccactgcagtccagcttgggcgacagagtgagactccgtctcaaaaaaaaaaaaaaaaatagaattagaattgaggccatactcctgagcattgcgcacgaggtccctgaccatgtcccagcctccgcttacttcccttttgtcgcctagctgcacttaccttttgtctattgctcatttgtttgtttgtttgaggcagagtctcactccgtcgcccaggctggagtgcagtggtgcgatcttggctcactgcaacctctgcctcccaggttcaagtgattctcctgcgtcagcctcccaagtagctgggactacaggcacgtgccaccatgcccagctaatttttgtaattttagtagagatggggtttcaccgtattaaccaggctggtctcaaactcctgacatcacgtagtccgcctgccttggcctcctaaagtgctgggattacaggcatgagccaccatgcctggctcccttttttttgagacagggtgtctyctctgttgcccagggtggaccagcctccatctcctgggctcaagcaatcctcccacctcagcctcctgactagctgggactacaaacgcctgcctccgctcctggatagttaatagaatgttttttatagagatgaggtctcgctatattgcccagtctggtctggaactcctggctttaagcgatcctcctacctcagcctcccaagtggctgggatgacaggtgcacaccaccacacctggctaatttttttattttttgtagagacgtggttctgccacgttgcccaggctagtctcgaactcctggcctccagcgatcacccaatttcagcctcccaaagtgctgggattaccgcgcccagcgtgaactgctttgaaccatattgtctacttgactttcagacagccagatggtgcagttggagttgcaaactcatgtgaggttatgagtcatcgatcgagatttcaccccttcctcctaacagcaaggtctgagataccaaatttccttttagctcctggtgtgtgtatgttaaggaaagatcttattttgatttccaattcacctttatgttgaatgggcatgctttgaggtcttatcagactcaaacctgcttgtctgacacctaagctgtccccctcctggggctacaatgacattttggcctctggttggtccttattttctgatcaccttgttgctacattaataaaaaattaactcggctgggcgcggtggctcacacctgtaatcccagcactttgggaggccgaagcgggtggatcacctgaggtcaggagtttgagaccagcctggccaacgtggcgaagccttgtctctactgaaaatacaaaaattagccgggcgtggtggtgcacgcctgtaatctcagctacttgggagtctgaggcaagacaatcacttgaacctgggaggtggaggttgcagtgagccaagatcgtgccattacactccagactgggcaacatgagcgaaactccatctcaaaaaacaaaacaaaacaaaacaaagatttaactcatttaacccagcatttttagttgttttctttctttgctttgggattagaagtttcttgtttttttgataaagtctcactctgtcacccaggctggagtgcagtggtgtgatcatagctcactgtagcctcaacttcctgggctcaaatgatcctcccatcacagcctcccaagtagctgggactacagatgcgtgccacaacagccagcagattttgtttattttttataaaggagaggtctcactatgttgtccaggctggtcttgaactcctgaggtcaagagatcctcctgcctcagcctcccaaagtgctaggattataggtgtgaaccaccacatctggcctgttttcttgccttttaatcttgggcctctttctagactgtgggccctataggggcacaaaaggagactgtgtcagtcttggtgccactgtggccctgcgccccactcaggattggcgcacagcggtagcgcaggacatgtttgttaggtggaaggccatcccttccttcttgggttcacccaggcccatctctccctcctctccagctctgctcccatgggccctgtgggtgtccatgcctggttctaagttcctgacatggcttgacatacttgcctgtgggtggcagctttgaagatggccccagggatccctgtctcctgctcttcccacttgtatggtcccctccctttgagtgtgggctggacctagtgacccctttcttttttttttttttttttttgagatgggagtttcgctttgtcacccaggctggagtgcaatggcgcgatctcggctcaccgcaacctccgcctcccaggttcaagttattttcctgccttagcctcctgagtagctgggattaccggcatgcaccaccacgcccagctaattttgtatttttagtagagacggggtttctccatgttggccaggctggtcttgaactcccgacctcaggtgatctgcccgcctgggcctcccaaagtgctgggattacaggtgtgagccactgcgccctgttttttttttgagacggagtcttgctctgccacccgggctggagtgcagtggtgtgactccactgcaccctccagctcccaggttcaagcaattctcctgtctcagcctcccragtagctgggattacaggtgcctgccaccacacccggataatttttgtatttttagttgagagggggtttcaccacattggccaggctggtctcaaggtcctaacctcaggtcatccgcctgccttggcctcccagaatgctggtattacaggctgaaccactgcgcccagccctagtgactcccttctaatgagtaaaatacatcagaattgatggaggctgggtgcagaggctcgtgcatataattccagcactttgggagcccaagatgggaggattgcctgaggccaggagttcaagaccagcctgagcaacatgatgagactccatctctacacgcaaaaaattagctgggggagtggggctctcctgtggtcccagctactcaggaggctgagtgggaggattgcttgagtccaggaggtcaaggctgcagtgagccatgattgccccactgcactccagcctgggtgagggagcaagactctgtcttgaaaaatgaaggggtgctgacaaatcccatttaacacgtgagagaacaraggcacagagaggggaggttatttgcccagaaacacasagccggggaggcacaggactccagagcatgtgctcttagccactgtgccgcactggagtggttggggtgctaaatttagaccttggcttcagaaaatatttcagcaccctgccctgactctcctaacatgccctgtacttcctgcatgaaatctgatcgtattcatccttgttgatttcttccgccctggagtcctgggcccagagctggacagtgggctcattgtccccaggctgggggtggcttgagcagctgccaggcagggctgcctaggcatgtggctggaaccaagtacaggaatccactgcctgctggtgtgggcatccttgagagagaacgagtgagaccaagagaccgggaggctgggggtgaatcctcgtgttcccacatctagctctggtgtttagcctgacggtgaccaactgtggcctcagttcctgtttcttgttgttgtgttgcctctggacgggcaccctactggcaggggctgtttcctgtggttactccctcaataacagccctctccccatggatgtaacatttgtaccccatcatggagttcttggggtgctccgtcaaattcacccacaggaagcccttagagcagaattgggtgtatactaggtgctccaggctgggcatggtggctcatgcctgtaatcccagcactttgggaggcygaggcgggctgatcacctgaggtcaggagttcgagactagcctggccaacgtggcgaaaccctgtctctactaaaaatacaaaaaaattagctgggygtggtagcgggcacctgtaatcccagctactcgggatgctgaggcaggagaatcgtttgaaccygggaggcagaggttgcagtgagctgaggtggcaccactgcactccagcctgggtgacagagtgagactctgtctcaaaaaaaaaaaaaaaaggaaaaaaaaagacgcaggcattgggcacctgctgtgtgcctcatgggcacttggcctgccactggctacgtcgccagcacttgataaatgctttgtaataagtctgccagggattagagggaccctgggaggaggctttgtttctgggttgttctgtcctcaaattgctctgtgaccttgggcgtgtccattccccactccgagcccccagttcattcattatttgacaaatggggatctgagggacctattttggagggtggatataaggttagcacagggcatggcagatagtaggtgcttaataaacactgagaatgatcatctgtttttttttttttttttttttttgagacatggtctcacactgtcacccaggctggagtgcagtggtgcaatcttggctcactgcaaccttcacctcccgggttcaaacaattcttatggctcagcctcccaagtagctgggactataggtgcccaccaccacacctggctaatttttgtatttttagtagagacggggttttgccatgttggccaggctggtctcgaactcctggcctcaagtgatccacccaccttggcctaccaaagtgctgggattacaagtgtgagctactatgtctagctgagaatgattatcttggctgctctgtttattggttgaatggatgagcagcgcttttttttttttttttttttttttgagactgaatcttgctcgattgcccaggctggagtgcagtggtgtgatctcagctcactgcaacctccacctcatgggttcattctcctgcctcagccttctgagtagctgggattacaggtgtgcaccaccatgcctggctactttttttgtatttgtagtagagacagggtttcatcatgttgaccagggtggtctcaaactcctgacctcaggtgatccacccaccttggcctcccaaagagctgggattacaggcatgacccaccgtgcctggccttctttctttctttctttctttttttgagacagggtctcactctcattgcccaggctggagtgcagtggtgcaatcttggctcactgcaacctccacctcctgagttcaagsaagtctcttgcctcagcctcccgagtagctgggattacaggtgcccgccaccatgcccggctaatttttttgtatttttagtagagacggggtttcaccatgttgggcaggctggtcttgaactcctgccctcaggtgatccacccacctcagcctcccaaagtgctgggattacaggtgtgagccaccgcacctgccgcccacctttttctaaaataaatttaaaaaattattttaacatagagatgaggtctcactatattgcccaggctggcctcgaactcctggcctcaaatartccccctgtcttggcctcccagagtgctggaattacaggagtgagcccctacacctggccctgaagtgttgacattgaactcaactagcagcactaaaacccacgcctgaagaaagctgctgtaacacacatattttctccatgaggcacatcacaccagacaagcgcctcagccctgtgcttgggggtcattttcaacagcgaagtcaccagcaaaaatcacaaaaatgcagctgggcgcggtggctcatgcctgtaatcccagcactttgggaggctgaggcaggcggatcacctgaggtcaggagtttgagaccagcctggccaacatgatgaaaccccatctctactaaaaatacaaaaattagccaggtgtggtggcaggcacctgtggtcccagctactcaggaggctgaggcaggaaaatcgcttgaacctgggaggcggagtctgcagtgagccaagattgtgccattgcactccagcctgggcgacagagcaagactccgtctcaaaaaaaaaaaaaaaaaaaaggcacaaaaatgcaaaaaacatggcactaaatagactgtgaaaagggtgcttgtttacaatgtgagagctgaattaaggaggcagagtgggccagatgcggtagctcacgcctgtaatcccagcactttgggagtctgaggtgggaggatggcttgagcccaggagtttgagaccagcctgggcaacatggcgaaaccccatctctacaaaaatacaaaaattagccaggtgtggtggtgtacgcctgtagtcccagctactcagggggctgaggtgggaggattgcttgagcccaggaggcagaggttgcagtgagcggaggttgcagtgagccgagattgtgccactgcactccaccctgggcaactgagtgagaccctgtctcaaaaaaaagaaggcagagtgttgtcttgatgacttcagatgggaacatgcatgttggcaattctgatttttcacctctccacatgtgtttgagtatggcggtgaatggcagctactcaggaggctgaggcaggaggatcacttgagccctggagtttgaggccgtagtgagttataatggtgccaccgcactccagactaggcaacagagtgagaccctgtctctaaacaataaaaaatttaaaaaattatcagctgggaacagtactcacgcctggaatcctagtactttgggaggccgaggcaggcggatcacctgaggccagaagttcaagaccagcctggccaacaaaatgagatcccttctctacaaaaaaataaaacaaaacaaaacaaacccacaaaaatccctttactggcaattttggagatgcagggaggcacaaaggcctgtcagtgtctttgtactggatttgctgtctttgtcatgaaatcactgaattttcccacttggtttgagccccgttagtcatcagcctgcagcggggggccccattcttgtgcaggctgcccagttttctgttgtaaagacaatccattktataggtcatccctcccctgcttagggcgtttggtgtttttctgatcttctgcactttggaagctacaatgaatagcactgttatttcccatatgcgaatttaatatgccaaactttttattttttaaatttttgagacatacttcatattctattgttgtttctttctccctctctctctcaatttttttaagatgagtcttgctctgtggctcagctggagtgcagtggtgcaatctaggctcgctgcaacctctgcctcccacattcaagtgattcttgtgcctcacrcttttgagtagccgggattacaggsacccaccaccacgcacggctaatttttgtatctttagtagagacggagttttgccatgttggccaggctggtctcaaactcctggcctcaagtgatctgcccaccttggcctcacaaagtgctgggattacaggcgtgagcccctgtgcccagcctggtctgctctttggaagctacartgaayagcactgtcatttcccccattcgactttaagatgccaaattttttatctttcgatacaaaaaaatttttttttgagacrgagtctcactctgtcacccaggctggagtgcagtggcatgatctcagctcactgcaacctccacctcccaggttccagtgattctcctgccacagcctcccaagtagctgggactgcaggaatgtgccaccatatccggctaatttttgtatttttagtagagacggggtttcaccatgttggccgggctggtctcgaactcctgacctcaagtgatctgctcacctcggcctcccaaagtgcacagattacagacatgagccactacacctggcctattttttaaaaatttttgagacatatatttctattgtcatttctttctcttttttttttcatgaagaagttttactctgtcacccaggctcaattgcagtggcattatcatggctcactgcaaccctgacctcctaggcccaagcgatcctcctgtctcatcctcctgagtagctgggactatacatgccacaatggccagttaatttttttcttttttttttttttttttttgcagagatgaggtctcagtttgttgcccaggctggtttcaaactcctgagctcaagtgatcctcccaccttgacctttcaaagtcctagcattataggcgtgagccaccgtgtccacccaattttttwaaaaattttaattttaggctgcaggttgcacgtgctggtttgttgcattggtatattgtatgatgctgaggtttgggcttgtaatcatcccattgtccaggtagtgaacagaatagaatatccaataggttattttcagctgccccttatggagttcccagtgtctgttgttcccatctttgcgtccgtgcgtattcaatgtttagctcccacttataacgaaaacatgtggtatttggatttcttttttttttttttgagatggagttttgctsttgttgcccagcctggagtgcaatgacgcgatctcggctcaccgcaacctctgcctcccgggttcaagcaattctcctgcttcagcctcccaagtggttgggattacaggcatgcgccaccacgcccggccaattttgtaattttagttgagacagggtttctccatgttggccaggctggtctcgaactcccaacctcaggtgatccatccacctcagcctcccaaagtactgggattacaggcgtgagccactgggcccggcggtgtttggatttctgtttttgccttaatttgctcagggtcatggcctccagctgcatccacgttgctccaaagcacatggtttagttcctttttttttttttttttttttgagacagagtctcaatctgtcacccaggctggagtgcagtggcgcaatctcggctcactgcaacctctgcctcctgggtccaagtgattctcctgcctcagcctcctgagtagctgggattacaggctcatgccaccacacctggcctccatttacattttttaaaaatgattttaaaaaatttctgagatagggtctcactcccataacctaggctggagtgcagtgacacaatctcggttcactgcagccttgacttcctgggctcaagcgatcctcctgcttcagccttctgagtagttgggactacaggcttgcgccactaccctggctaatttctgtatttttagtagagctggggtttcaccatgttgcccaggctggtctcgaactgctgggctcaagcaatcctcccacctcagccttccttccaaagtgctgggattacaggcatgagccagcatgcctgcacggctgattgacattttttgaagttctctccttaaggagggaactctccagttggagatgttaatttatcagcagcccatgagccacccagagagcagcaggacaggtccctgcagggagacctggtgggccagaacctgcccggggccccttagatcgggctggggccacgggtggctgctctctccctaggcctgcaggattggaacctgatctgagagtcccagatgcctctcttccttcgagattatttgtagcaagctctctgtgctccaggagagctgggtcttgggcggtctcctcccctgctgcctctctggtactagaatgtaacagatgcatgccctgtctacccagtatagggagggacagaccaaggacacggtggtaaatgagtacattgcacgtggcgtttaaagactagaagtgcccgccgggcgcggtggctaacgcctgtaatcccagcactttgccggggtgaggcaggcggatcacctgaggtcaggagcttgagaccagcctggccaacatgacgaaactccgtctctactaaaaatacaaaaatggccaggtgtggtggctcatgcctgtaatcccaccactttgggaggccgaggcgggtggatcacgaggtcaagaaatggagaccattctggctaacatggtgaaaccccgtctctactaaaaatacaaaaattagctgggcgtggtagcatgtgcctgtagtcccagctacttgggaggctgaggcaggagaattgctggaacccaggaggcaaatgtttcagtgagccgagatagcaccactgcactctggcctggacgacagagcaagactctgtctcmaaaaaaaaaaaaaaaaaaaaaagggtggggagagaatggagcgggaggagggtctgtatcaccacagggtcttggctagtgtgggctttgcactcagtaggtgctcaccatttcaagaatcagagttcatgcttctgcaactggctgctagggagggcagatgccctaggtactggacccaggggcatgaaatgaacattggtccaccctctattgactgagcacatactccagcagatgcatagatgctagagatgcacagatgctagagatgcacagatgcacagatctcctgcgtgctcacaatgccaatgaatgatggagggaatgaatgaatgagggaatgagtgaaggagggaatgaatgaatgagggaatgagtgaaggagggaatgaatgagggaacgagtgaaggagggaatgaatgaatgagggaaggagggaatgaatgaatgarggaatgagggaatgaatgaacaaaggagggaatgaatgagtgaaatgagtgaatgaatgagggagaaatagacccatgacctggtggctctgcacaaggctttgatggggagagtgaaggtgacagggagggctcccagggtagaacaragagctccctgacaccagccagtgccccactgaccaagtgcggccccattttgagggagctgtgattggggagcagtaagcatggtgcatgggccatgtggtgcctggaaggtttcctgagggaggcaatgaggctgctggggggagctctgtgagtgggtgtgtgtgtgggggctgtgctcagctcagtgagcttgtgggtcatggtgggtagggaagtattgtcactaggagttcagcagcctgctcatatcccaaaagtagccagaggggccttctaggggcttccagggtaagtggtttgacccatgcaggaagtctcatgaaaaccctggacctttgtttttagaaattgcggatgctctcccccaacagaccccggcaccctcctatctccatggctttcrttgtgaacccctcctggggcccatgagcctcatggagccggcccctgcccacctcagacttcattcccctttcatgtcgctttcccctaattccccccacactgacctccacgctggtcctcaactgtgccccattcccaggcctgttcccaccccagggcctttgcactggctgcattccggatgtacccacagcgactcccttttgcctcaccaggtcctgctcagatgccgcctgcctctctcaagggcctcccctgcctctgcccttggtccgtgtgactgaccacatcaccccttgcagtcttgtcaccatccagcacggcctggtattcagtcatatacatggaaggggtctctcttcccagaggactgtgaaccccagagggtggggcctggtggtctggatgctctgtccccagagctgagaacagtgcctaaagcacaacagacactggtatgcaccagctgcctgaatgaatgaaggaaggagggaatgaatgaatgaaagagggagtaaatgataaatggagggaaagaataaaggagggaatgaatgatggagggaataaatgcatgaaagaggtaataaatgaacaaargagggaatgaaagagtgaaggagataataaataaggatggaatgagaccagatgcggtggcccacgcctgtaatcccagcacattgggaggccaagggaggaccacctgagtccagtagttcgagaccagcctggccaacatggtgaaaccctgtctctacaaaaaatacaaaaattttgctggccctggtgacgtgcacctgtagtctcagctactagggaggctgaggtgggaggattgcttgagcctgggaggtctgcagtragccatgatcatggactctagtctgggcgacagagtgagaccctgtctcaaaaaaaaagtactgaatgagtgaaggggggaaagaatgaatgacggagggagggaaagagtgagtgaagtagggaatgagtgaatgaagatggaatgaatgatggaatgaatgaaggagagaatgagggagggaatgaaagagggaaagaacgaagaagagcatgaatgaatgaccgagaggatgaatgaatataggtgctgaagtccactgtgaacattttggggggtgtgagcagccattgcagggatctggggaggcctgggaaaggcaggggagatccaaaggatggatttggtgattttgatgcrgaagctggagggaggcagtggccgggccaggctgaaacaggggcaggtgggtggagcccctgccctgtgttggtcagggctgggcagggccaggtactacaacaaacacaccccacattccagtggcttaccccagtacaaggttattggttcccagagccaggggcgcagggtggtggggcagggagccaggaaggggtggggaccactcatttctccagcttctcaaccaagaaaatctgaatttccagcttctgtgatctaaacttttcctttcctttccatttcctttttgtttccttttttttttttttttttgatggagtcttgctctttggcccaggctggagtgaatttgcgtgatctcggctcactgcaacctctgcctgctgtgtttaagcaattctcctgcctcagcctccggagtagctgggattacaggcgcccaccatcacgcctggctaatttttgtatttttagtagagacggggtttcaccgtgttagccaggatggtctcaatctgctgacctcatgatccacccgcctcggcctcccaaagtgctaggattacaggtgtgagccaccacgcctggcctaaagcatttcttgtttgtttgtttgtttgtttgtttgtttgtttttaaagttcattcttggctgggcatggtggctcacacctgtaattccaatactttgggaggccagggctggtggattacctgaggtcaggagtttgagaccagcctgaccaatatgatgaaaccccgtctctactaaaaatacaaaaattagtcgggtgtggtggtgggcacctgtaatcccagctactgtggaggctgaggcaggagaattgcttaaacccaggaggcggagggtgagccgagattgcaccactgtactctggcctgggcgacagagtgagactccgtctcaaaaaaaaaacaaaaaaacagttcattctcattcatctaacagcaagtggtggcccgcctgcctccacacaatcattcaggaacccggctcctttcactgggggctctgcagttccctggggcctctgcccgttatatctactagcgagtggggaaggggaacttggaaccctccatctgggcttggcattggtccttacaccccccatccactggcacatctcctggccctacctggggcaggggcaatccctccccagttgggggcacacgtgctagatgcttcagccatctgtccctggtgccacccagtgacctgggggcagaacagctgcccagctcggggctggaccctgggggtcctggttagggtggtctgagcatgaagagtccaggctggaggtgctgggggatggtgtcaggtgctccagacgtcgcaggggacagaaaggaggatgggttcaggccccagctcccccagggccaccaagccagctggggtatgggggaggacagggtgactggtttattacgctttgagaatctaccttcttcctggctggttggtaaatggcccttgcccttggtccactgagagatccagccaccaaaagtttcaccatagacctcatcaaagcccctggctgccctggggtcctccagcggggaggctgaggctcccagaggccaggcggggcagggcaccagtgacgctgtcccctccgtcctccctcccagcggtctctctgtgctgatccgcgtgcgcctggagctgcggcggcaccagcgtgccggccacaccatcccgcgcatctttcaggcggtagtgcagcgacagcccgagcgcctggcgctggtggatgccgggaccggcgagtgctggacctttgcgcagctggacgcctactccaatgcggtagccaacctcttccgccagctgggcttcgcgccgggcgacgtggtggccatcttcctggagggccggccggagttcgtggggctgtggctgggcctggccaaggcgggcwtggaggccgcgctgctcaacgtgaacctgcggcgcgagcccctrgccttctgcctgggcacctcgggcgctaaggccctgatctttggaggagaaatggtggcgggtgaggccaggcgtgggcatcaggtgggcggggacccaggactggcccctgggcgggcggggakatgctgcgccccaggcctcggaaggcggccgccctggacgtgggcatgaggtgcacggtctgggtatgccccgggcagggagttggtgcatcccaggcctcgggagggggcctgtccggcggtgaccatgacccatgtgttggggaccacagcggtggccgaagtgagcgggcatctggggaaaagtttgatcaagttctgctctggagacttggggcccgagggcatcttgccggacacccacctcctggacccgctgctgaaggaggcctctactgcccccttggcacagatccccagcaagggcatggacggtgagtcaagggtgggacccctgctctatcaactggtttcctacccgcccaggccccgcccccaacttccaggccccaccccccaatgctcaggccccacccctaacacctgtatctcctgcagatcgtcttttctacatctacacgtcggggaccaccgggctgcccaaggctgccattgtcgtgcacagcaggtgaggggcccacaggcataatgccctcagccgctgagagtgacccaggctatcttgccagcctgacctgcccctcagctcctgtgggcatctccatgttaccctggggacagagagggcagctggtgtttcctgagcacttgctctgtgtccagaccagggccaagccctccacgtgtaaactcattgcaaccctcataactgcttggggctggacaaaggcatcacacccattttcacacccatcttgggacccggttgccctgtgcccactactctggggcccctctcatccccccacctgttcaccacatccatcccaccagcaaaacccgtcctctccatctgtctacttttttccatgccccccatctggacctgtgccagcccctcctcgggctcctcctgctccccccactctctcctccacccacgatggcccagctcctgtcagcagctacaggaggtttgaaaatcctaaatcagacctcccctgtcccagacctccctgcatctaccgtgaccctcagaataaaaccctctctcgggctaggcgtggtggcttacgcctgtaaccccaacactttgggaggctgaggcaggcgggtcacttgacgtcaggagttcgagaccgtcctggccaacgtggcgaaaccctgtctctactaaaaatacaaaaattagctgggcgtggtggcacatgactgtaatcccagctactcgggaggctgaggcaggagaatcgcttgaacccagaggcggaggttgcagtgagctgagatcccgccactgcactccagcctggatgatacagcaagactccctctcaaaaaaagaaacaaataacaaacaaaaaccctctctcagtttgggtggcttctgccacttccctgatgtcattttcctccccttcaccccgtactcactcctcctcagccccccaaactcttcaaacccatacactccttccggcctcagggccctcacatgtgctgtgcctgggcactcttccatagctcgcccccacagctctttcttgctaggtctcggatcacacttcacctccctagacaggatcccccaacccccctggctgcattaccatcagcccctctatgccccttgaccctattatatccctcgtgacacctaacaccaccaacaattgttggttgcgtgtttccttcctgccagcctgtgaactcatgcgaactgggctggctttgcctgggtccacatgcagcatgcttccccatgcctgtaccctgggggatttaggtcccagcctctgccctcccggctccccctccccctgcaggtactaccgcatggcagccttcggccaccacgcctaccgcatgcaggcggctgacgtgctctatgactgcctgcccctgtaccactcggcaggtactacggcctgggtagggaatggtgggtgggggcgggggaccccttaccaaggccaccctctgcaggaaacatcatcggcgtggggcagtgtctcatctatgggctgacagtcgtcctccgcaagaaattctcggccagccgcttctgggacgactgcatcaagtacaactgcacggtcaggccctgccctgttctgtctagaccccgcccctcccagccaggcctcaccccctcccaatcaggccccacctcctcccggtgaggccccgtacctcccagcaaagccccacctcctcctggtcaggccccgtcctctcccagccaggccccgccccccgaccaggctctattcccttaactcccttatgtgcgccctcctgtccacctggtggcgcaacctgctcccccgtctctaggggtggggtggggagcggggcttaaggaatggctgttcaggatggggacagagagggcaagtagtgtttcctgagtgcctgctctgtgtccagaccagagctaaaccctccacgtgtaaactcaatgcaatcctataactgtttggagggtggacccattttgcagctggggaaactaaggcttgtaatgcggctaggattgggcccagggtgcctgagctccttaaggcaatgccttccccatgccttgtgccctgtgggtcttccctgctgctgactgtagggaattgagaccctgggatgggaagggcgatgagtctggggcttccaggtgaggaacgcgtgaggcggaggtggaggcatctgctgtcccggagaggaaagcaggcagaggttaagaacaggaattcttctttcccctccacagtgagaggaaaccaggctgagggtttcagtgctgtaatgtggggcaggatacaggaaatacaggcgggaggtacaggaaacaggtatggagcccggagggaatagcaaggctgactgggaaggattgggtgagaggttgtccagggactgtggcaagttggcagatgcagattggacagatggggcccagagagattcaggccaggtcacacagctgagcaggggttgggggctctgggctgagcatcttggggtataccacaaggtccacagctgtgcttggcttcgcttttgaggagttttggttctgtttggagggtcttgggaaaattactaatctgcatgttgaaatgcaaaagtatatttttattattattattattttttgagacaggatctcactctgttgcccagactggagtgcagtggcgctatcatggctcactgcagctttgacctcctgggctcaagtgatcttccagcattggcctcccaagtagctgggactacaggtgcgcaccaccacgcttggcccacttttgaattttttttgtagagaagaggtttcgccatgttgcccaggctggtctcaaactcctgggttcaagcaatccacccacctcggactcccaaagtgctgggattacaggcatgagccactgtacccagcccaaaattatcttttaaaaaaaattacagagagtagcaaatacacataaaagtggacagaaaagtatagagagttctggtgcacccctcagctggacccagaggctatcagataccctgtcctgcccctccccacctccccacatcctcccctcggtgatggcataaagcatccctcagacggcatcatgtttcctgtgtagctgtttcactataacctttgaaagatgagtacttgttttttcaaattaaagtgaaattcatataaattagccatattaaagtgaaaaatttggccaggcacagtggctcacgcctgtaatccctgtacttcgggaggctgagatgkgcagatcacttgaggtcaggagtttgagaccagcctggccaacagggtgaaaccctgtctctactaaaaatacagaaatgtagcctggcgtggtggttggtgcctgtaatcccagctactcgggagactgaggcggaagaatcgcttgaacccgggaggcagaggttgcagtgagccaagattgcaccactgcactccagcctgggcgtgacagagtgagactccatctcaaaaaaaaaaaaaaaaaaaaaatttggccgggcatgatgatacacacctgtaatcccagctgcctggaaggctgaggcaggagaatcgcttgaacctgggaagcggaggctgcagtgagctgagatcgggccactgcactccagtctgggtgacagagtgagattccatctttaaaaaaaaaaaaagtcagtaatttggtggcattcacaatgtacaatcaccatgtctatctagatccaraacattctcatgccccccaaaggaaatcccatccccagttactccccatccctccacccccagcccctggcaaccactattctgcttcctgcctctatgatttgcctgttctggacatttcagatcaatggagtcagacactgtcgccttttgtgtctggtaagcattgtttttaagtgacagtgatatctcagtgtcatcaggaatctgggcagtggctcaattctgtctcacaatgtcaaaaatgtgttttttcttatttccataattaaatacacaaccagcattatgactggttgatgtgtcttgtaagaattcttggctgagcgcaatggctcatgcctgtaatcccagcactttgggaagccgaggcgggaggatcgcttgagcccaagagttgtggaccagcctgggcaacatagtgagtccctcatctctacaaaaaaattgaaaatctagctggttgtggtggtttgtgcctgtagtcccagctgcttgggaggctgaggtgggaggattgcttgagcccaggaggtcaaggctgctgtcagccgtgattgtgccagtgtactctagcctgggcaacagagcaagcccctatctcaaaaaaataaaaaaaagaaaagaaaagaaaagaaaatatttcatctgtaggtgccttttctctttctgtctgtctctcttccctcttggaatttatttattacagaaattgagatagtgtccagaccaggtttgactcttaacatttggggctggatcattccctggggtgggacgtgtcctgtgcattgtagcatatatttagcaacatccctggcctccctgcaccagatgccagtagcagtccccttcccccaagttgtgacaattaaaaaaatgtgtctagatgttgctaagtgtccctgggggacagaatggtccccgcttgagaatcgctggtctatatattttatcggcttcaaactcaacttttttggcaaagattccttatgggtggtgtggtgtcctcccactgggaagcccgtcatgtctgatggtctctctttgtccttgacacaccatcttgcattggttactacttactgtctcctgggccttggaagctcattctgtcagtttcctagaagtggaatttctgtgtcaaataaggcacacagtgaacattgagaggctttttaagaaatagaggatgggaaattagctaggcatggtgggcgcctatagtcccagttatttgggaggctgaggcgggagaatcctgtgaacccaggaggtggaggttgcagtgagccgagatcgcaccactgcactccagcctgggtgacaagagtgagactccatctcaaaaaaaaaaaaaaaaaaagaaaaagaaatagaggacggggccgggcgcagtgtcttacgcctgtaatcccagcactttgggaggccgaggcgggtggatcacctgaggtctggagtttgagaccagcctgaccaacatggagaaaccccatctctactaaaaatacaaaaattagcagggcgtggtggcacatgcctgtaatcccagctactcaggaggctgaggcaggagaattgcttgaacccgggaggtggaagttgcagtgagagccgagattgtgccattgcactccagcctgggcaacgagagcgaaactccgtcttaaaaaaaaaaagaaagaaatagaggatgggaaattagccaggtgcggtggtgggcacctgtagtcccagctatttgggaggctgaggcaggagaatcctgtgaacccaggaggtggaggttgcagtgagctgagactgtgccactgcactccagcctgggcgacagagtgagactccatctcaaaaaaaaaaaaagaaaaatagaggacagggccgggcgcggcggctcacgcctgtaatcccagcactttgggaagtcgaggcaggtggatcacctcaggtcaggagttcaagaccagcctggccaacatggtgaaaccccatctctacaaaaacaattagccatgcatggtggcgggcacctgtagtcccagctacccgggaggctgaggcaggagaatcgtttgaacccgggaagtggaggttgcagtgagccgagatcgcgccactgcactccagactgggtgagagagcacaactccatctcaaaaaaaaaaaaaaaaaaaaaacaggacagaatctctaaaggtgatgtttaataaggacacaaggagaaaacaagagcatacatttatttgggttcagaaattacatctcatgagaaactgctcactgctattttatctgtagcagcagttgcagtctagccattctcatgggggcagcaggctataatctagaaccttacttttttttttttttgagacacagtctcgctgcatctcccaggctggaatggagtagtgtgatctcggctcactgcaacctccttctcctgggttcaagtgattcccctccctcagcctcctgagtagctgggattacaggggtctaccaccaagcctagctaattttttgtatttttagtagagacggggtttcaccatgttggccaggctggtctcaaacttctgacctcaggtgatctgcctgccccagcctcccaaactgctgggattacagccatgagccacagcagccagcttttgttgcttatttctttcttactgtacacgtgctaacaaaaaagggatggtggagcccccagggtggacatgcccagccccaggtagctgtttcttttttttttttttttgagacggagtctcgctctgtctcccaggctggagtgcagtggcgcaatcttggctcactgcaagctccacctcctgggttcccaccattctcctgcctcagcctcctgagtagctgggactacaggcgcccgccaccacacctggctaattttttttttgtattttttagtacagacagggtttcacggtgttagccaggatggtctcgatctcctgacctcatgatctgcccacctcggcctcccaaagtgctgggattacaggcgtgagccaccgtgcctggcctttttctttttctttttctttttgagacggagtctcactctgttgcccaggccagagtgcagtggtgcgatctcagttcactgcaacctccacctcctgggttcargtgattctcctgcctcaggctcctgaatagctgggattacaggtgtgtgccaccacgcctggctaattttgtatttttartagagatggggtttcaccatgttggccaggctggtctcgaactcctgacctcaggtgatccacccaccttggcctccgaaagtgctgagattacaggcgtgagcyaccgtgcccggccacaggtagccctttttatcggtgcagctgctggcatcccctgctgcaagcttccagcttccttatttgtgtttgcagcccaatcttccaggctgttctttgttagaaaataagtgatttcttgggctgctttttgttagaagggaagttctaccgaggattttttgtttccaaaaaaaaaaaataggcaacgtagagtagctactcacctgcataataagagattgggttgggggctgccagagatttgcgccctatgcggatggcacatctggtcctcaccggtttttcacggtctatttagatcagatacagcctccctgctagcttgtctgtaaaaatccttgcctttttttttttttctgaggcggagtctcactcttgtccccaggctggagtacaatagagcgatcttggcttactgcaacctctgcctctcgggttcaagagattctcctgcctcagcctcccaagtagctgggattacaggcacatgccaccaggtctggcaaaattttcttgtatttttgtagagatgaggtattactacattggctaggctggtctcgaacttctgacctgaagtgatctgcccacctcggccccccaaagtgctgggattacaggcatgagccaccgcgcccagccatgtgcccatttttttttttttttttgagatggagtctcgctctgtcgcccaggctggagtgcagtggcgcgatctcggcccactgcaagctccgcctcccgggtttacgccattctcctgcctcagcctcccgagtagctgggattacaggagtgtgccaccacgcctggctaattttttgtattttttagtagagacggggtttcaccatgttagccaggatggtctcgatmtcctgacctcgtgatccacctgctttggcctcccaaagtgctgggattacaggcttgagccaccccgcctggccgtgcccattcttaagccagtcatattggctgaggaggggctgggctgattggccaggttctctcctagagatggtgtgggctgtaccacacctaaggcagtggcccaagtctgagaatggagggagaggaccctcccccttagggacctgctgttggtcagcagccagtgatcttgggtgcactgcatttcctctctgggcctcagtgccttcatctccaagctcagctcagagcatggcggtggtgtctgctgatcatattggtttagtcatcagctatttagtcagtaccttctcaggggcacagctgggggcacaggggatgcctctcagtgacgtttgagctgagactgaagagttcaggcaaatgcatctgggggaagactgcttcaggcaaaaggctagcatgtgcaaagtccctgaggaggcagagtgttcagcggagatggagggagaggaggcagcaggggcggcagggccagatccagttggccacaggaagaaatgtgggtttcatcctgtgtgtgagcgggaagccccgagcacatttgcagctgttatgatccatctggtgggtaatccctggcatgcaactgttttattcccactctggggccgggatgcctgggttcaaatcaaattctgccacttcccagctctgtgatctcgttccagttccttaccatctgtgagcctcggtttctccatctgtaaagtggcggggggggagtcattccgaagcccaactggagatgagaactcttaaaggcaccgtggggcacctagtggatgaccccaggaagctcttgcggggcttgagaatgtgtggcagggagggaagatgtcctgcagggggagcccatgagcaggtggctccgtgggcacctggggctcagtccagacgcagcgcagcctagtgggtgcacctgggagtggtctgcccaggggtgacgctccggccagcccaggctcagccagggggctctgggtgacagtgtaggctccaggctgagggttgccctgcggggtgccagctctcctgctagtcctgccctgtgtgcctgctgaggctcagacagggatgtggtatctccaggaagctgcttggcagaatcgagggaccacgaaggggtgcgggtagggggaggaggaaagacactgcatctgcttggatagaarttgcatccggccaggcacaagtggctcacacctggaatctcacactttgggaggctgaggcaggaggattgcttgaggccaggagttcaagaccagcctgggcaacagagcgagatcccccatctctacaaaaaaatctgtagtcccagctactcgggaggctaaggctggaggatcacttgaacccaggagttagaggctgcagtgagctgtgatcatgccactgcactccagcctgggcggcacagggagacccccaaccaaaaaacaacaaaaaaagctgcatcctagaccctttgcaagagactgaacgagtcctaggagtcaatgtggtccctaatggagtgtggacgattctgcagccatcatcatccttaggctgttccgctcataggattagctccctgggtggggcggtctcggggtctctcctctgatccgggctccccaccgcctgccggtcccatcacccacttcctcaccccgtcccccaggtggttcagtacatcggggagatctgccgctacctgctgaagcagccggtgcgcgaggcggagaggcgacaccgcgtgcgcctggcggtggggaacgggctgcgtcctgccatctgggaggagttcacggagcgcttcggcgtacgccaaatcggggagttctacggcgccaccgagtgcaactgcagcattgccaacatggacggcaaggtgcacaccggcagggccccggggcaggtctcggagttcagggaagaccactgtctcctcttcctggggcccctgggatacataaaacagcctggactggcgcggaaggctccgccaaggcgcacgcagggcggggtgtaaggggagttcctgggactcccggtgcaccaccagagggacaatcctgcagcctgcacagatagtcatgtgactgtggtccttgggtcaggagagttggaggataggtatggctgtgcgccctggcaagtgcctcagcctttctgagcctcagtttctgcgtgtggagattagcaaggagaatagggctctgtgtaccgtgctgttattttgttgttgttgtttgagacagagtctcgctctgtcgcccaggctggagtgcagccacgtgatcatagctcactgtagctttcagttcctgagctcaagcaatcctcctgcctcagcctcccaagtagcagcaaacagataccttcataattagcaactacttactctcttaatcatctccattctccgcttgcatgaatctccctctcctttcccaagcccctcccatccaaggccaagaacagaccgtaataatgatcataaagcaaatgtcggctgggcacagtggctcacacctgtaatcctaacactttgggaggctgaggcaggaggatcacttgagcccaggagtttgagaccagcatagccaatgtagtgagacccccttttctacagaaaataaaaaattagccaggcatggtggcaggtgcctgtagtcaatgctactaaggaggctgaggcgggaggatcacgtgagctcacgagatcgaggctgcagtgagctatgattayaccactggactccagcctgggcaacagagtgagactctgtgtctctaaaaaggaaaaaaaaaaacagcaagtgccatgggggctgggtccttaatgccaagaacaatgctccttcctcagtgtgcttggtgttggatggccagcccccagggcacttttgctcactgtagctcagattcttgcataggaaacacaccaggccaggcacggtggctcacgcctgtagggtccagccccacagggtcggtgggtttttctcccygtgtgcggagacgagagattgtagaaataaagacacaagacaaagagatgaaagaaaagacagctgggcccgggggaccactaccaccaagaggcggagaccggtagaggccccgaatgtctggctgcactgttatttactggatacaaagcaaaaggggcagggtaaagagtgtgagtcatctccaatgataggtaaggtcacgtgggtcatgcgtccactggacagggggcccttccctgcctggcagccgaggcagaggcagagagagggagagagagagaaagacagcttatgccattatttctgcatatcagagacttttagtactttcactaattttgctactgttatctagaaggcagagccaggtgtacaggatggaacatgaaggcggactaggagcatgaccactgaagcacagcatcacagggagacggttaggcctccggataactgtgggcaagcctgactgatgtcaggccctccacaagaggtggaggagtagagtcttctctaaactccccgggggaaagggagactccctttcccggtccactaagtagcaggtgtttttccttgacactaaggctaccgctagactagacttcccagacgctggcgtcaccgctagaccaaggaaccctctggtggccctgtcygggcataacagaaggctcgcactcttgtcttctggtcactactcactgtgtcccctcagctcctatctctctatggcccggttttttctaggttatgattacagagcgaggattattataatactggaataaagagtaattgctacaaactaatgactaatgatattcatatataatcatgtctatgatctagatctagtataactcttgttgttttatatattttattatactggaatggctcgtgccctcggtctcttgcctcggcacctgggtagcttgccacccacacacgcctgtaatcccagcactttgggaggctgaggtgggtggatcacttgaggtcacgagttcgagaccagtctggccaacatggcaaaaccccatctctactaaaaatacaaaaaaaaaaaaaaattgtttgggctcagtggcatgcgcctgtaatcccagactcaggaggctgaggcataagaaccacttgaacgtgggaggcagaggttacagtgagcgaagattgcgccactgcattccagcctaggcgacagagtaagactctataaaaaaaggaaggaaggaaggaagggaggaacggaggaagggggaaaagcagaaagaaacacaccagacagggtgtagtggctcaaacatgttggagaagcatttctgttcatagaaccatgccaagcagggcggcgggcagcaggtgaagctctgcagtgtctgacgtagctgtagtgtccacacagaggcatctacttcctgccagcatggagggttttgtggatcaggaagtgggygccagccagaggtcttctcttgactgaatgcaggctgggaaggtgggaggaggggccctgagttggaggcgacgcttactaccctgcttttgcagatcagccaaggtcacagagcttagaatgacactggaggtgctaggtccaagccccagggcaaggcaggcaaagtgttactgagaaggaccccgcatatccccggctccttccaactcagttcaccccattccaggtcggctcctgtggtttcaacagccgcatcctgccccacgtgtaccccatccggctggtgaaggtcaatgaggacacaatggagctgctgcgggatgcccagggcctctgcatcccctgccaggccggtgagcagggcccccgcatggtccccacccggagcaggggtccccacrccctgcctgcctagcgcagcctgaacatggccttctccctaggggagcctggcctccttgtgggtcagatcaaccaacaggacccgctgcgccgcttcgatggctatgtcagcgagagcgccaccagcaagaagatcgcccacagcgtcttcagcaagggcgacagcgcctacctctcaggtgcgcagcctgctaggccccggtgactggctgtgcggatggggatccgccacccatctgcccctctcccctctgccaggtgacgtgctagtgatggatgagctgggctacatgtacttccgggaccgtagcggggacaccttccgctggcgaggggagaacgtctccaccaccgaggtggagggcgtgctgagccgcctgctgggccagacagacgtggccgtctatggggtggctgttccaggcaagctggggttgcagggggtggtcctgaggcatggtcctgagggagctcagccaaaaggggcttagaagtacacatgcctttgggcagtgcacaacctggacaactgctcatggcagcccaggaggaagcactggatctggagccagttcacctgggtgatgttgagcctcagttttgtcatccagaaaatgggatcatgaaagcccacctgtcttagggcttcaatgagccaagcaggagctccacaaaatgtgtggctgcttccataaatgtcatcccaggttgggagagactggagattacagaccaggggctactgcttgacagtgtatctggtcctgctggtggggaggatgagaggcggggtgtcctcagctgagcctctgcctccaggagtggagggtaaggcagggatggcggccgtcgcagacccccacagcctgctggaccccaacgcgatataccaggagctgcagaaggtgctggcaccctatgcccggcccatcttcctgcgcctcctgccccaggtggacaccacaggtgcgagtctcccccactccaacctctctcttcatccatcagtgtgtctgttgattcatgtcttggtccattttgtgttgctctaaaagaatacctggccggggccaggcacggtggctcacgcctgtaatcccagcactttgggaggccgaggcgggcggatcacgaggtgaggagatcgagagcatcccggctaacacagtgaaaccctgtctctactaaaaatacaaaaaattagccgggcacggttgcgggtgcctgtagtcccagctacttgggaggctgaggcaggagaatggcatgaacctgggaggcggagtttgcagtgagcccagatcaygccactgcactccagcctgggcgatagagtgatactctgtctcaaaaaaaaaaaaaaaaaaaagaatacctggccgggtgtggtggctcccgcctgtaatctcagcactttgggaggctgaggcaggtggatcacctgaggtcaggagttcgagaccagcctggccaacatggtgaaactgtgtctctactaaaaatacaaaaaaaaattagccaggcatggtggcatgcacttgtagtcccagctactcaggaggctgaggcagaagaattgcttgaacctgggaggcagaggttgcagtgagccgagatcaggccactgcactccagcctgggtgacagagtgagacaatgtctcaaaataataataataatttcaacatgatttttggtgcggacaaacaaaccatatccaaaccatttactcatcctagttcaggacagtgtcctgggactgacacaagggctcacagccagctagcactgtgggctctcacgggtcccttctgctgttttattttagtagttatttatttccattcctcacttccactgccactaagcattctgaaatagtgttttttttgtttttttttttttttttttttttttgagatggagtcttgctctgtcacccaggctggagtgcagtggcgtgatcttggctcactgcaacctctacctcctgggttcaagcgattctcctgcctcagcctcctgaatagctgggattacaggtgtgcaccaccatgcccagctaatttttttgtatttttagtagagatcgagttttaccatattggccaggctggtcttgaactcctgacctcaagtgatccacctgccttggcctcccaaagtgttgggattacacacatgagccactgcacccggcctcggtgtatcttttctttttcttttgttttttttgtttgtttgtttgtttgagacagggtcttactctgttgcccaggctggcatgcagtggcactatcatagctcactgcagcctcagcctcctgggttcaaatgatcctcccacctcagcctctggagtagctaggactacaggcaggcaccaccatgcctgactaatttttttgattttttgtagagatggggtctgtattagtccattctcatgctgctaataaagacatatccgagactgggtaatttataaaggaaagaggtttaatggaactcacagttccacatggctgggatggcctcaccatcatggcagaagacgaaggaaaagcaaagggactttttaatggtggagggcaagagagtgtgtgcaagggaactcccctttaaaaaccaccaaataaagccatcaaatctcgtgagaccccttcactatcatgagaacagcacgggaaagacccacccccatgattcaactacctcccaccgggtccctcccacaacacgtgggaagtatgggagctacaattcaagatgagatttgggtggggacacagccaaaatatatcagggtctcactgtgttgcccaggctggtctcgcagtcctgggctcaggcaaactttttcttaaaggaccagatagttaatattttcggctttgcaggccatacagcctcgattgctattcaacactgctattcttgtgcaaaagcagccatagacaatgtgcaaatgaatgagcatggctgtgtgccaataaaactttatttctaaatttttatttattttttgagacaagatcttgctgttgtccaggctggaatgcaataatgcaatcatagtttactgcagtcttctcctcctgggctcaagtgattctcccacctcagcctcccaagtagccggaactacacgcacgtgccatgacacccagctaatttaaaaaaaaaaaaaaattgttggccgggtgcggtggctcacgcctgtaatcccagcattttgagaggccgaggcgggcagatcacttgaggtcaggagttcgagaccagcctggccaacatagtgaaaccctgtctctaccaaaattttaaaaattagccacgtgtggtggtgcacgcctataatcccagctacttgggaggctgaggcaggagaatcacttgaatccaggaggtggaggttgcagtgagccgagatcacaccactgcactccagcctgggtgacaaagcaagactatgtctcaaaaaaaaaaaaaaaaaaaaaaaaaagggtttttgcagagacagagtctcactatgttgcccaggctggtcttaaactcctgggctcaagcgaccctcctgccttggcgtcccaaagtactgagattataggcatgagccattattgtgcccggccccagtaaaactttatttacaaaaacaggtggagggccaaatttggcccacaggatgtaagttgctaaactcttattcactgtgtaacagacacagccctgcctgtcatgtggggaatggacacatgaccaggcagggtgtacattttcttgccctggtgaggagtggttagggaggcctcactggaggagggggcatgaagccaggatctgacagacaagggggaatcaggcaggcaaaatggggaagaacattcctgcccaggggacagcctgtgggaaggtccagaggtgcaggagaggatattgagttgaggcctcccagaagccacctgctcagcccttatctgccccccatccccactataggcaccttcaagatccagaagacgaggctgcagcgagagggctttgacccacgccagacctcagaccggctcttcttcctggacctgaagcagggccactacctgcccttaaatgaggcagtctacactcgcatctgctcgggcgccttcgccctctgaagctgttcctctactggccacaaactctgggcctggtgggagaggccagcttgagccagacagcgctgcccaggggtggccgcctagtacacacccacctggccgagctgtacctggcacggcccatcctggactgagaaactggaacctcagaggaacccgtgcctctctgctgccttggtgcccctgtgtctgcctcctctccctgcttttcagcctctgtctccttccatccctgtccctgtctggccttaactcttccctctttttcttttctttctttctttcttttttttttaagatagagtctcactctgctgcccgggctagagtgcagtggtgggatctcggctcactgcaacctctgcctcctggggttcaagtgatcctcccacctcagcctcctgagtagctgggattacaggcacccgccaccacgtccagctaatttttatatttttagtagagacggggtttcaccatgttggtcaggttggtcttgaactcctgacctcaggtgatccgctggcctcggcctcccagagtgctgggattataggcgtgagcctctggcccggcctttcctttttcctctcctctcctgccgagagtggaacacrcgtgtcctgggagctgcatcttgtgtagggtccagctgcttttggggactgcaggaatcatctcccctgggccctggactcggactggggcctccccacctccctctcggctgtgccttacggagccccratccaggcctcctgtggctgttgggttccagatgctgcagctccatgtgacttccaagcaggccctccgccctccctgctgaatggaggagccgggggtcccccaggccaactggaaaatctcccaggctaggccaattgccttttgcacttccccgttcctgtcacatttccccagccccaccttcccctcctgatgccctgaaagcttccggaattgactgtgaccacttggatgtcaccactgtcagcccctgccttgatgtccccatttagccatctccatggagctcctgctggagggccctgaaccctgcactgcgtggctgcccagccagctgcctcctgtcctgggaggaggcctcctgggtgtcctcatctggtgtgtctactggagggtcccacaggagaggcagcagaggggtcaggggaggtctcctgccgggggttggcctctcaagcctcaggggttctagcctgttgaatataccccacctggtggtggcccctccgatgtccccactgatggctctgacaccgtgttggtggcgatgtcccagacaatcccaccaggacrgcccagacatccctactggcttcgctggtggctcatctcgaacatccacgccagcctttctggggccggccacccaggccgcctgyccgtctgtcctccctccagcagcaccccctggcccctggagtggtggggccatggcaaragacaccgtggcgtctcatgtgaactttcctgggcactgtggttttatttcctaattgatttaagaaataaacctgaagaccgtctggtgcctgctgggagcccattcattgagtgtccctatgtggcacagaacccttgctgagtttcagaaggcaggactcggccagccgggcatagtggctcatgcctgtaatcccagcactttgggaggctgaggtgggtgaatcacttgagcccaggagttcgagaccagcctggccaacatggtgaaaccctgtctctactaaaaatacaaacaaaataattagctgggcatggtggctcacacctttaattccagctactcgggaggctcaggcaggagaattgctggaacctaggaggcagaggttgcagtgcactccagcctgggtggcagagcgagactctggttcaaaatagaaagaaagagagaaagggggagggagggagggaaagagcgagagaggagaggagagggagggagggagggaatacaaaaaagtagccaggcatggtggtgcgcgcacctgtaatcccagctaccccagaggctggggcaggagaattgcttgcgccgggaggtggaggttgcagtgagccgagatggtgccactgcactccatcctgggtgacagagcgagactttgtctcaaaaaaaaaaaaaaaagaaaagaaaaagaagggaccctgtaccatgtggccccatctgcaagaccaaagggaccttggggcaggggcactcgggttggccctctcgctggcctgccgagggggaggcacctccctgcagtgtctgggcctcacaggccctcgttgaccttgtggttgcaggggagggatggccagcctgcctgtgggttcctgcaggtgttgcaggatggctcagatcacggtatgtcctggcacctgtggctgccctggcagtgtcctcttccatgtacaggccggctggtgtgagagctctgggtgaaagtcgctaggcctgctggggtggccgtctgagctgggattcgaacccaggactccaagctcaggagtctatacagtattcctcccaatcgctgggggatatgttccaagaccccaaatggatgcctgaaactgaccataatactgagccctaaatatgttttgtttcttttctttcttcctttctttcctttccttctttttctttcccttcctccctccctccctcccttcctttccttcatcctttcctccctttctaattttaatttaatttaattatttatttatttttgagatggagtcctgctgtctcccaggctggagtgcagtggcacgatctcggctcactgcaagctctgcctcccaggttcacgccattttcctgcctcagcctcccgagtagctgggactacaggtgcctgccaccacgcccggctaatttttttgtatttttagtagagatggggtttcaccgtgttagccaggatggtctcaatctcctgacctcatgatccgccctcctcggcctcccaaagtgctgggattacaggcgtgagccaccgcacgtggcctaatttatttatttttaagacaaagtcttattctgttgcccaggccagagtacagtggcatgatcatagctcactgcagccttgacctcccacacacaagcaatcctccatcagcctcctgcgtggctgagactacagatatgcaccatcacgcccagctaattttttgatttgtttgcagagatgaggtcccactgtattgcccaggctggtcttgaactcctgggctgaagccatcctcctgccttggcctcccaaagtgctgggattacaggtgtgagtcaccgtgcccagtttatactggtttttcaatctcataaccaggaggctactaagtgacaaatgagtgggcatggggggagtggtgtctccagcatggatctgctggacaaaggggtgattcatgaccctgggcgggacagagagggatggagcaaggcagtccgagatttcatcatgctcctcagaacagcacgcaatttgaaacttatgaattgcttatttctggaattctccatttaatatgtttgaactgtggaaacctcagaaagagaaactttgaataagcagggactactgtactctcaactgactctcacctctgctgtccccctcgcgtgtcataatgttggcatcttgtttgttgtctctacctcaggggacaggaggtgacagagcatttgctgggagaggacactgagggggtgaccctcgtgtgcagatgagcaagtgaatttttttgttttgttttttgctttttggtttttttgagacggagtcttgctctgtcgcccaggctggagtgcagtggcacaatctgactcactgcagcctccgcctcctgggttcaagcaattctcctgcctcagcctcctcagtagctgggattgcaggcacgtgccaccacacacagctcatttttgtatttttagtagagacagggtttcaccatgttggccaggctggtctcaaactcccgacctcaggtgatccacccaccttggcctctcaaagtgctggaattacaggcgtgagccatggcacccagctgggcaagtgaattctgactaatctctctccaacctcgcaaccacttcaggaagtgtcaccatggtccccattgtacagatgcagaaactgaggcacaagaaggggaatggactcattgccaggggctccaggtgagacagtggcccagtgaactttcttgttccaaagcctctagctgcaatagtgtctaggaagttccctccaagttggccagaaaataatcccaatgactcttaggcttgaactctgttagttttttttattaattaacagactttttgggttttatttatttatttatttatttatttatttatttattgttttgagacagagtctagctctgttgcccaggctggagtgcagtggcgagatcacggctcactgcaagctccttctcccaggttcacaccattctcctgcctcagcgtcccaagtagctgggaccacaggcgcctgcaaccacacctggctaatttgtatttttactagagacagggtttcatcgtgttagccaggatggtcgtgatctcctgacctcgtgatccacccgcctcggcctctcaaagtgctgggattacaggcgtgaggcaccgcgcccggcctatttatttatttaagagggagtcttgctctgtcgcccaggctggagtgcggtggcgcgatcttggctcactgcaacctctgcctcccgggttcaagccattctcctgcctcagactcccgaatagctgggattacaggcatgagctactacgcctggctaatttttgtatttttagtagagatggggtttctacttcatttgagaggccggtctcgaactcctcacctcaggtgatctgcctaccttggcctgccaaagtgttgggattacaggcgtgaagcaccacgcctggcctattcctttttttttttttttttttttgagacagagttttgctcgttgcccaggctggagtgcaatggcgtgatctcagctcaccacaacctccacctccggggttcaagccattctcctgcctccgactcccgagtagctgagattacaggcatgtgccaccacgcccagctaaggctttgtatttttagtagagacagggtttctccatgttggtcaggctgatcttaaactcccgacctcaggtgatccacctgccttggcctctcaaagtgctggaattacaggcgtgagccaccacgcccagccctcctttctttttgaatagtcctggcaccgttgccaaagatgagttgaccatatatgcataggtttatttctgcatcagttccaatcatttatttatatgtctatccttatgccaataccacagttttggttattgtacctttttattgtttgaaatgagaaagtatgagtcctcgtattttattcaatattgttttggctattttggggccatttgcaatttattattaattttaggatcaatttgtcaatttcaacaaaaacattgtaaatttgaaagggattacattgcatccgtagaccaatttgtggagtactgccatcttaacaatattatactttccaatccatgaacgtggaatgtcttaccatttatttagatcatctttaattttttttttcaccaaagttttagttcttttgcttgtttcgagacagggtctcactctattgcccaggctggagtggaatggcaggaacacagctcactgcagccttagtctcctgggctcaagtgatcctcccaccacagcctcccaagtagctgggaccacaggcagctgccaccgggtccagccttggcttcccaacgtgctgggattacagctgtgagccaccaagcccagctacagctctcaagaagtacagtcttgtacttcttttattaaatttatgcctactttatactttatgatgctatggtaaatggaattgttttcttaatttgctactgattttaaaatccactacctgtgtgagttgaactgcgcttacacacatcactgaaatatcccactctcagaagtggcccagcctccccaggcccaccaggccttcttccccttccagccctctgtccaggcaagaactcgattggaggcctttctgggcactcagagggacacaccaccacactaggagggttagcttaaaaaattcaacaagcatggccaggcgcagtggctttcgcctgaatgctaccactttgggaggccgaggcaggaagatcgcttgagcccaggggttcaagatcagcctagaccatatagcaagagcccgtccgtccggaaaatgtaaaaaaaaaaaaaaaaaaaattcaacaagcatattttcatcccctacttttttttgagatggagcctcgctctgtcgcccaagctggggtgcagtggcacgatctcggctcactgcaacctccgccaccccggttcaagcgattctcctgcctcagcctcccgagtagctgggactacaggcgcccgccactacgcccggttaattttttgtgttttcagtagagacggggtttcaccgtgttagccaggatggtctcgatctcctgacctcgtgatccgcccgcctcggcctcccaaagtgttgggattacaggcgtcagccaccgcgcccggcggtgcaggaattttaaaactcaccaaaatacgccctccttcagaaaatccctgccacctcgataggacgtcctcttcttgagctcccctctccggccctccctgatacagcaaggttgagcattcgggcactggcttcccgaactcacttcgactcaggcacagcaggcaaagattcaatgggtagggccggaccgactgcccgaccttcgcggtgcttcacttgcctcactgcgcatgtgccaaagacaatcacccaaagtactcgaaaccaagcggcagggccggcccttgcgcaggcgtactagcgacggccgtagggagcgcttcctcctccccgccgccgccctcgccatggccgcgccggccccgggcctcatctcggtgttctcgagttcccaggagctgggtgcggcgctagcgcagctggtggcccagcgcgcagcatgctgcctggcaggggcccgcgcccgtttcgcgctcggcctgtcgggcgggagcctcgtctcgatgctagcccgcgagctacccgccgccgtcgcccctgccgggccagctagcttagcgcgctggacgctgggcttctgcgacgagcgcctcgtgcccttcgatcacgccgagagcacgtacggcctctaccgggtgagagctacgggggccgccggggatcacgccgagagggccacagccaccgcctacaccccggctacggaggccgccgggggccatgccgaaagggccgcgcccactgtctgcacctcggctacgggggccactgggtatcatgccaagagggccgtgcccactgcctgcacctcggctacgtgggtcgctgggggtcatgccaaga

SEQ ID NO: 97054 - DNA, 55013 bp, Homo sapiens
ggcagggggaggaactgcacagcccagacctgggagggagggatccagggaaggagagatcctgggaattgcaatagcagcaggcagaggcttttggttcctattgtttcctggctgctatgaatgacttggctttaatgactcccaaggttctggatctctccagttcaaatttcaaattattgacaaaacaatctgattggccaggttggctcaggtgcatatgctaggactaagctttggccagtatgactcacatggtaacagacagggctgctggggccctgtctgtcaccagaaagggagtcacaccggctgctacccctagagggagctatcctaatcaatcataggcaaggtcaaaaaaataattatggaattattttccatttgtgattctctacgccaccattacactccacttgaccagctaactgagaaccaactgagtacagagaacttagaggattagctctgaagagtcctgaagataaggggtagggagggaaatgggttgagtttagaaagaagggcctgggtcccaatcccacaccctctcttgacacctagccctagctccactctgggccagcaggtcccagagttaaggtgcaagtctctcatagagccagtcttcctccccgcggtgggtcatgggccccaaaggggaatctcctgtgggtaggccccgccgaaagactatccggtcatgcaggcggttggtttgaccttgccagaactccatcacctgagggtacaggacatagccacccctataaggagaagcagaggtttcagtgctctgtggagttttctagccaggtcactctcccaccctcacccctcatcccagggcctcttgaaggaagttgctgggatgcatctgacaagggtggccagggaggaggagatctgtgattccccaggcaggtggcttcaagtaaacacaggggcctggtgtccctttctagaggactaccagatgtcactcaccaggattttggcttgggcacctcttgatcctggtagagctgttccagttcctcatttttctttctcagatactgtccagggggaagagttagaagaagggccaggcccagtcaatgattcattaacaaggacttcctggggatatgtgctggggacatgggtgagcagagcagactggcctctgtcctccaggagcagtcaacaggatggccagatggacagaggaggcctatttcccctctccctacccccactttcccttctcactgtccttttcactgttttcactgggctggagagagaggacatctcctggggacatctcctggcatctcctggggacagcttctggggataagccaaagcctccaccacctggaggactacagcggagctccactcacctcccgatcagggatcacagaactctggtggctgaccacagccccaatctggctgctcttggggcgggagtggaagtagcactcagcctcctcctcaggcagtttcttcacagggccttccacacgcacctgctcagggatggctctgggtgaatggcattaaatgccacctgccctccctaccagcacaggccccgttcctctctgttcgatcggctgccccaccactcttggctccaactaactgagggctattttagaggcagagtgcccagctgggatgtttgcccagtctggggaccttcgctagacgtagccataaactcaggccctgccaacccagcccatcccaggctgtcctgggaaaattcactcacctgacggttaagtggctcccagtagaagacaagggaagcaaagggattagagtcctagaagtaaaagagaatccacagccagccatcaggacagggagaggaggcctccggcatgcagggaaaaggcaggagagctgtagtgcgcaggcccacagcagatgcacccaccgtaagagctcatttaaaccctcaaaagtaggcctattgtcacagacacagagacaggctaagtcacgtgcccaagttcctgcaggaagtggtggagctaagtttaagccagtcggactccaaagtgagactgggtgatttctctcacccacagatttgtgagtcttgagaaatgcatgcttggctggcatggactcagggaggtttactcattttggattcattcattgaatgcacgcgaagtgcccactctgggtctgacaacaggagacgtgcgggggatacagcagagataaaacagagcagcctccactcctacagagcttactgttgagcagaggagacaaatatcagttacataatcacccaaacaaatgctcagttacaaactgaagaagaagacaaaaaagaaagttgcaagttataatggcagcaaacagcatgaggggctgagtctgagtgagagtcaaggaaggcctttctgaggaggtaacatgtgggctgagatctgaaggaacaggtcatggctgatggggtgaggctggttagaaagtgcattcattcatttatggcaaagagcacagcaagtgccaaggcctcatggcaggagggcacctgcacacagagagcaagtagactgggggggtggggtggcataagaaggtgactgaggaagcaagagccaaaccctgcaggccctgggaaagattactagctcttttcacccaccagctcttttccttttcgactctcgaagttagtgaagaagcggaagccatctttcccgaagcccttcagcagcaacatgcgagcagagggttttccatctctaggagcaaagagcagagcactgtggtcagagtctgcttcaatgttctggctatagtccctctccccaaaggatgtctcagcaccccctccagctgcaccccctttattgggctgtcaggctaccccgtcccatgtgctcctggggatttgtcctagaggtatgacaccacagcctggggccctgttatgggctgaattgtgtcaccccaaacccctatgttaaagccttaaaccccaatgtgactgtatttggagaaggggaccttatggaggtaattaaggttaagtaaggtcataggggtggggccctaatccagtaggactggtgtcactgtaagagaagagacacttcagaaccacctcccttgccctccacaacacacacacacacacacacacacacacacacacacacacacacacacgaaaggcagtgtgaggacatggtaaaaagtagctgtctgcaaaccccaagcagaggcctcatcagaaaccacccctgatggcaccttgatcttggacttccagccaccagaactataaggaaataaactcctgttgtttaagctatccagtctacagtattttgttaagacagccctagcaaattcataagaccctaagggcagggactaacaataatgcaatcatccaatgcttcgggatcacagtggtgctatgagatcagcccctctgctcagagctctgggagatatccactcgcacagtacaagagcactggctacaaggccttacactttatcgaggagaattgaataacaggctaatacaagtgatgtctcaaagggcatatgattgtcaaaggaatgatatagtcaagcactgtgctagatttcgagagagagacagagcttcaccaggagaagtagctcctgaatggcagacggggcttgggtagatggggagatgagggaggcaaggggttgtgtgtggatgtatcaagggcagaaatgaacaaggcactgcatttttatcactgaaatgtaattttgtggcctggtctttggtttataggtaaggacacaggcccagagaggacaagtatcttgcctaaagccacagagcatgttaataacagagctggaaccataaaattggcatccagagtagagagcttcataagcttcctagttcatatgtatccacccaaagaggggcccacagccatgcccacctggtgcaggtagccagacacatggcattggcttcccctatgtcaggacactgaacagcctcctcaaaccaggcagcaaactgtttcactgggtcaagggaggtcagatgagtctcctcaaatgcctaggaaaggagatttatttcatttaataaacatatatagtgcttactatggacctggcactgttctagtcacttttcaaaaatcaactcatttagtcctcatgacaatgaccttaaaataagaaatagtatgcagtaagaagattctgtgccccattttacaggtgaggaaacaggcataaaaactcagacaacttgctgtcccacagctagtgatggataaatcagggttacatgtcatgggtgtcaaaactgtctgtgcatcagaatcacctggggagcataaaaaaaactttctgggctccacccccaaaatttctcattcagcaggtctgaggcttcatcaaaaactgcatttttatttatttatttatttattttagacagggtctcactctgtcacctaggctggagtgcggtggtgtgatctcggcttactgcagtctcaacttcctgagctcaagcaatcctccaacctcatcctcccaagtagctggaattacaggcacgctccaacatgctcgactaattttaattttttgtagagacagggtctcactatgttgcccaggctggaaaaactgcattttaaacaagcgtttctagaaatgcccacatgcaaccagatttggcaaccagggccctggaccccaattcctaaaaggttctcttggttcccctcctgaggagggaaaaggaaaagaacttcccagtggtcagcagaaagtactgaaggcagtaagctaagagctttctcctcccctcctccctgagctagtccccttcccccatattccacttacttttttgtcaaacagtttgtaagctgtttgtcactgtacccacctaaagaggggcccatgaccatgcccacctggcacaaggaggtttgggtgacccccaaatctccttgccccagggggtggccccagaagccctgaggggctgtttcctcctactcccctccccccagtagatgactccgaggacccctcttcccccgcccttgagggaggcccagcacagtcctgacatccatcacatgaaaccccgattcattcatcactagctgtgggactgagcaagttatttgaccttgctacctgtcgagtagcagggttctaagcactttacaaacatcttagaccataacatccccgtgaggcagatactatcacttcccagatgaggaaactgaggcccagatacattaaacattccaacccaggcaggctccaaagttcgagctcttacccattacgaaaggctgccttttgaacccatcttcatttgcgtttccccggaactcctcccctggtgggatgtctttgaagcccccttttcccacggggggtgatcctcaaacctccttgccccaccgggtggccccagaagccccgaggggctcctactactcccctccccgctgtagatgactccggggaccccttttcccccgcccctgcaggaggcctggccctagcggcggcacctctcggtccccgcggtaactcttgcgcatgggtcccaggtccatggcagcactgcgaccacacaggtgactgaggtagcctggccactcggcaggtcgcccgaacgtcgccgtgacgccccgcagccagcacgtcatggggggccgccggccacgtgacccggctgtggcccggcactgggttcctttgagttcggaaccaatttctcaccctggacttctaccccggggaaggaaggatttgccagtcgcccaaccaagctaacaggtcctaagtcctcggagccaatgagtttccaggatcggaggagggagacagacacggagaggtcattggttggagcttttcggtaacgaggccaattagagcgagaacagaggaacccagcggccaatgggtagcgcctttgggggcgggagcagagagacaaggaaatgctgtcaccgcggttaacacgcacgtggaggttggttaaaggtataggaggatctcttgcagctcaggcggggcggaggatgtgtcccgggggcttgaggggagtagtcagtattaagtggctggcccatagtaggtgcctgtaggtgagcttagggcaggaagtaccccctgggaagggagactagtggaatgggaaaagaaaaatggaaaatggaattaggggccagactctgaggcaaggtgatggggacacatagagaaaagggtaatctggttgtggggagaaattagggcatgagagtgggagaggttgaaatgacttgtggaccatgccccgagtggggaggtgcagtggggtgaggaagagacggtgaggtgagaaggaagatggctgaatgggaagggggaagaaggaaatttgggaccaaggtatcccagaccagagtggttttcctcttctagttttggttttgttttgttttgtttgagacggagactagctctgtcgctcaggttggagtgcagtggcgcgatctcggctcactgcaacctccacctcccgggttcaagcaattctctgcctcagcctcccgggtagctgggattacaggcgcccgccaccaygcccggctaagttttgtatttttagtagagacggtgtttcaccatgttggccaggctagtctcaaactcctgatctcaagtgatctacccgccttggcctcccaaagtgccgggattataggcgtgagccaccgcgcccgccacctcttctagttttaaaccccttccctccagcctcatttatttaagcaagggtcrgagcattttactccctttgctcatggtttcccctgccatggtgcactggagttcataggagccagtgtcctggtagatagcaaggctgccaatgtcccatttctccagggtctccccmatctttgtcaagcttccctttttccacattttgcccatgctaggtagtaggagtctagcccctaggtcaatgcaagcaattgccaactgagagtacactgagcaggtggctgtgcatagcctttccaggctgtggatgcaaggctgaaaaatgggaaacccactcatgcccagtccaattctgagctggctggggcggccttgggtcgagacctctctgtagccctgctttccaccagcatcaggaaggggaactgcaagagccatctaggcaggcacccaggactgtgccaggtaaggggaacttcctggcctggccaggtgtctgcattacagctgagcttcatgaagccctacattagatacctgtcatcctttatgtgtacatagcttgagccagatagaatctggaagacaattttgctgcaaagaaataatacatgtctcaaggcttaatgatattggtctatggattctccactggttggatttttttgtgctgccatcattttcctccatcagcataattgagagaaagttgagtagatttactttcctgttgaagttgtctttctttttttttttttttttttttttttttgagatggagtcttgctctgtcgcccaggctggagtgcagtggcgcaatctcgtctcactgaaagctctgcctcccgggttcacgccattctcctgcctcagcctcccaagtggctaggactacaggcgcccgccaccacgcccagctaattttttgtatttttagtagagatggggtttcaccacgttaaccaggatggtctcgatctcctgaccttgtgatccgcctgcctcagcctcccaaatgctggcattacaagcgtgagccaccgcacctggccgaagttgtctttctgtataagaacattgctgtactcctgccctcctaagcccctgcagttgaacctgtgtaagcagtagtgagtgcacttcaactcagatgggtttggttcatgggttttttttttttttttttttgagacagagtctccctctgtcactcaggctggagtgcagtggcgcaatcttggctcactgcaacctctgcctcctgggttcaagccattctcctgcctcagtctcccaagtagctgggattacaggcgtgtgccaccacacctggctaattttttgtaattttagtagagayggggtttcgccatgttggccaggctggtatggaactcctgacctcaagtgatccacccacttcggcctcccaaagtgctgggattacagacgtgagccaccgtgcctggccatggggtttttcttcacactcagcactcctgggctgctgctaccctggacctggattctaggacaccaagactaagatcatctatgtacttaaaagccaacagctcagtatagtggaagtagatacatatttatgtattaattcagtagacatttgttaaatacttcctttggaccgggcactgaaccaggtctgagaatattgagatgaagatgacaacccgggcttgtagtctatagggggaggcagatttgtgagcttaagagttgttgcagatttttttttttttttttttttgagacagagtctcaccctttcacccagtctggagtgcagtggcacaatgttggctcactgcaacctccgcctcctgggttcaagagattctcttgcctcagcctcctgagatattttaacgggtgtttctgtacagtaaagaggagcaaaaagaagaggatcaaacagtcaggaaaggctttgtaaagggagtggacatttgatgtcttaatgagtaagttttcgctagatggacratggaacaggcgtcccagcaagagggaacattgtgagtaaaggcatggtgcacttgggggaacctggagacatgtaatactgctggagcaaaggtgatgagaaaacaagctgaacaagcaggcagggataggtgctccttgctgcagagtcatcatgcaggtgcccagggtcaggcttttagacacaatgattctgatattttatcctgtgatattttttagcctgtgaaccagtgtctagttcctgctttttaaagaccagatggggagaaaaagtgctagattctgacagcgtctccttcccttggcgattagcaaagaagtgtgcagttgattgcccttttgtatttttccctttgtcttgaggataataagtagacttgggttatgtttttctgcttagttggatttggtttctgggtcacaaagcagcccctcagtgcacaaccagaagggaaacaagcctgctagctacttttgctactgacgcaaccacgagcagggactttctgagtgggagaaaggaattattttactgtttcagtcttctcttgagaaagtcttaaatgaatagaaaatacatagtaacatttttattgtacagagaggcacactggtttctcaagatgaaacaaaaaagtctgcatggccgggtgtggtggcttatgcctataatcccagcactttgggaggccgaggtgggtggatcacttgaggtcaggagtttgagaccagcctggccaacatggtgaaaccctgtttgtactaaaaatacaaaaattagccaggcatggtggcgggcccctgtaatctcagctacttgggaggctgaggcacgagaatggcttgaacccgggaggcggaggttgcagtgagctgagattgtgccactgcactccagcattggcaacagagcaagactcagtctcaaaagaaaaaaaaaaaaaacggtctgcatgtgggtttggggactgtgccttgcctgttttcttctaatgcttttccttttttttttttttttttttttgagacagagtctcactctgttgcccaggctggagtgcagtggtgcaatctgggctcactgcaacctccgcctcccaggttcaagcaattctcctttctcagcttcccgagtagctgggattacaggtgtctgccaccatacctggctaattttttgtatttttagtagagagggggtttcactgtgttggccaggctggtttcgaactcctggcctcaagtgatccaccctccttggcctcccaaagtgctgggattataggcgtgagccaccacacccagctacgtttactttcttaaaccaccttttttctaattatctgactaaattatgtatttcagttttactttagtgattggatttgtgttttggaacctggctctggtgaccaaatgggtgatgagcaagggagggtcaggctggtggcagggataggttgggagaagctgtggtgttgtctaagtggaaggtgggggcaggatcctgatgcatgagtatggcgtagggcatgtggagaggagggatccacccaccagggctggctttaggtgacacaggtggtgctgttcattgaagtggggcttgttggaggaggaggtttgggggaaaggtgaattccttagcaacattttgagtgtgagggttgatgggacacccatgtttggccaggttggataatggagtctggagcttcgtggggaggtcagggctgatgatactggtttaggtagcatgagcctcgaggtggcacttagagycacgagggaggatgagaatgtctgagaagggaagagggcctgggagagttagggasggtggtagggaaatggagagtcaaggaggagtggtaatgatgctggtgaaatatagcatccagctttcttttttttaatttttttttattttttgagatggagtttcgctcttgtcacccaggctggagtgcagtggcatgatctcggttcactgcaaactccacctcctgggttcaagcagctcttctatctcagcctcctgagtagctgggattacaggcatgcatgaccacactcggataatttttgtatttttagtagagacggggtttcaccatgttggccaggctggtctcaaactcctgacctcaggtgatccgcctgcctcagcctcccaaagtgctgggattacaggtgtgtgccaccatgcccggcctgtgtccagctttctaagaggtgagaggaagaaggctgatagcagagcaaggggtgtgctggagggcctgaagctcaggaattcttgggcccagccttgargtgaactcagcttggagccccaagagtagcaacaccaggacttacagaagggcgtgtgcttggtgctctgccagcagatgcctaagccctgagtgggtttatcagaggcccaagggaggtgggtcctcagaggcttgggacgagatcagaggaggctgaaacttatcggtgtcctgcctgttggtgcttgtggctaaccctctaaacgatccttgcatgtgcttatagatggcttcccaaatacattgtgggtggctggtattccctgttagaatgggacctccttcacgagagggaccacatctcttaactttctctggcttcttctcacaatcctagcccacaaggtgtgctcaaaaaatgctaatctgtaatgtttatgcataaaccacttttttaagcttttcagtatgatgggtgttacgtatggtgagtagggtgcaggacatttttgcacatggtgggagcagggctgagtgtgtgttttgttgttttggttttttttcttttctttcgttttttttgtttgtttrtttgtttgtttgttttttgagacagggtcttactctgttgcccaggctggaatacggtggcacactcatagctcactgcagccttgacctcctgggcttaagagatcctcccacctcagcctcctaagtagctgggagtgtaggcacataccaccatggctggctaatttttttatttttgtagagatggggtctcactatgttgctcttggtctcaaacccctgggctcaagcagtcctcctacctcagcctcccaaaatgctgggattataggcatgagccactgtgcccgtccacgagtgtgtttgttgactggagggatgttgagcttcaaagtccaagtgaattaaatcagtttcagtccccagactacctgccttggtaattatggtgtcggccacaggcagtgagtgggaggaggcctggtggtgggttttcaggcaggcccaaaggacatggcctagcggcttcctagtttcctttgagaaatcttggtccttgcatttggcctgccctggagtcagttctcatttccttttgcccaaggtccctatgagcaggtatttgaccctcttttccaggctctgagtcactaccatagtccaccatgrtttgcttccttttttacccacagccctgttcattattccatccttgcaggctcacttcctgcctcttctactccctgaggaccccttctcctaggaaacccaactgccacctgtcctattaccgcagtttctttagtgactcaccccagccccaaagaccttggttgaatcacaagtgttctctgtcccaaggcagcatctcatcctgagttaggttccttggcatctgtgttctatcagccatgagcccctgatgggtctggggacctgaggtggtgcaagtggcaaggggcagaatggaggtggggccatagctggcaagctctgcctagcaggtgcccacacctctcataatctccagaatctcagggtcctagtcaccatagtatgtgctgtccactctgattctgatgctgcttgggtgatcttgttccatttgcttcattttttacttctctattccaggtcttccattccattttattttttacagtaattttagacttacaaaaaagttacaaatatagtacaaagatttcccatacactcttcacctaccttccccaaatattaagatcttactaccatagcacaattgtctacatcaagaaattaacactggcacaccactattaattaaactacagaggccaggcatggtggctcacgcctgtcatcccaacactttgggaggcctaggtgagcggatccttgagtccaagagtttgagaccagcctaggcaacatagggagactccatctctaccaaaaaaataaaaactagaaaagtaaactatgggcttttttgagttttacccctttttctcccactcatgtcctttttctgttccaggaccccacattgcatttagcagtcctgtccccttagtctctcatccgtaacagttctcagtctttcagctgcttcgtccaggtcccctcaacttaagaatgggtgtggtggccgggcgcggtggctcacgcctgtaatcccagcactttgggaggccgaggcgggcggatcacgaggtcaggagatcgagaccatcctggctaacacggtgaaaccccgtctctactaaaaatacaaaaaattagccgggcgtggtagcgggcgcctgtagtcgcagctactcgggaggctgaggcaggagaatggcgtgaacccgggaggcggagcttgcagtgagccgagatcgcgccactgcactccagcctgggcgacagagcgagactccgtctcaaaaaaaaaaaaaaaaaaaaaaaaaaaagaagaatgggtgtggtgtgtggggaaatgggtccactcagcttggttttggagacaggacaagagatagggttggccttgggcagggtgagttttccttagggcagtgtgaactaggaaacttctgccatattcccttttgcctggggtaaaggatgatgctgctgataagaagttgtatctgtgtgcgtgaycacagcccactttctcaccgtgagctggggagcccagggtgttccccctgaggactcccagtcatgacagttctattaaactttgggcttgtctccctaaaagctccctggcatggggtaggtggccctgctgtgctgaataagacckcctgcctatgggaggacagtgtagaagacacacgcctcatgggaccctggtgtgggcattgctgtagggggtggatctagccccctctgactctgcagaggggtctgtgtccagtcaacatcatggccaagcttttctaggactggaaattaggaagagactgagacaatgtcaagattaatgactggggaccaggccctcttactgtcctgcaggacagcagtggacctaaggtagagctgaccccaaactcaggtgtgtacatcacgcaactgcagtctgcagagctgccacagatgtcacctgaaaagcccaggctgatgacacaatggatgctccactacttctcctgggggtctgcagcctgttctttcactattgggcaacacattcttgctgacactgccaccatgaaaagccgtttgcctgctcactggaggggtcagtgctggtctaaggtcctctaggaaaggtcagtgtgtcaggggcctggtgcacgagaggaactgagaacsctgttcaccccttacaggcaggggaagaagcagaagcaacaggtgcttgagcctttggacactgaggccagtggtctaacccctaggggctgtcccacttsctttggacagttgagtccttccactttgataatctcttgggcagcaggttaaactgtttggggagctgggtgcagtggctcacgcctgtaatcccagcactttgggaggccgaggcaggcgcgtcacctgaggtcaggagttcgaaagcagcctggccaacatagtgaaaycttgtctctactaaaaatacaaaaaatgaggctgggcatggtggctcacacctataatcctagcactttgggaggcygaggctggcggatcacttgaggttaggagtttgaaaccagcttggccaacatggtgaaacctcgtctctattaaaaaaaaaaaaaaaaaaattagctgggcgtggtggtggatgcctgtaatcccggctacttgggaggctrggaacaaaagaattgcatacccgggaggcagaggttgcagtgagctgagatcgcaccattgcactccagcctgggygacagagcaagaccctgtcttaaaacaaacaaaaaatgttttggccattgtgatcctgtaacttggggaagggaagactgagaggttggagactgtcagggggtagagaggatgtcactggccagggaagaggggatggatgatgcagaagtcaaaaactggtagctcaagcactgaaactggtcctgctgtatttttaaacaattgagcaaacatggaaagatcagattccaccccaaactccacatttctgggttctcttacaaaaatcacaagagtttgcattctcacataccatcaactggccgaagcagaataggggcaccccctgtagtcgggggtggatgtcccagttttgcagtcacacactccaatatttgccctaagcagagggtcactgacattgaccacagtacttgctttgttttccttatggttaaaaacagtttccctcctcgtccctggggcactggggttgcagtgggcctgtgtttaatcaaggtacatgcgggagtctattttgaagctgaagagaaagaggggggttgaatagcagtggggcttgaggtgaascccaggaagaagagagaatagtagtggggtttgaggtgaagcccatgctgactaggagggctctgaaacacaggtggagggaggaaggcgaggggtcccagaccactgctcaggaaggttctagtgatgaaggagccaagatcagaccaggccttagaaggcagagaagatgccttcatttttattcagaattgaaataatcaacagcttaacttctttggcccaatttctgggtgtggcaactttaaggggcaaccttaaaggggcctcaggtttgggcagtggaagactcaaatggagaacccgaacaccccattctctgcactcagaccaggacagctttcatccatccgctcagggctcctacacacctaccctgggcttggggatagatctgaacccttatcttgctccatcctgtcttcctcaaaatatgtcgtgtggcaggctgtaacatcagcactgtcatcaaacaagcctggggcctcacaagggcactggaaagatgattttttttcttttttttgagacagagtcttgctctgtcacccaggctggagtgcagtggcacgatctcggctcactgcaacctctgcctactgggttcaaccaattctcctgcctgcctcaacctcccaagtagctgggactacaggcatgcgccaccacgcccggctaattattatattttttagtagagacagggtttcactatgttggccaggctggttttgaactcctgacctcaagtgattcacccgcctcggcctcccaaagtgctgggattacaggcatgagccactgtgcccggccagaaagatgattgtaaaaatggactgggtggtctgaaggaagggcaaggaagacccatttgctggttttgttaaagaaaaaaaaaaaagtacatataatgcctggatttgcctttgggagggaaatcctgcccagtccctctttcttccaggcatggaatcctaggctctgggataatgagcacaatgccaagtgtcagctggacagagaggaagggcatgagggatgggctttggtgcacatgacgctggggacagtagaggacagaggaggaactacacatgtggggcccctacccttgagctgcacccagattttcatcaagggcccatcaggatcaggtgtctgtgggagcctcttgcctagggtgagcttagactgcatcacaccttcaacagttcccctgcaactctcaaataatggataggttaaagccagaggagggttaatttgcccacaagtctttctgtgctttccttgtgccatcactcagctaggcagaatacattctctcgctcttagccatcccaagggaggcagagatgatcagacataacttttgaacccccatctcactggagaagggaaatcctacatgggaaatgctcatcctgcccaacttggggctggcaccttcatttccaaatgatgctggggagtcaggtcagtttctgtactggaagcataaagcacatggcttgaaatcagctcccaggaaaggatcattctttgtgcctgagagcaaagccaagggaaacgtggcaaaaagaggtcactttgttaatattccccttctctccaccaatccccttattcagaatgcagcaaggcagttttctagtcatgcagtccacgcatgaggaataaatacacctcatgtcttccacctgctgccagtgcggtgatgagatgcagagctgaggggctgaggaagaggcttctgtgtcaaggtagattcagctggtggtctagtattgcccaaacgacttccgtagggataggaaaggcccctgcttgttaacaaagaagagggaaagggcagagaacctggatccatctgagatctgtgggctttttactttttcagccatttgagggttgactggctctaaggaaaagctgtttgctggcagacacaggtggctggtgacaaagggaacagagcaggggaatggatagctcaaaacgagcctygccactcctgaacagaacagcaatcccagctgtgtcctttcgagggtgagtgaaagcacatgctgtcctttacatgcttgaggcggacttgcctgtctcttcaggccggatgctcttcagggccctgtggggcttaaacacatgtactgagctagctccaatcttaatctgcacaacatcgcaacccctgagttcctattagttctgcaaaacaaagcaaaacaaatccccaccaaaatttcagatttgtagcatctgctaaaaccaaaaggcacaatcaacttcttgtcctctctgggttactgggcaggcgatatagaaggaaccagtatctgtggccagagtcctctatcgggtgcagctgggctccaggcctctctagctgccaagccctcccaggaacctgcctcgcccttcactttgggaagggaccttggcccttggggaaatgcattgttgccagactgtagccttctggaggggactgagccaaggccccattggctctcctctctaagcttcttattaatgggctctgaggccartgccttcctccaggggttggggaggtgggtggaagagctaagttgctggctgaggtcactgctgtaacttggctcttsgtatctgctttgtgtacaggcaaaactggcttacagaagaaaaaggcaggaacacctgcattgggccctggcccttggaggtgctctgggggctcgtgccagtgtcatgaggtatatgtggccgcggccccttttgggcatgtggcttgggtttgccgagggtcaggagggcaaggtcctaccttggtcccagtgtggatcgctctgagagaccacagctccctcctctggagtcccctctccgagctctccaagggaaaagacaaaggaagccgaactgccaagttgaagattttgcctcaggcaactaaatttattagcaagaaaaaatttttgtcagcccagtgctgaccaacaaagtacgttaataaaggataacaaatctgtcacttaattcataaaacatacctcaagcagttacaactaaaaataaagttggatttttgtttaatttaaaagcctcaaaaataacaagcaatgtgtttttaaacatgtagtagacacaattgtctattatacaatatacactgtacacaagtagagcttgggccgggcaggggtgaggtgaagggagagggaggaggtgcaggatgtgcaggtgctgttatctgaatccagatttgagtttaaatgctgtgtcatttagaaaagggaattgctagagtgagaaaaaattcatatgctcatcattgcccccaaccctcaactgaaagcaggcatcagggaggtgaataacaaggaaaggaagaagggagcaattaaataaaacttctttaaagcacacacagtacacagtgttcatcatctgaagtrgagtataaggcaacgttctccatagaaaaagagggggatcaggagtcggtgggtgtctttactttttaaatagagctggaatgtgctggaggagaggttgtggcggggctgggcacatggagtggaggtggccccgagtttctccagaggtgggtgccaagccccagggcgtccacagtggccggcagggccagggaggtgcaggagagggggcatggcatgacgcgactccggcagtgttgggagcggggatcggggtggggggtaggggctcactttgctcctcgacggagtgaaatgcatgtttttcctttggaaataagggttcccacgcgtcctggtttagaacgtctcattgggcacggccagtgtccacagtctgggcaggccgggagctcgtggtgaggggaagggccaaggcagagccaaggggcttcagaaggaggacaatacagggaacagagccccttcctgtggggacagttgcagaacaggagtggggctgagggcaggcccaaggcagccacagggctcctttccaccaggggcccagggaggacacaggtgggggactgcatcttcagggcctcccgccgcagttggccttacaagttcttcgtgaccaggtgggtcttgtaatgcttggtgaggtggtcactcctcatgaagcgcttctgacactgggcgcactcgaagcgtttgtcccctgggaagaggagatgcccatcacccacagaccctgtgcacagaccctgtctctgcccaaaaaggtggggtgcgtgtgaggtgcacccaatcaagctgacatggccttgtcaccacattctgcccacctcctgctctcacatttgctcactggtgcttactcatctatatctttttttttttttttttttgagatggagtctcactctgctggccaggctggagtgcagtggcacaatctccactcactgcaacctccacctcccaggtcaagcaattctcctgcctcagcctctcaaatagctgggactacagatgcccgccactgcacccagctaattcctgtatttttgtagagacagggtttcgccatgttgtccaggctggtctcgaactcctgacctcaagtgatccgcccaccttggccttccaaagtgctgggattacaggcacgagccatcatgcttggcccctactcatctaaatctctttatcaattctcatttctctctgaccccccatttgacctctccagtctatttcgttcccattccttgtccctggagcctctgcacctaagagtcttcctgtgcaaggctgtctgcctgctttcttcttttgtccctctgactttgaacctggatcagcatcctccccatcacaggaaaatccccctccaccctgaccttgccagccctgagcactcagttggaaccatgttgaccccaactgcttttctgtggagtgttgactcctctgccttttggggagtaggacctgtcccaccacactggccaggagccggagctctgggtcacgcttccctcagccctctagccccaggacaggtgtctgctcactgtgggcattcactatagcactgtttgccaaagtgtatgtgtggaccactgtggatacccaggacaatttcaggtggtagatgtataatccttttttttttttaagagatgggctcccgctatattgccctggctggtctcgaactcctaggctcaagtgatcacctgcctcagcctcccaaagagctgggattacaggtgtgagccactgtgcccagcttggatcaatatttttaatagttttgcattgatttgctagtacctaaaactataactgtgatatctcactttgggaggcagaagagggaggatcatctgagtccaggagtttgagaccaggctgggcaacacagtaagaccctgtctctaaaaaaattttaaaattagccaggtgtggtggtgcatgcctgtagtcccagctactcaggaggttgaggtgggagaatcacttgagcccaggagttcaacactacagtgagccaagattgtgccactgcactctagcctgggtgaaagagtgagaccctgtcttaaaaaaaaaaaaaaacaaaaagccatggcagggcctgggtgtgaacctggccgcaccagtcactagctgtgtgactgggccagctctccatgcctcagtaaaatgggcatcaacaggccggcgcagtggctcacgcctctattcctagcactttgggaggccaaggtgggtggattacctgaggtcaggggttcgagaccagcctggccaacatggtgaaaccccgtctctactaaaaatacaaaaattagctgggtgtggtggtgggtgcctgtagtcccagctacttgagaagctgaggcaggagaattgcttgaacccaaggggtggaggctgcagtgagctgagatcgcaccacttcactccagcctgggcaaaagaacgaaactccatctccaaaaaaaaaaaaaaaaaaaaaaaaaaaaggcataaacaaagtatcttcccataaagttcttaccaggatcaactgaggtaatcagtaaagtgcttagtactgtgcttggcayaccatgtcagtgtttgttaaataactatgctgacatggcaaaagttatcaggttgtgtcatgcaatgacaactattcctttcccattacttggggaaacaacagtgataacagaatggcttgaaaataatttcctatgtcgtccctagatagtctgtagcttttgctcagtgtggcagttccaggagtgtcaatgttgctaaagccggtagagtgggggtgggaggagaggcaggaatttgacctctgtgggtggagggtcccgaaggcagggggctgacctgtgtgggtgcgagcatgccgttggagctcgtcactccgtgtgaacctcttcccacagaagaaccagttgcagacaaagggccgctcgccagtgtgcaggcgcacatgggcacgcagcaaggacgtcttacggaacgtcttgccacagtcggggatgtggcamacgtgcttcttcttgccctgctctccagacctgagaattggggtgagggtggagtggagggaataggaagaggagagaaaagcggtagaggatggggcaggaacaggatgcagtgaggatgtggggtcaggtcagagagcacaaggaggcagggggcaaggtggcacagagctgccagctcttccttgcctggtctgtgccagcttgcagctctggacaactgtccaggaggggcttggggaacacaggccagccttgtggcttgggccttctccttgaattacctcttctccccatccttgcagttgggacacgtgcaggccatgcggcgccgcttctccccgggctgkgtctctccggccagggcttgttccatttgcagctggatctgggtggggctcagcccactgatggtcaggttgttcccagaaacattctgcactgtcagctgctgctgccctgtggggacaaagaggggcagagttcagggtgaggaagcctgaaacctcgagtcaacccttctgcccttctgcacatgacaaagatgataatcacagcagctatttttgagagcctgctstatgttggatatcattttaaggacctttgtacagggactcatttaatctccatgaccctataaaataggtactatcatcagcactttacagatgaagaaactgaggctcaataacatatcaagatcacacagctagtaagtggtagaacccagatctgaacccaggaagcccatttcaaagtcagtgccctgaaccactgtactatgtaggcagaatttgctttagaatattgccaacatgatttcagctgggaagggtcttaagacatttcttcctgaatctcctccaaccttaggcccctgtgagataccaactctgcttttaggaaagtctccagggatttctgttaaaaagacaagaggtcacaggctaggtacagtggctcatagctgtaatcccagcactctggcaggcaggacaattgcttgggcccaggagttcaagaccagcctgggcaatatagggagacccccatctctacaaaaaactaaaaaattggccgggcatggtgctacatgcctgtagtcccagctactcaggaagaagaagtaggaggactgcttgagcccaggaggctgaggctgcattgtcatgatcgtgccactgcacttcagcctggatgacagagcgaggccctgaggccatgtcttaaaaaaaaaaaaaccaaaaaacacaaaagaggacacagttctatgggctttgggaaaaatcagatcctctaggatgccttatcctcttgggggtcacctcaagagggaaaagcaaatgtgttaaagtgctaaacattcattaaggatgggctgggcacggtggctcacacctgtaatcccagcattttgggaggctgaggcggatggatcaccaggtcaggagttcaagaccagcctggccaagacggtgaaaccccatctctacgaaaaatacaaaaattagtcgggcgtggtggtgggcgtctataatcccagctactcgggaggctgaagcagagatcgcaccactgcactccagcctgggcgacagagtgaggctctgtctcaaaaaaaaaattcattaaggatgaagagaaattcagagagctccccctacataaggagccatttttgctaggttgctccaatttttcctttggttatttgcaaggctggtttcacagcataaatctcaccactgaactgaagtgcagcacaaactattctgactgccagggctcccttcttttcttccaaccttaacgcaaggctttctccttcaagaasccgtctttgcgtttggatgtcagttggaaagttttccgagtacatctatcttctctgtcttcagctgtcagatggggacatgtgccttaaactatctctgagtgctattgtaaggactaggtgagaagctgcaggtggacgtacccttaagctatgatggacagcatcctcactattgttactggaaatcccggggccagcccatagtttccacctgctaggagcaggtaccactgccaacaccctggccacaggggccatcctcaccgcctgtgttggtgatggtgacaggcacgccctggacctggacaccattgatgttgatggtctgcattgcctgggcagctgccgccaactgggctgcattcaggctgatgatgctcccggctggggcaatctttggcaggggacgctcttttcggagaattgcagctgagtgctttttgctggtcccactcagatggggagcacgggatgcagggctgctacaggtggtgttagaggtggctgcagctgttgctggggggctgtcctggacaaggactgtctgcacctcaccggaaggcgtgcggatgtagacctgggaggggccagagaaaaaaaatcagtgcctggaagagactaggttcctggggccttcaaatgtccctgcccaagtgagaactgggggcgcctgtccactaaaagtctcttcaattcacccaaacctacatttatacacagctaatgctcgacaaatggctgctggcatcctatactaagctggcgaatgttgactattgatttgaaaccaaacgttgaatttacttagcatggaaaaagtaattgccaagaatcagaattggagatttagaaggcagtgcactgtgaatgaccatcaaacaaatgacacaggttcactttagtttttaagagccacattttagagcccaggaattccaggttttcataagctatgattcctctactgcacttagcctgggtgacagagcaatacgctgtctcaaaaaaaaaaaagtttctggtctttgttatcagaaaaaaaaaaaagagccacatattaatgaaaaacaacttttctccaattcagattgacaaacatggaaaataaaatatgctcattgttggtgagacagcaggaaacagacacttgtatattaggagtggaagtatgatgtgggctaaacttgctggaaggaaatttggggatatgtatcaaaaaccttaaaaatacgcaaattagaggctgagcaggacaaggagggcatttgtagcggggaggagggtgtccgtggtgggtagggaatggcggtggcaggctgaggagggtgtctctatgggagagctaatggctgtgggagactggctgcataccgaggacttatccagaaaggaagcatgttaaggataataggagtgagggctctcactgtcacagaagggagttatggaaagggagaaggctagacggaacactgtggtgctagatgggaattagagacattggtggaaactcatgggtttcaatatatatagacagagaaatatagattcaaatgtgtgtatatgtgtatgtgtatacatgtgtgtgtgtccttatataagtttatctacatctatctacgtagacattgcataggtatgtctatttatatatacttcctagctgtgtccattgagaagggctgggaccagccatgcccagtagcaatgagcttacctagcacccaggccttagcttgtaactcacatgctccactaaaaggaacccaggctccttggagaaatagctgattccagggttggggcagggaaggtacaaggaaagcttggaacacttgcaccagaaagtaaagaaatgcttacagaatggtggggacttgaaaagatacaagccagcttaaaggggcacccactggccaaatctaggtcaatgaaaacatcaaaataatcttaacagattataacccagtgaataaaacaggaatctggctgggtgcagtagttcacgcctgtaatcccagcactttgggaggccaaggcaggcggatcacttgagatcagtggttcaataccagcttggtcaacttggtgaaaccccgtctctactgaaaatacaaaaaaaattagccgggagggatggcgcacgcctgtaatcccagctactggggaggctgaggcaggagaactgcttgaacctgggaggtggaggttgcagtgagtcgagattgtgccactgcactccagcctgggtgacagagcgagactccatctcaaaaaaacaaaaaagcagcaatccgtgagtccataatgacataaataaataaatgggggaggaagacaatgacagaattaaaaagaggcaatcacatccttcaatgagaggaaccaggaatctgagaagaaatggttgaccctaaggctgaggttgggaaaatataaggaatgaagttcagacacatgctacaacaggatgaaccttgaaacatgctaagtgaaggaagccagtcaccagacacatgctacaacatggatgaaccttgaaaacattacaaatagaccagtagttgtcaggggctgcagagaggaggaaataaatggggagtgatggctaaagggtagagagtttctttttggggtgatgaaaatgttctaaaattatatagaggtaatggctgcacaactctgtgaatatactaaaaatcactgaattgtatactttaaaagggtaagtttcatagtatgtgaatgtttcagtaaagctgattttataaaaaaaragaatgagagcctgtcagagggatataagagccaacctgaaggctgggtgtggtggctcgagcctgtaatcccagcactttgggaggccgaggcgggtggatcataaggtcaggagttcgagaccagcctggccaagatggtaaaaccccgtctctactaaaaaaatacaaaaattggccgggtgcggtggctcatgcctgtaatcccagcactttgggaggctgaggcgggcggatcacagagtcaggagatcgagactaccctggctaacatggtgaaaccccatctctactaaaaatacaaaaaatcagctgggcatggtggcgctcgcctgtagtctcagctagttgggaggctgaggcagaattgcttgaacccgggaggcagaggttgcagtgagccgagatggcgccactgcactccagcctgggtgacagagtgagacttcgtctccaaaaaaaaaaaaaaaattcaaaaattagcagggcgcagaggcgggtatctgtaatcccagctattcgggaggctgaggcaggagaatcgcttgaacccgggaggcggaggttgcagagagccgacctgaaaagagctgccaatggccaaagagaaaaaaagagccgacctgaaagagctgccaatggccaaagttgacctttagccttcaaaagtgtcaaggtcatgatggtcaagtaaagaatgaggaagtcatcctggccaacacggtgaaaccctgtctctactaaaaatacaaaaaaaattagccgggcgtggtggcacgcgcctgtaatcccagcaacttgggaggctgaaacaggagaatcgcttgaacccaggagttggaggttgcagtgagccaagattgccactgcactccagcctggtgacagaacgagaccctgtctcaaaaaaacagaaaaaaaaaaaaaaaaaaaaaaggaatgacaaagtgtttcagatcaaaagagactaaggagacaactaaacgtaatgtgtaatattggatcagatccttttgccacaaaggaattagtggggcaagtggtgaaaacasagtggggtcttggaattagcagtgtgtttcactgctaatttcctgggtttgacgattgtattgtggtaatgtagaatgttcttgtgtgtaggaattaaagcgttcagaaatgacaagggggatcatggtggcaatttacactcaaatgagtcaaaaggaaaaaagttctttgtaaaaaaaaaatcctgttgtgattttgatttgggtaatttttaattcctggattatttatgactgtgcttcttctcacttaaaagctaacaaacatctcatctctttaaaaaaaawtttttttttttaaatagagacagggtctctgtcacccaggctaaaatgcagtagaatgatcatagttcactgcaatctcgaactcatgggttcaagtgatcctcccacctcagcctcctgaatagctgggactacaggtgtgtagcaccatgcctcactaatttttaatttttttgtagagatggggtcttgctatcttgcccaggctggtcttgaattcctgggctcaagcaatctctagcctcagcctcccaaagtgctgggattacaggcataaactacctcacctggcccatttcttagtaaatatgcaaatctcattcccagttttctgatatgtgcccctttttcaaatcactgatattttatgtctgattttgtgtgtgtgtgtgtatgcgtgcatgcatgtgtgtgtgtgtatttgcatctgaaggttcagcaagctttttttataaagggccggagagtaaatattttagctttgcggggcatattgtctctgctacttaactgtgctactactgtagtgcaagggcaacacaaatggacgtgtctgcactccaattaaactttatttacaaaaacaggcaggtgggctagatttggcttcaaagttggtcacagactgcaaacctctaatatagaatacaaawtttttaaaaatgtacgtgtccttgacccactttcagggatttatttagctgtaagattggaaacagcctagatatatacagttaacaaggtatcagttgtataataatcagcatgttgggatgttataaagctgtgtagtcatgaaaaaataatactgtagctaaatctttctgcatatgtatcattatttccttagggaagacctgggttttagtcctgtctccatcaacctcaagaaatggsacctcatggaagggaggggaggcaatgccgaggatgtgctcctgagcaggtgccacaattcttcacctgtaaggtaggtctgatcatgggaattcacagatatttgtgatagatgacttataaaaaatcacctggcaacataaaatatcacctgtagggtaggtctgatcatgggaattcacagatattgtgataaatgacttataaaaaatacctggcaacattaaatatgccagaagggtgaattcctgtgtgatttctatgtccacagttcaaattcaaaggctctcttctccacccaggaaattacacaacttcccactctcagtcattcggttcttcctctatagacaactaggtcatacattcctcgatggcaggaactgttttttatattaaaaaaaaaaaaactcctcaattttaatggtagcacctgctacacataagacacaagagtcaaggtggaagatggaagagtgtggggtctgaagttacaaatctcaattgactcctggttcctgtcatttatgccctatttgatcttggatacttcataaattatctgagttctgggttatccatctgcaacatgggcacaattactggcacttagcaggcatgaacaaagaataaaacttgcctcacagagccaaagagattccagagtattagagcacattaataaatgccaaaaataagaacattcttgttgaattcagcatcccagtttggcaggaagcagtggctcagcctggcatggtgacatacacctgtagtcctggctactcaggctgaggtgggaggattgcttgagcccaggagattaagactgtagtgaccgcatcactgcactccagcccggacaacagagtatgaccctatctcaaaaaaaaaaaaacaccctaaaacaaacaaacattccagatgaatctagcctaaatattcctgctataaagctaggctgctcttcctgtttttttcttgtcattaataatgatcagcatttttctcattaattttcttactttacataaaattctatgaactggaatgttttcattcttgctaatgttttgagtaattctataatcaaaaataagttattaacaagtatgtatctatcccctcaccatcccctgaaaaaaaacaacctataaggaaaaggkgccaaaatatccctatgtttcatcaatttctaaagataagaagtacttggccctatgaactaaagagagcccatttgtcaggtagaaacggccacttactgcccaccccaaaagatactgactctcaaggtcagatcaagctgggagatgaccagcatcatcttcaaagcaagccaaaaagagataaccagaggaggagraggaggacagtacagggagtgtggtacctgagtaggtgtcggctcagctgcctggatctgaaagttctgggagggcttctggggtacagtggggagggtggcagatgccgcctgcaccayccgcagagcctgctgggggatctgtaccacctgctgctgctcggccttggggggcaccacctggacctgctggaccacagctggctggcccccaccagggctctgaacaatgagcaggttatttcctgcctggatgatgttgtccgcggtggtctcgatcagcaccgtctccacctgctcagccacagccacagggggctgggaggcaggaaggctcttcttccttgctttcttgttagtcttagacagyggggttggggggctttcagtgaggagctgagtaggggccccggtgtcactggcgttcacraggttgttgacgggcagagtgagcgtcacattgccgcccccacctgtcarcttcaccacattggccccgctctgcacgggggtggtggtcgtactcgacttctggatgggggctggcttgatggggacaggcttgtgactggacggtgagggggtgatgatggcttggttggtgccagggatgatctggatctggttggtgagattgggctgtacttggatggtttgggaattgcttgcctgaatctgagggaccgcctggtactggatattggcatttgatcgggtccctttgttgatcatggtgggattctggatagcgaacaccagctgccctccaggataggaggcgctcagttgtgacccctgaatctgaagtatatttcctttggaggacaagattccaaagctattcttgccggggctgagagggagaggggcaggtttgatagggacaagtttccgcggtgtgggctgtgggggagcaggaggtgtcacagcagcttcaactgctggagggccaattttgctacatgttgcagcaagcagggctaagggagatggctgggagtcctgcaaaaaaacagcagagaaaaggagtgagacaggaaggcccgctgcccggccrcctctgtccatgatcctctcctcctggcggcattccacgccagtcttccccacctccggggcaggcatgttgccagtaccctcccctgcttggctgctgtctccccttctctactggtttctccattaagtgagggagaaaaggtgggcaatgtctttctcaggaaggaacccctggcagcaccccacagacagggtaaactaacagcacgagctgacttcctactctccgctggccttgtttctaaggacagtgaagcatgtttggctctcagatggagtttgttagcccaccccagggactgaggggtccctgattgctcaactgaggaaaggagggaggaaaaaatggaggggcaacaggaggaataaatacttcagtaaagtgctttttagtactcggaacatgtaactttatagactggggagggctacactttcgagacaatgagaaagcctctgttttccttttccttttttagtgaggtctggtggaaggaacacagagtttaatccttgtttttccccctggcccaactgcggcaccttaggtaaatggccatagtttctcagtaaagaaaatgtggctaactgaaccttccccagtctcataacctagggtatttatagtgagacagtgaagagagagtgttttcggtgagtctgtccaggatgctgcagccccaagccctcggagcccactgcctactcgcctgggtggtggaggcggcaggctgcaggtagtcactgggactcacagcagcagtggcagccatgctggtctgtggatctgttggaagaaaagagatggagtaatgtataaaatgcccaaaaagaacgcaagcycacttgcctcagattttctttttttctatttttttttttttgagacggaatttttgctcttgttgcccaggctggagtgtagtggcatgatctaggctcacggcaacctcccccttccaagttcaagcaattctcctgcctcagccttctgagtagctgggattacaggcgctgccaccatgcccagctaatttttgtatttttagtagagayagaggtttcacaatgttgtccagactgatctcgaattcctgtcttcaggtgatccacccgccttggcttcccaaagtgctgggattacagacataagccattgcacccagccagattttctttttgcctctatttgttgctgcttctccaagggaagttaatgacttttccccagacttacccaccctgggttgatagccttacatctatttcagtagattactttctcctctcctctcctcagactcagccatctgaggctgtgaggacagctggtcctgctgtcgttggactgccccctccagccaccacagagtctgagataacacaaaaataaccaagattataccaggactctcttctgtaactcagctatgccctctctgctgggcactgctggctctccatagctaaactggaactcctctatggtgggcaggggggagctccccagctaatcctctagctcaaactcaagcctcctgttcactcctgctgtagacagatgccaaaactgggagggaagtatcgctcagccaagatttctgacaaggaggacacacctgctccactgccaagtcttgggtgttttatgctcagccttcaccacaaaggccgttgtccccaggcagcatatacagcacatgggtcaattctttttttttttttttgagaaggagtttcactcttgttgcccaggctggagtgcaatggcacgatcctggctcattgcaacctccacctcccaggttcaagtgattctcctgtctcagcctcctgagtagctaggattacaggcatgtaccaccatgcccagctaatttttgtatttttagtagagacagggtttcaccatgttggtcaggctgttctcaaactcctgacctcaggtgatccacctgcctcagtctcccaaagtgttgggattacaggcgtgagccaccatccctggcctcatgggtcaattctttacttgaatttacgcttttacatagtacaataggcacggccccacaggcatcaaccaagactcagtagagctaatgactaactggatataacaaggagaatgaaaacagagtaaattctatttttgtttaaatgtgtatatatttctatatatgaatataatcaaataggaaaaagtcttaagccattatctcctagcggttgagttttgtttgacttaaacttattttgcaccttggttttctgtactttttcattttcccatgataaatatattctactgtactttttttcttaaataaagaaaaataaggttgaggaagtaatgaagggactctctactgtgcacttaagtcatccaaaagaggctaggtacagtagctcatgcatgtaatcctaacactttgggaagccgaggtgggaagatcgcttgaacccaggagttcaagaccagcctaagcaacacagttagaccccgtccctaataaaaattttttaaaaagaaagaaacacagtatcaggaaaacgaaagtcatgagaattttaggagaaagaatctataccatcttaaagtgcataaatcactaaggaaaagaacaccaggcagagtcagacttcaatcctggacctctggaaagcagatttcagtaagtacagaaataagaggggtattactttaaagactaaaagagacaaaaaggctcaggatgcattctgcttggaaggctgagatggaaggatcacttgaggccaggaatttgaggctgcagtgccctattatcacacctgtgaatagccaaaacactcctgcctgggcaacatagcaagaccccatctcttaaraaaaaaacaaacaaaaaggcgcaggggttgagtccttgtaaggaatttggcaaaaagaggatagatattgggctgggtgtggtggttcacgcctgtaatcctagcactttgggaggctgaggcaggcagattgcctgagctcaggagttagagaccagcctgggcaacatggtgaaaccccatctctactaaaaagacaaaaaattagcagggcgtggtggcaggtgcccgtaatcccagctacacaggaggctgaggcaggagaatcatttgaacccaggaggtggaggttgcagtgagctgagatcgtaccactgcactccagcctgggcaagagtgagactgtgtctcaaaaacaaacaaacaaacaaacaaacaaaaggatacatattgggaaagcagaaccgttcacattttggctggcctcaggcttctctgtttggaagaacaattcttaaatggggaaaagtaaagaaaaggtgaaggcacgggatgcagtgactcgtgcctataattccaacacttcgggaaggtgaagtgggaggattgcttgaggccaggaatttgagaccagcctgggcaacatagggagaccccatctgtacaaaaaatttaaaaattagctggacatggtggcacatgcctatggtcccagttacttggaaggctgaggtgggaggatcgcttgaacctgagaggtcaaggctacagtgagtcgtgatcacaccactgcactccagcctgggtgatggagcaagatcccatctccataaaaaaaaaaaaaaaaaggtgaagtggaaactgaagccctggataggtgatgagctggtaagaaagcacaccagtgccttaaatggttaccaggcctgaagtccacacaaactatactccagaggaggggagactttgcagacacacctgcaaatgtgtatggagctggagggcagctctgggcaaaattatatatgcagatcccgtaatattacaggcactgattcttggcaaaatcctaggacaaatgattgaatagtactgttaactactgaggaaaggaaggagtgaccacaaggaatagcattataatatagaagaacaggtcatgctgaacaaatctgtttcttttttgtagggttttggatggatacatcaagagcatggtatacaccaggtattttatttcaacaggcatctggctgacattttcataatattcttgtgaacaaacaaggaggaaacttgggcaatatgatagtctagtttgtctggggctaagctgagcatgcctccacctaagtgctgagaagtctgctgctgcaaagtgtctcgaactggggtgggtctcaggaccagggttcacaggcatctccgcagaggcctttttattcttttcttgtgtgttttcactgtgatttttttttttttttttgagacggagtctcgctctgtcgcccaggttggagtgcggtgacacgatctctgctcactgcaagctccgcctcccgggttcacgccattctcctgcctcagcctcccaagtagtgggactacagrtgcccgccaccacgcccggckaattttttgtatttttagtaagagagggggtttcatgttagccagaatggtctcgagctcctgacctcgtgatccgcctgccttggcctcccaaagtgctgggattacaggcgtgagccactgtgcccggccaatcttttttttttttttttgagatgtagtctcactctgttgcccaggctggggtgcatgatcttggttcactgcaacctctgcctcccaagtagctgggattacaggcacccaccactacatccggctaattttttttgtatttttagtagagacggggttttgccttgttaaccaggctggtctcaaactcctgacctcaagtgatccacccaccttggcctcccaaagcgctgggattacaggcatgaatcaccatgaccagccaaaacaaagatttatttgtttgtttatttatttagaaacaaggtcttgctctatcaccctggctggagagcagtggcgtgatctcggctcaccgcaacctctgcctcctgggctcatgtgatcctcccacctcagccccccaagtagctgggaccactggtgcacaccaccacacccggctaatttttatgtattttctagagacggggtttcgccatgttaccctgccttttctcgaactcctgggctcaagcaatcccattgcttccacctccaaaagtgctgggattacaggcatgaaccaccacacccagcccaatcatctttttaaaaatgaacatataccatagatcaccaggtaactgctgcataaccaagtcctgcacatttcagggcctgtgtgtgtgtttacaagtgcactgtgtgggctaattaggacaacttcattctgcacatttagttcacgatacatctgtgcaaagtgaaagatgacataactttagaagcagtggaaagactgtattactctgactgacacgctacaggatgggtgtgcagaactcaaggagcctaagtgtcaagtctgtgccatgcttacaaggaaaagcaatgatttgggttcagtcaaacatcaccctctcagaatgatgctgataatttgaattttactggctttttttgtagttacatgtgtgaactttataggagctagatcaatgagctgacacacagattcatgttcatataaaattaagttgtaatattataatgaaaataatctaagccaacccaaaccatttttcctttagagtggtagtgttcaaactatcagaccacgaaccacagttacagaaacaatttgcatcaagacccaccatatgcatacatacaccacacatttctgtcccatgctcatgcaatgaaagtttcctgaaacaaaactcccttattacatgtgacggaccgtgatatttttctattctgttttgtttttttaaatgctggctgtgacccactaaattggttttgtgccctacaggctggaaaacttaggctttagaatggtattcaccacccaagtttggcaaagatctagacgacaagtaaaacttgcagatgttggccaggcgtggtggctcacgcctgtaatcccagcactttgggaggttgaggcaggtgtatcaggagttcataccagcctggccaacatggtgaaatcctgtctctactaaaaatacaaaaaaattagccgggtgtggtggcgcatgcctgtactcccagctacttgggaggctgaagcaggagaattgtttgaactttggaggcagagcttgcagtgagccgagatggtgccactgcactccagcctgggtaacagagcaagactcggtatcaaaaaacaaacaaaaaaaccttgcagatgtcacaaaagtgagaaggattggaaacacaatgggtattagtattagagttcaaggacatcttaaaaaactggtaggtacaatgtttaagaacatcaggctccatacctaaatgagattctgactgtgtggttcattagtgggatggtccctcttagcctcctcctagtgccctctgtaaaacaaaggtaatgtcatccttctaggatttctgtgaggctctaataatttatatcactgcatcgagggtttaaaggcatatatggctttaaagtttaataagtcctggccaggtgcagtggctcaagcctgtaatcccagcactttggaagggcaatgtragcagatcacttgagctcaggtgtttgagcccagcctgggcaacatggtgaaaccttgtctgtatattaaaaaaaataagtcctccacttaggttaaaaaaccaatcacatgcatatagggcagaaagagcctaatagtgccatgtggaaaagccccagaggttttgactttaagctgaatgggggccagcacaatctagatatggctgccaaaaaggctactgcaattttggattgcatttctaaaagttcagtcatagaacaaaaaaataatatcctcctgtagtttacacacttgggccacatctggagcatcaggttctgttctgagggacattttaaaagggggattttcagctggagcttgttcagaagacagcagcaatggttgtggtcagggtgccagagtggggacatgggttcaaagggtagaaccaagactcctgtgtggacattttgaggcagattttagttaacacaagagagaactttgaaaagatgaaaatcagttgccttctgaggtactatgttctcccttctctggaatcacttaaccagaggcaggacatgtgtccctgctgkagtcaggatgttgagatggggtgggaagttggaccaaatgatctttaagatttttattcatggccgggcgcggtggatcacacctataatcccagcactttgggaggccgaggcgggcagatcacttgagctcaggaattcgagaccagcctggccaacatggggaaaccccatctctactaaaactacaaaaattagctgggtgtggtggtgcgcacctgtaatcccaactactcaggaggctgaggcaggagaatcgcttgaacccgggaggcggattttgcaatgagccaagatcgtgccactgtactccagcctgggcgacaagagcaagactccatctcaaaaaaaaaagatttttattcactggaagaaagtgcagtgatttaaaataagttaaaaaaaagatttttatacttctcagaccatgttgctgataaaaatacaagatgagtttgttgctggcagaactgcaaaggaaggcaatggctctcccaggaggctcccccagggctcaggtttgcttagctaaaattagtgaatgactctcttagacatcctctattataaaacaagagacataggatccgcgcagagtgtaaatgaaatgagacgaaataaaaactggcctagcgtttcttcatcatctccctctctgcagtccttattaccctggactcaaactgtttggacactgggctgggttctgagtgactcttcagttaggaggttaaagcagaatctactgaagcaagctgcagactgctagtgctggacgttgcaccatttcagcttggtttcattttcctccccagctggttcctgaaatactcctatagatctcaaaccaatgtttgcaagtatcttycctagcgtcactcagagctttatggccacaggctgcagacctgggcaaccaaaagagagaccgatctccctgccactacagaattaaccacgaaaaggaaaagagaggcatttcccactgatgtttggaaatgaaaagtggttaagaagaggtagcatagatacctaactgtaagactatgatcaaaggcactttagaacctcattaatttggaactttatatttaaaatatacaatttggacataaattatgcttaacttttctttcatactatttaaagcgagcctaaatggtgttcgaagattgcaaagggacccttagtcagaataattgttttataccacttccgccattttaatagtgccacttggttttaacagtagtttacatccggtcactgaaaccaacacttaacaacataggtaagtgggattagtgcatattcttgaaagaaaaagctgcattgctttcaaagttatatcattcagacttttcattaagttaggttggctaaaactttcccaacagtccccaagctggtgaagttttacaattatttactatacaagcaatagtacctctcttaggttccatggaaaactccaggggcatcaaacaaagtttgaaggcagcatggcatagggatggggttgcaggtgcccgatgggaccacacacaacattcctttcccatattggaaaccaatttaattccaaaaccagcagaaaagcatcccctgagtttctagactcttgatgtactactgatcatccgcctctacctcctgtcccctccagcacagccttctcttcctacccctttggccaaacttggtagaaaaactgctggcaccctgccgtcccctccctccttccctactcactcatttcccggcagcattaggacatccaccctggcactgcgctcatgctgcacctgcccaggtcaccagcgacctccttgctgctcaatccaatagcccctctgaccagtgcctcttcctcaaaattcccatggattttctcccacctctcctgccacctcttccccttgtgggctcctcttcctttgccacccttaaatactgatgttccccaacatctgtcctttctcctcacccagcaccctttccctgggtgaccatgcctactcrcacggctttacataccttccacaggctgccaactcataggcctgtgtctggcccagatctctgctccacgtgttagacctgtacatccagccctctgtgggtcttccattagggctggccacagacacctggggcactgagcgacagctttgcccattctttgtccagccttctcaccctcagccaccacaggccttcttccagatccttgaaaaacttcagtgtctgcagctgtctttccttgcttacagctctttctgttctcttcactagctaagacctcacccttcaggtctctggctgtttgactttcccagcataatttaagagccattatgtaacaggcatgccatttcctcagagaggcctttctggacccctgagatgaggctaactcctttgggaacactcaccactcattaactaatcatgagcccaatgtatgcgagggctccccagggtgggccatgtctgtttacaccactgaactgcagacaccaaggcctggcacatggctcacggacaccttcagtgcctatgggctgtatgaatatcctgggttaaagcagcctctcttctggtatctccaatcaggacaaaacctgagtatccccctcactgccaaccaatcatcaagtcctcatgattccacctcatagacaaatctccctatagtgtacccaggctccccatcctcatcaccatgatccacctgagatactgcctacggcctctaaaactgcttcctggcctctggcctcccccttagtcagcctccacaatttggttagaaggctctttttaaagtgcaaatcccatccagctactctcctaattaaccccctcaattgttccctgatgctcttgtgataaacttataaaggccagaacaacctgtccctccctggtcctccctcctgacctctttcccttccaactctcccaacacacacttcagtttttcatttctggaattaaaacacgccaccctgtctcacttggagcctgaagcacactctctcccatttgcccggccagctcctgtcctttagagctcatttatactctcactcagcgaaagcctttcctgacctcctcccacctcaaatctggggcaggtgaccctgctacctgccagtgcatactccaggcacccttcggcactgtcccatcaacacagagctgggagtgtgtccctgtcccacggtctttctaggcctgacttggggagagcacgtaacaggaagagagacctctgagccctggccaccaggctgcaggctgttcgactgttcctttcactgagaatgctactcttgagacccagcaaatgagaaaacgcgcctacagaaataccacaacagtaggctttaggaagctttttcttctggagagaactaggctccatctccacaacccaggccttgggggtaactcggctttttttgcctgtgggttcctgycatcgtgggtctggctttcttggctttttgctatggtatttcccctggaggaatttcacactgtgcaaacagtctttctcttggctattttggtcagctcagctgggccgtaagccaacaaagcagtttctaagcccaggcttttccagttgcctagcctggaagaattcagagctggtgagggaaaagcatgccctggctggttttagagaacaaagttggacctcaaagaaagctcacaaatggggtatgagaatccatttggatgaagaaagcagcaaccttggtagtgaaagactccaaattgtgctgaatatttcaatgagaggcaaacctcagcaatcataataactattataaggtgggcacggtggctcatgcctgtaataccagcactttgggaggccgagacaggaggatcacttgaggccaggggttcaagactagcctsggcaatacagcaagatgccatctctacaaaaaatgtttacaaactagctgggtgtggtggtgtgtgcctgcagtcccagctccttaggaggccaaggcgagaggattgcttgagtccaggaagtcgaggctgcagtgagccatgattgcaccactgtgctctggcctgaatgacagagtgagaccctgtctttaaaaaataataataaaaattttaaataaacaaataaattaaaaccatggtaaaagagcccattaacagtaaaacaaatttcaatggctttcatttcaatgagaacaactctgggccgtggcttgctaatgccacaggccgaagtaagcaagaaggtgagtaaggaatggagatcttgtctccacattaaccctttactgagcctcccatctccccccactccgccatctcagacccccagcctcaggcaatgacccttaggtatgtctacaatttcatcaagaagttaaaatttccctcatcagctaagatccattatgtctccccttctcttcaagcaaaactccttgcaggagttacctatacttactgtccttaatttctctcccgctagcttttcttaaacctgctccaaccaggctgcaccctcctcatgcatgccacgaaaactgttcacaccaccagacacctccatgttgctaaaaacctaatggctacttctacttcttttttttttttttttttgggacagagtctcactgtcacccaggctggagtgcagtgccacaatctcagctcactgcaagctccgcctcccgggttcacgccattctcctacctcagcctcccgagtagctgggactacaggtgcccgccaccacacctggctaatttatttttgtatttttagtagagacagggtttcactgtgttagccaggatggtctcgatctcctgacctcgtgatccgccagtctcagcctcccaaagtgctaggattacaggcatgagccactgcacctggcctacttcttttttttttttgagacaaagtctcgctctgttgccaggctggagtgcagtggcacaatctcggctcactgcaacctccgtctcccgggttcaagtgattcccctgccttagcctcctgagtagctgggaatacaggcgtgtgccaccacgcccgactgattttttgtattttagtagagacagacagggtttcaccatgttggccaggatggtctcaatctcctgacttcgtgatccgaccacctcggcctcccaaagtgctgggattacaggcgtgagccaccgcgccggccatggctacttcttaaaccacgtcatccgtgttgctctgacagttgattgctcttccttttggtcttggctcgctgcaacctccgccccccggttcaagtgattctgctgcctcagcctcccaggtagctgggattacacrggcctgacaccacgcccggctaattttttgtatttttaatagagttggggtttcaccatgttcgccaggctggtctcgaactcctaacctcaagtgatctgcccgcctcggcctcccaaagtgctgggattacaggcgtgagccaccgcgcctggcctcttcttccttgaaacactttctttacttggcctctaggacacacttgctagtctctggctaacttctcccatatctcctttgctggttcttcctctcctctcaaattctaaatgattgggttgccccaggactctgtctcaggacctttcttctgtctacacctgtttcctagctgattttgtctagtctcgtgggtttagaaaccagtaagatacagattctatataattttaactctcacatttctatctcgactggtatatccaactgcctactgatagctccacttggatgtattaataggcatcgtaaatctaactagccccagctgggcgctgtggctcacgcctgtaatcccagcactttgggcggccgaggcaggtggatcacctgaggtcaggagttggagaccagcctggccaacatggcgaaacctcgtctctactaaaaatacaaaaattagccgggcgtggtggtgcccgcctgtaatcccagctccttgggaggctgaggaaggagaatcgcttgaacccgggaggtggaggttgcagtgagccaagattgtgccactgcactccagcctgcgtgacaggagcaaaacaacatctcaaaaaacaaaacaaaacaaaacaaaaatctaactagccccaaacagtgctcccgatattgtcctaatcctgtgactccttcaaaattcgccactgcagtgaatgaatagtaacttcatctttccagctcctcagccttaaaaccttgggagttatccttatcttttttccacaccctacacttgacagcaaacactctatcttcaaaatatatgcccaatctgactgcttctaccacctcctctgtcatcacctaggtccaggtttctatcatgtctcccacggattaacctcctagctgtgcttctgaccttgaccccatcagtctattctcaacacatccagagtaagacccatcacacttaaatgaaaccatgttatttctctgctcagaggcccccaataccatcccatctcccactcaaagtaaaagccaaaatctccattgtgacacaaaaggcccctgtgtgacctaacctctttcacctgccctgtcactctccctctctcactgctttagccatgctggctccctgctgttcctgaacataccaagtatggcccctgctgagggtctttgcattgctcttctctctgctgagttctcaccctcctcccctcaccccagatagaaaaaggctcaatctcctccccactccttcagggttttactcggatgtcaccttatcattgagaccttccctgatcaccctatgtaaattgccacccccctttttttaccttatcctcattttgcctccttagcacttctcactgtctaacaaatatctattagttattaattgtctcccactaagatgtaagcttcctaaaggcagggacttctctgccttactcactgatgtatcccagtccctggcacatggtaggtgcttaataatctatatttgttgaataagtgaatgaataaatcctggaggctttagagcaggagggcctaaagcgagtttaggaaccaaaggagaaaagctgcagatttgcatatcctggcactaggtcaggatccactccacagctgggtttagctgacccagaccctggtggaaccctcaaccccaccagtcacctcacatgtgggccagtgcagtccagtcctgctcctggccaaaaacttcaaagcgcacgcctctcatcaccacacaccaggtactactgcatttcaatgcttctctcaactgatatgcattattaatgcttctctccattgacatgcattggcagagccgggatagcaccactgcactccagcctggtgacagagcgagactctgtctcaaaaaaaaccaaaacaaaaaacaaaaaaaacaaagccaggcacggtggctcacgcctgtaatcctagcactttgggaggctgaggcggatggatcacgaggtcaagagttggagaccatcctggccaacacagtgaaaccccgtctcttctaaaaatacaaaattagctgggtgtggtggcacgtgcctgtagtcccagctactctggaggctgagacaggagaatcgcttgaacccgggaggcagaggttgcagtgagccaagattgcgccattgcacttcagcctggtgacagagcgagactccgtctcaagaaaaaaaaaaaaaagataacgaaggcacttgaatttgaataccgcctatctgtctccacccttaattcttctttccaaaacgtgactgtcatttgctagtttgcatcctgactgcgtcacatcccattgtactggaagggactctggaagtgtgtgggggtgggggcagcatagggtgaagagaacctgatcaaagcaggcccaagaaacagcatcaagtttttttgtcaaagaatactgggcctcagaattttagagaacaggagaaaaaaaagaagcaagatatactttttcccctaaagaatctctttatgtgctttggcacatttatttgtgagtcactccccacatttatcctgggccatgatcagtgttttgtttttgtttgagatggagtcttgctctgttacccaggctgrggtgcagtggtgcgctctcggctcactgcaatctccgcctcctgggttcaagtgattcccgtgcctcagcctctgcagtagctgggactacaggcgtgtgccaccacacatggctaatttttgtatttttagtaragatggggttttgccatgttagccaggctggtctcgaactcctgaccttaagtgatctgcctgcctcagcctcccaaagtgctgggattacaggcgtgatcacccagccyggccccaggccagaatcagcttctgaaatgagtggtgatttcatttcccctgagaagacagggctggcttaccatttacttttttggaggctgggaaatgtcttggtctgttttcttctaggctgatctaagaagattcctaattatcaattgagagcagagatattccacttmcaattacatggcctgcctgctcactcttacttcctattcacactctcttggagaccactttgtgattctaccaaattctataggagaggtgacaaccccaaagagaaggctctagaaagatgacatttggaaatgtgtacgctagtgtctgctggctcctcctgagccatttttactctgtgaatgagatcaaaggccacctaactgcctaaatcaccacaaagggacaaactggtatctcagagcactcagcaacaaaaacaagaaagctaagcctctgcactgcaatgtggcagggcttctggctaagtatagcaagcaattctgatgtggagacaaacagcagcaatgggaatgatatgccaatgaaggattccaacagttgggtctgcaagtgtgcttgtcctgtgacacaaacggcctagacatctcagcactgcttggagctgctcattgggggagcctaagaaacatcagccctttcacaacctcttgctcctgagcagagctcatctcccaagagcacatcagcccgcagcccagtctgatgagaagcacagtattcccctgtgccagtggcagcctcagagcatcctgaaagagygcttcctagacacgcagtggaagccatgacttcccctaagctgccggtgctgcctctgaactcatgtggaggttcttttttcagtgtccccagaggcagcagaaaaatccgttttccattttggaatctatcaagtaggacaaatctgccacctgggagcatctcctcaagggcaatctctgctccctttcctacatggcctgacaataccctcgagttagaaatgtcccatgttggctaggcacagtggctcatgcctgtaaycccagcactttgggaggctgaggtgggaggattgcttgaggccaggagttttgagaccagcctgacatagagagactatgcctctattattttaaaaaaagaaatgtcacatatttttaccctcttcactcatctttccaccttgctccaatagattgctgacagaaaagtgagacctcctccaccccaaggtctcctaagagaatgctgctagccaaaaaaagatctgctgataattgaggaagagcatctttaaaargacactcaactacatttcagaaacataaagatctaagtgttggctctacaagggaagaaataaagagaaagaactttttttcctcctacaacaggtctagacaacgtcatacaaggagttgcacgcatatccaaaacaaaagcaaggcaaaaacaagcaaaaaagcaacaaatgcmttccaaaatgatgtccatttatcagcccagaaatgtactggatactggtttagttcagcctgtaggtgctgggaagaaattccgacaaatccaagtcagttgcaaaaagggaaaactccagacatatcacccaatgaacttgtaagaaagcatatgagcttccctgaacagattttactccaggtttgcagcccgcaagatttaagatggggccatgaggttaaatcttgtaaactcagaagtgttcacgctactgcatccctaaactctgtaactctctacatactctttaaagcagtgtttctctgcatctttcattccatagccattgtccacctgatccaaaatatcctaagtttttcagtgtttggaagcagggtttccaatttttgtgtatacagaaaaggggggtgtgtgtgaaaaaataagtattagaaaaaaaacatgttatacatatctatcacagaaatgagtgggcaaggtttagaagatggctgaaaccaagccaatactaaggtctactggttggctgcaacaagtttaaaatgtcttcataagggccctggttgggcaatactatacttgctgacagtacttgggatctgccacagacctatagcaaaggactgttcaacttctccaaaaagctggtattaaccaccagaagaaataagaagttcaaggccaaaatatccaaatgaaccaaccactctacttgctgaaatgccataaagcttctttaccccagacatttgcccaaatcttataatttcttttctcctctctgacaggcctctccagaggcccaaactttaatagaatctgagagaaaaaagtggccagtctatctgctgtccagagtgatgccaaactctttctcccggagccagttctccccgttgggcagtcaggtgaggatccgattattaacaaactctacttgggtctccttggcaaagagtttctggcttcagcagcctagctcaggggggttcataattatgtcagactcgctttttttcttgtagttgcttttaaccaaagaggttaagcctctgtacaaccaagaggaagaactagaattagaaaacttaccaatcgtcccagccaatgataatccatttccaacaggtattaacgcctgttagaagccactggaacactgacatcatcagcccaattgataggttgtctgatagattcgcccccttcatcgcacacaagaatttaaaacaaaacaagacactgcagttatattcattattgcagacaatgggtttctttgtgttagtaattgaaattactgctgtggtctggactccaccattatttcctttgcagcctgtgagccagccaacactctaaactttctagccctaaaaattgtatcatccagaataccaactcaatacagccctccactgtgaaactgaatgccttctggggtacagcatgaaaccgttttagacagtgcatgccagtgcaccttgaaacagtgtccatctgtaatgaaatctgtaaacgggaaacttgggccaattcattgtttaaagcagatctactggctcatacctttctctaggaaacaataagtgaacaagaagtaacctcagaagaagaaagaactttgggagaatgcactgagaaaggccagactgagtccccttggatgaagttaattaagaaacaaacatgacaggatattgcaatcaaaaccaaggaatgcagtgaggacaggtttctcagttgcccagaggagaaaacatagttccttctgaactaaaattagaaagccgctggcaaggaaacataagaagcatggataagaggctgaaaaccgtaagtcagcaatggggatggaggtgggtacaggaagagagcgagtatctattttgttttatttcttctgtaattccttaagattgtttgcgcctgagctttgggactgcagtagtctcccctacggggcgtcaagtaacaggctgggagctctggcaagaagttctcaaacttctcacaattctgctaagagcttgcagatatctagctggaagatcaaggatccaagtaaaaacattaaaggaaggtttttgcccactccccagtgagaggtcatctgcccagggagtgctctcgtatcctgacaccatcgcccgactggggatatatcagtaaccgggctgtcgtcgatgccgagcagtgcccatctggttggcagcgtccgggtctcaagcgttccctcgcccctctctgttctccggggagccctgaatcgctggtgggcatctacagttaagagtgcaggaaggcctctcagacacggggcgaacacaagggctgttggctgcctcctcagagccgacccaggcatagttcgcccaggcgggagagcggcgttgaagtgggtcggcacccgtccgaggggtgccaggccaccccggtgcccgctcctctcgccggcccccggaagcgccgccctcccgcccggcgggctccgagggggcggggagtcgaacgcccccttccgggtgcctccgcccggctggccagccccgctcctcctccgggcgggaatcctccctcccccgcccctcctgaagccgggccccgacgccagacccagccccaggggggaacccccggcctcggctccctctccccgcggcctctgcccgtcttcctgacccttgggggccgggaagaccccgccggcagcggccgggacccaccgctcattacgacatcttcctccctggcctccgccgcctccgccgccaccgagagcctgacaccgcccgccaagcaaccgccaatcccggagcccgccaccgcccgagcgacggcagccttcaccaataagcgcttggaacattggggaccgacagcactattaaccaatcaaccagaggcgtctagagcgacgttgatttgaccaataggtctgtgcaatgtcactgatggacggtagagcgcaccaaccgaaagccaattgaataatgagtgacatgtgcatcagccaattggagggaggcaaagtcccgcccgctgggtggttgatgtacagcaacaggaagctggaaggggaggggcttagccgaagagtgcttttgtattggtcgaggttgaccttccacccacctctaacccagaggatgaatgatagatctgccctgaagccaatcagaagtccttagggtgaggcccacaaatgccccagaaatagcatatacattgcgccctaagtccagtctcgcccaggtgtggcaggagcttttacctgctcttcggcagtagccggctgccactcaaccccatgcctggtgagtggaaagccatcaaccttttatttagtccctctctcgttgtcgcctggggaggggcgactttgtacagtgaggcactggggtccggcaccatagtgggagttggggttgtttacgcgacacttctaaggggattttcacaatcggttaagcccccgttaatcctcacatggttattgcggcgacccccatagcccacggtcccaaacgtgtgcatctgaatcatccgaagctctttctaaaggcaggctcccctggccgcctctcctaatccgactcggtacttcacggggcgtgcctagaatctgcattttagcaagggcctcgcgtggacagaattgcacgcttgagtttgagaagtactgcttggcctctgccccacttacccttaccttcttgagatgaggtaaagcacttggtaggcactaggcgggtaggtttatctttgctcccaagtctcttccgagaacttgggaaggctgcctagcttagtgagggaatccattctggcttcagaccagtctgggtttgaaacctacacatcccactaacttaggcagggtaccgaaactccctgagcttcatgtcctcatcagtaaaacgaggttaatcacacctacaccttagcgcgatggcttaaaaaaaaaaacaaacaaacaaacaaaaaaaaacatagtccatcaagagaaatacattttgcatacagaccagtacactgctatttgtatgagagtgtcataaagtttccgaaaacaatgcttactacttgtgacgcactgatagtttctatgcgtatcctatcctatcttattctccttcttgttgatcatgactggcagtttgaaaaacactgctagaaaaggttggtgtgataatacaaaatgcagagcagaataccgggtacacagtaattgctgaataaatgttaatagcctcttccagtcttctcctctcagtgttagcctttgaaaaacaagactttagacaataatactcctctagtaaagatccttcatgggatccgtatctcctagataaagcccaaactcctttctaggcaaagtcctcccactcttttttcttcttaacctcagcatccaccagaggacacactcttactggtgtatctttcatgctttatctcctccctctacccccgttcccttcctacaaatcctacccttttccctccaggaaagattccaggttcctaaacacttacgcttttttccactagttgacttcctatgtgacccttcccttctggtaaacccctatgcatccatggccggatgtgttggctcacacctgtattcctagtgctttgggaagccagaggcaggcggatcacttgagcccaggatttcgagacccagcttgggcaacatggcaaaaccccatctctacaaaaaaaattagctgcatgtggtggtgcgcacttttagttctagctacctgggaagctgaggtgggtggatcacttgagcctgggagtttgaacttaaaatgagctatgatcacaccactgcactccagcctgggtgacagagcgagaccctgtctctcagaaaaataaataaactcctatgcatccttcaagaccctgctcaaagtctgcatacctcactcctgcccagccatagcttcttcctcctctgtgctgccctggcacatgcaaaagagcttctctctcacacactatttccacacttttattctcacttcttactctcctgctagactgagctgtggtagaaggattgaggccagcacagaggaggatcagcaggaaatgtaaggtgagttaaagaatgaatatttgcatacaatgacacctgcatgacttgtttgtatagtccatacattctgttcccaggccatttttcaagtttagattgcttcactgtcaaaccaaggactccacccgggttccatgactcacctgtattagggtgcaggggttttggggggaggtaggtggggttgaatatcctgctgggccactgtcaaacctcttctgggagaaaaacggggtagctatgcttctcctatcctggaggccccatcatgaagaccgcagaggtgaaaaaaaaaaagtgtgcgcacacggggcggaggacagggtgtgaatacttggaagaattctgcagtagttttgaattatttgattggttttgcccttttaaaggtcaccttatccttgttttgtttgtttctaggctgtctgactcttcttactagagacacagccaaagaagggaaccctttgtttttttttgttgtttttttttgtttctttctttcttttttttttttttccccgagatggagtcttgctctgtcacccaggctgcagtgctgtggcgtgatctcggctcactgcaacctccgcctcccaggttcaagcgattctcatgcctcagcctcctgagtagctgggattacagacacgcaccaccactcccggctaatttttgtatttttagtagagacagggtttcaccatgttggccaggctggtctgaaactcctgacctcaagtgatccacccacctcagtctcctaaagtgctgggattgcaggtgtgagccactgcacccggaggaaggggacactttctaagaagaagaccccgttatacttttgtcaggcccattggagtcttagagcttccttcacaaacacccccgctcccccagtgaccacacaactcctcagagattttttctttcaagatggcccctgtcttcaacagagacggagaaggtcaggcagcggcttggaaatgcttgtgctctcccggccacactttatttatttatttatttagagacggagacttgctccgtcgcccaggctggagtacaggggcactatctcagctcactgcaacctcttcctcccgggttcaagcgattctcctgcctcagtttcctgagtagctgggattacagacgcgcgccactacgcccggctattttttgtatttttagtagagacggggtttcactgtgttggtctggctggtctcaaactcctgacctcacgatctgcccgcctcggcctcccgaagtgctgggattacaggtgtgagccactgtgccccgcctttatttttattattatttttgagacagggtctctgcagcctcaacctcctgggcccaagtgatcctcccgcctcagcctctcaagtagctgggactacaggtgcgcgccaccatgcccagctaatttttaaattttttgtagagctggggtctccctatgttgcccaggctagtctcaaactcctgagctctagcgatcctccca

SEQ ID NO: 97055 - DNA, 41735 bp, Homo sapiens
atttgtctgataccagtgtctacttcacaactgcatctgaatttcggagggaaatttaaaaatgtaagtagaagacctccctgaatctaacaattatcagagttaaattttaggaataaagaaaacacagtaaagatctgttgcccagattcctgcaagtaacgacagaacataaaattagtacattaaaaacaaaaagtaacaataacaaaacattctaaatttatattactcagactaaatttttaaattcagttatagcatgttgtaaaaattcctacattcaaggaactatagaaaaacctataataaccacaaagtatacctttgctgtatattcaaatatgtcagcaataattttcatggatggttctggaggaaaaatgtatgtatttcgaaccataaattcctttagtatatcattttggatggtaccagtaagcttctctttaggtacaccttgttcttctccagttactataaaatttgcaagaactggaataactgctccattcatagtcatggaaactgacattttttctaaaggaattccatcaaaaagaattttggtatcttccacagtgtcaatagcaactccagccattccaacatcaccacgaactcgagggttgtctgaatcatagccacgatgtgtcgccagatcaaaggcaactgataatccctgctgaccagctaaatatataaagaaaaataatgtaagattcaagagtctggaatcaaggtaaaatgatttacttttaacactactaaaaatgttgattcatctcataacagtacacttttataacaactatttttatgctcatacatgtcaaaaccaacttaaataaagatacttcacttcttaagagagtcagttgtttcccttgtgccaaaatgcacaaatttagttccagacctcactaaaggaaagaatgggagaaacaacaaatctcaatcatctcgtatctatctgaagatatggtacttgattgaaatatttctaaaattcatgaaaagatctggctgttcatatatggcaaaaataacttagcatttgtatgcttgcttactattttgttcttttatctaatatggtcacaaaggattcctggctattcaaatattctggaaaacagaattatgaccatcgtacaaaatttttaaataactaaaatagtctatactaaatgtaagttcaaccttccatgggcaatacaaacttataaatctacaagtttagtattcaaacagtacaattttattacagctcagaaagaagaaataatagttaagataattttcagtgaatgaatgccaggttgcactgaatatgtttgtaccacgttatcacatttacactttctttgggcatcatctaaactatcttcctctccaatcgctatcccaacaatgttaattgaacatttttcgaaggcaaagctaatgtcttcttttcttcatgcaactttacctcacctaattccttttaaacaacgtgcatgtgttgttttctttcaaaaatttagcaccttattctaattcacttatctttttgaccacagaagttaaaaaaatccacttttttcagagtatagtctttaactacaaaattatagagtgaatatcatctttacagagattaacccccaaaaaataaaaaactaggaggcatatgacttatcataaatattatgtcttacattaaaatctcacccttaatgttgtccttatagaacttattgctttcttccacagtactaaaaccagcatactggcggatggtccagggcctaaaggtatacatggtaggatatggtccacgtgtgaatggcttcactcctggaagttcttcaggtaagtccatagtatctctcttggaatacaagggttttatagagatcccttccggggtgtgccatattaggtcttctgggtttttgcctttcagctgctttttagccagggcagcccattctgggtgaaggggctgttgctggtgtagaagtcgttgctgtatgagcctggagcctgatgattcttttacctgcctcaggtaatgaggtgaaagtaaaaaaagctgattcttagctcttaacatggtggagcatggaaacacccaatagaaataagaactgacctagaaaaagaaacatagagtaaaaacatttagaagagggggtgggaaataggagctactcataagaaaggaacagaaaagaaagaggatgtattagtctgatttcatttcttccccttttctgcttcctgcacctgatattttataactttggcccctcttcttcacaattactatcagtcctgtagtttcagtctttttcctcagtagcctcttagctggtcttactgaccagtcttactccttttctactccattctatacgaatcccttccatacaatgacatcaatgtaaatatgactatgtcacactcctcatggaatttttcaaagactctgtatcatgtggaagatatactacagcctcctaattaattttttcattcaaagtgcttttattaaatatcagtttatgaccgacattatgttgggtaatagagaaaaaagtgatgaataagacaaacaggcattcaaggccttcatgaactggtctctgtttccccctcagacccatctctgtctttgtcctctttatgcattttgtgcactagaaatactggattacctacagttggctgcacatatgtcaaagttttctgaatttgctcttgctcttccttctgcctaaaatgttcttctctggctaattcagctaaggcattatctccaatttgcagcgtttctatgtgccagtaacatagaaggctataaagacatcacagagagtagcaattttaatctttacaatacccctaagaggtaggtactattattatccttattttacagattaggaaactgaggcacagaagagccagcattgattggaacctatgcagcctgtttcaaagtccttgcatttaactaatatgcacacaattcatcccagaacccataaggtgagctaaatggcctcttcaataatctacttctgtgctagtttataaactgctccaacattagagctgcatattccggataactagcatagacttttatactaggttgctgggttcagcgtcatcattttccagatgtagaaactgaggctcagagaaataaagtcgcttgatcaaaatcccacctcacaaagccgtaaactgtttacctgaattactaaaacttgtcagagtcatacagcgtaaacatatagagcccattgtttaaaaagatattgagatgcaaacattaatatattcactatactatgtgttttatactggataaggcaacaagtaaagggagtttcaaattttattttccataccacttcttacctatcagtttagtaaagcttaaatgaaatcaatactcaacacttattatggggtcgttaaacaagagacataaaccactggtgacagtattaactattttaactactttggaaagtaaattgtcaatatacatgaaatgcttcagaaatgtttatgccattccactgaggaacattactcctgggaaagcttctgtagtaatatataaaatagatgtttcctatagttttatttgtaatagagaaaacttaggaaaatcgtaagtatctcataacatatgaataagtgaattacagcatatacaaatgatagaatttcatgtagttatcaaaatatgtttagaaagctggcaaaactaatctttgatgtcagaagtcagaagaatggttacttaatggttgctagaatacaacaggagcaagagaggggcttttgggggtaatggtcttgatctgattgccacttacatagatatattctgtttgtggaaattcatcaaattatacagttatgttttatgcagtttctgtaaatatatgtataagtaaaaagttaaaaatgtgttatgcatagtttcccaaaaaaagagaaacaaactcaaaaagtagtaagtaaaagactcaagacacgtaattgtaagtgcaacaggttcaactatgtaaaaagtacatagaacaaagtctaaatggaaacataacaaaaaaggctgggcatggtggttcacgcctggaatcccagcacttcaggaggccgaggcaggtggatcacctgaggtcaggggttcaagaccagcctggccaacacggtgaaacccagtctctactaaaaatacaaaaattagctgggcatggtggcgcacaccagtaatcccaggtactcaggaggctgaggcatgagaatcacttcaacccgggaagcagaggttgcagtgagcagagatcgtgccactgcactccaacctgggcaacagagagagaccccgtctcaaaacaaaacaaaaaaaccttccatttttttaatactagcacgatttttattctttaaatccatggggtccttgtcatccatctttttgcaagccatccactacatttactagcttaaaaggtggatgaaaaaaataatgaagcaacaactaaactgtttcaatagtaatcctgtaaaaggtaatttgaaaaccacctgagactaaactgttggcaggaaatatcacactcatttcacgtgggctttcctaaatctgaacaactaataggaaagagccccgtttaagtgacttcctgaaaatcacatgtgaattggtggaggctggaaacagacaccatttttagataaaaacacaactactgcggatggcaatacgacctctgaattttctcagaagaccatcaagagaggcctcaagcattcaaagaagcaacatgcaaagcaaatatgttactgacaactaaaatgagttaaagagcaatgattaatcccacccccacacctcaaaaacaaatcagtgagaaaaagatttcttgaaccaataagtttcaagctttggctgctgacgtatgattgcacattaatacttcaagaaggtactttgatgttcaactagttgggtttggagatggaaacatagggcatgaaaattatatttgatattagcataagtacatcattaaacacaaaattatattggcagaaaatcatcaagtggtttaaaactttacacacatacgttatccagggcttcgagcttccctaagaccaccttctttctagataaaactgagaacgagttagtaatgtaagcttttatgtcaatttagacctgtcttttctattctacctctcactcttaacactgtttacactcttaatcctgtttacacacagaaaatcacttttattcccgaaaactcttagaaaaaccctgacaataacataacccacaacctagaagggaggcagccatgaagcaggcgcatccctttggaaccatacaaaaagtgacctctgccaacgggaacagttcagggtgcttaagtggccaaagaagataccgacatggcccctaaagtattaaaagcaccttctttccagaagtacctccgaattgccagggacttcgcccaaaactagaggttggtcgaagtgaaaatctaaacctaaggagaaggcagagagtgggatcccgtcacagtaggaaggtaaagaagacagaagtaaaggacagagcgggagagaaaggacaaaagttcaaaatacaggggtagaggagggacaggagccagaagaatggagcgatctgaaaggtgtacgtcctactcactggtaggcctgttttggactccgctgtgggagagggcggctgcacttctgcgtcccccgcctcacctgtcagacatccacacagccaggcctccccgccctcaccaagcccacacaaaccgcgccaccgccagcgtcagccggacgactctgggggcgtaggccgacaccgccctccctccagccaatctaatagcgctctcatgggcgcattcctgatgacgtttaggggtagggttagatgcccgtttccgctttcttcccacccacttccgggtctcctctgtttacgaatgtttgggcgcgaattactctaagcgcggctctcagaagggtgcaagaagaatcagtggtgagtcgtgatatccttaaccggctgggtggatctaaagttcagggatgagttttaaagccaacgcgtttgtggcagactccgcagtttgcatttgaggatagcgaggggggattgcttacggggaaatgcccgatgtcctaaaagatctgcccttaggatcctgagattgagatgtttgattaggggggagggagcaaagccatgaatacttcctatttctcccgaatcatcctcatggctcatcctcattgctaaatttctcccgcgggcactagtgaagtcaagtgcagccttggacattagtgtctgtgtttctccaggagtcctactcactcttgtgcccacatagaggtctaaattgaggtaattgagtcccatgagtatcaacaagctggtaagraaaacaagacaacctagaatgcctccctctctcctaaagcatatagtctggcggcaaactactgtaccagccttatttcttttcacttctcctatacacattaaaagcctcgctggattatcctgtccctgaacacgccaggttttttgtgttttttccgagctttcctgccgtccgagttttactgttttcccttggatgcttcatttttctactttttggctaaatatttcaaaatgttattagaataatactttttctatgaataatgtacaaacatacttccgagatattgcggggtcggttccagaccaataaagcctgtcacacgatttttttggtttcccagtgcatataacagttgtatttacactgtattgtaacctattaagtgtgcaatagcattatgtgtaaaaaaaaattacatgctgtaattttaaaatattttattgctaaaaaatgctactaatcatctcagccttcagcaagtcctaatctttttgctggtggagggtcttgcttgatgttgatggctgttgaccaatcagggtgatggttgctgaagattggagttgctgtggcagtttcttaaaataacaaaataatgaattttgtacagcagttgactcttccattcactaaagatttctctgtagcatgtgatgctgtttgaaagcattttacccactgtagaacttctttcaaaattagagtaaatcctcttaacccctaccattgctttagcaactaaggttttgtgatattctgaattctttgttgatatttcaagaatattcacagcatcttcaccaggggtagattccatctcaagaacttcgctcattcataagaagcaacttcttttccactagttttatcatgagattgcagcaattcaggtacatcttcaggctccactatttctcttgctattgccaccagatctttcatcacttcctccactgaagtcttgaacaaagtcatgacctttacaaagtcatccatgagggttggaatcaactttttccagactcctgttaatgttgatattttgacctcctcccgtgaatcatgaatgttcttactagcatttgggatggtgaatcatttccagaagttttcaatttattttgcccagatccatcagaggaatcactgtctagggcagctatagctttacaaaatgtatttcttaaataatataacttgaaagtcaaaattattctttgattcatgggctgcagaatggatgttgtgttagcagacatgaaaacagcattaatctccttgtacatctctatcagagctcttgggtgaccaagtacgtggtcattgagcagtattattttgaaaggaatctttttgtgagctgtaggtctcaaagatgggcttaaaatactcagtaaaccgtgctgtaaacagatgtgctgtcactcatgctttgttcttccatttccagagcacagacagagtagatttaaaagaataagagccctaggatatttcagaatggtcaatgagcattggcttcaagtcaccacccatattagcccctacaagagagtcagcctgtcttttgaagctttgaagccaggcaatgacttctttctagatatgaaagtcctagayagcatcttccaatagaaggctgttttgtcttcattgaaaatctgttgtttagtgtagccccttcatcaattatcttacctagaactggataacttgctgcagcttctgcatcagcacttgctgcttcactttgtactttcatgttatgcagatagcttacttccttaaacctcargaaccaagctctgctagcttcaggctcttttgctacagctttctcacctctctcagctttcatagaattgaagtgagttaagaccttgccatgaattcgtctttggtttaagggcgtgttgtggctagtttgatcttcaatcccggaccactcaaactttctccctatcagtaataaggctgtttttgctttcttatcattcatgtcttcactggaatagcactttaaatttccttcaagaacttttcctttgcattcacagcttggctaactggtgtagtttccagcctatcttggcttttgacatgcctacctcaccttgcttaaacatttctagcttttaatttaaagtgagagaggtgtgatttttgctttcacttgaacacttagaggccattgtagggttattaaatggcctaatttcaatatcattgtgtctcagggaatagggaggcctaaggagagggagagaggcagggaacagccagttggtggagcagtcaaaacacaacgcaacatttacctattaagttctctgtctgatattggcatggttcatggtgccctaaaacaattacagagtaacatcaatcaccataacagatataataatgaaaaggtttgaaatattgtgagagttatcaaaatatgacacagaaatgtgaagagtgagcacaatctgttggaaaaatggcatcaatatagttgttcagtgcaggcttgccacaaacctttagtttgtaagacaacaacaacaaaatacagtgtctgcgaggctcaataaagtgaaacacaataaaaagagttatgcctgtacattcttacccatagcacaaaccagtttaagacagtcattcgctcacttgcctctttataacatttataaatacacatagtaattattttcatatctgtctctacctgtgcactatcactaagctgtggtttcccttggatctaagaatgggacaaaatacctattcatttttatatgcactgtgagtagcccagaagtgatagaaacaatgtcttttgtttattggattcttactatgtctcaaataccgttctaggtggtttatatattctttgttacatcatttttgctttacaaaagcctttaatgttagtacttttattaatcgttttactaatggggaaaatgagttaatttactggcccaaagatatacagttaattaagtggcagggctagatttggagcttgaacaatttaccctcgttgcaggactgctcttaaccattatggtagtgttctcaacctgggttgattttgacccaggagacatttggcaatgtctggaaacaattttgattggctctactcaggggttggaagtattctagcatctgacggtctacgtagacccaagcatgctgctaaacatcctacaatacacaccacagtctccacaacaaagaatgatccatctaaaatgttaatagtgctgaggttgagaaactttgtgctatagtctagtgcctcaagtaggtttcattgttaacagtacttctcaaactctgttagaccagttttkctttttatttctaatcagtcataactgatacttttgtaaaatgcaattaaaaatcaattattagtcaaactcccttgtggtataataccaggagtgaactctgatgtaaacaatggattttgggtaatatgatgtgtcaacaattacagcaaatgtaccagtttggtgtgtgatgttaatactagaggttgcagggaatggggaagggcagggattatataagaagtttctgtatgttttgctcaattttctgtaaacctaaaactgttctgaaaaaagtcttttttaaaaaaatactaattactagaaaatgatatggcaaagacaaggctaattattttatgataaggttcaatgtgcataaaattactctatcaaattgctacaaaagtttctaaatgattaccttcaatttccacacttgattatggcaaacagtttgaatgagatttggagtagcgctaaattacatgttattttaataaagaatatcaagaagaaaatgattaatggacccaagctataaataagtaccaaatgagacagagcaaaagagccacagacttagagagaaatgaagtagaatagttaggaagattttgaaaagaaggtggctcatgatctgagagggtgggcagagacagaagagagctgctcaggtagaaggtacagtgtatgtttgggaggcagaattactcaaagtgtgttcaggaaatcatcaaatctagctagagagggagatttgattaaggagtagtaggaragaagtatgaaaaggtaggcagagttaggttggtaaggactaaaaatggcatggtaaagagtttgaatgttacacagaacgtattggggtaaattttttactcaattaatttgttccaaaatttgggattgggagggactaggcagggcttgctcatgtcttgtccacacagtgtgggctgcagcatattgacttaggtacatgtaccagactggccagttggtgctggctcttggctgggagctcagctaagactttcctggggtttcagttcctctcggtgttggccttcctcctatggtggtggctgggttataagagcaagtgttggccgggctcagtggctcacgcctgtaatctcagcgctttgggagaccgaggcaggaggatcacttgaggtcaggagttcgagaccggcctgaacaacatggtgaaaccccgtctctactaaaaatacagaaaattagctgggcgtggtggggggtgcctgtagtcccagctacttggaaggctgaggcaggagaatcgcttaaacctgggaggcagaggttgcagcagtgagccgagatcgcaccactgcactccagcccaagcgacagtgcaagacttcttaaaaaaaaagcaagtgtttctaagcaagaagaagtcaaagttgccagtctcttcatgtctaagccagtaagctagaacagaatcacttctactatattctactgctcaaacagcttcagagtctgccaagatttaagacaagggaacatagaccttactgctcattaacaatcatgagaaggaatgtgtaccatttttaatctaaaatctcagctgttacttgtcccttcacctggatgctcttattcagtgaacaacttgaactattgtacatgtcagcccttccaggagagatctacaagtgaaattctgtcatgtggatgggtttttaagtaggggaagtataagggtgtagatgtaaagttgaggtaattaggcattttagaaattgaacacaagatagagaatgagtgtttggtaaggtatcacattgttcaagagcagggtaaagtgatattttgacttccactgctttttgtaactggtgtgatatgtggttgctaaatgtagtttgtgatctttctgttaattctttcccaattttttttccagtcttgtgtggaggggagtttgaagcttttaacgtttgagaggatagatttatcattgtctttctctaaatctgcacatatatttaaactgtatcagtataataattctgaatgtttagaaaataaatgatgaataatttatctgtatatctagctatggctaatatgtgtatatgtttatatgtgtatatatatattttctaggcatatatagctaatatgtgcatatacatatttccttgtatactgcacctaacttctatccacttcttatggtgtaatgcaagaataagtatttcattcttctgttccttttatcagaaattagtttggtaataaaagagggaaaattactctaaattttatcaacatccccatttccaatcccatgtctgttttgtaatttgtgggagggcagggtattcagtacatttctgtactcttgttaaaatgcacatagcccagataggattgcagtttaaattcttaatagtgtcagactaacacatgaatttccacatagattgatggtataatcctaaaaagtgtctccttccatttttggcaaaaattgggtaatggtaaatttattacttaaaataacaagacctaggctttactccttgaactgacattatctgtgactactttatatttctatttccttggacttaaacatggagaggatgttatcatacgatagagtataaaataagagatacaaaagcatttttaaatgattttctaaaatccatacaaacggaagttaatttctaggaatgaaattgaattagatatccttattctgataagagtgaaaattatttcttttaaaaaatgcttgtttaaaagcatacaatactatccccaaacttttattatgatttttctttaaaaaaaaaaaaaaagagaatgtggaacatttacaggatagttttttaaacaaaacattgtgcaaggctttagctttttttgtattattttcatctttacagatttttttttttttcgaagcactgtgtttagatcaagatgtctggtaaagcaaatgcttccaagaaaaacgctcaacagttaaaaagaaatccaaagagaaaaaaggataatgaggaagttgtgttgtcagagaataaggtaatgaaaatatcaagtttctcatttagaaatcttcaactgtggccaagcactatggctcatgcctgtaatcccagcactttgggaggccgaggtgggtggatcacgaggtcaggagatcgaaaccatcctggctaacatgatgaaaccccgtctctacttaaaaaaaacaaaaaaaaaaatacaaaaaattagccaggcgtggtggtgcacacctgtaatctcagctactcgggaggaggttgaagcagcagaattgcttgaacccgggaggcagaggttgcagtgaaccgagtttgtgccactgcactccagcctgggcaaaaagagtgagactccgtctcaaaaaaaaaaaaaaaaaaaaaaaagtttcaggttttaccctactcattaggcaatgcctatatttgtatataacattatttcttaggcaaagtgagtaataattcatttaaaacattctttgacactgtataaaattctgttattatcatcattgtcaagaattgctttagtatgtcctctctgtgataaatatacaccatttttctttagaagtagcaacatacattttttctatgtactagaaattatatgaatactctttgacatatataaaaatctattgtaaaagcaggatccttttatctgatgtttaattctgtttatgtttatgcatgtgtttttccctctaggttagaaacacagtgaaaaaaaataaaaatcatctgaaagatctgtcttctgaaggtatttcttttctattaccttgtttaacctgcttctatatcaagctatatctacattcgtgaaaaaatgttcagcatcttgtttatgagttctgcaaaagatagtaataaacaactacatttgcatttttgtaagaatatgtagtagtggttagttattttggtcaactgaaattttacttagcacctctgacgaaatactgtagaggcttcaatgccactgagttgataggaaatagagaaactcaaagtggcccacagcctgaattattagtgatctgtgatataaatacaaatgtactaatttttcttcaagacaaatatgctttctgttctgtatagattagtttggaaccattattataagtttgtttggagtaaactagtttagagtagttgcctttgcttaaacatcactgtttcatggaaggattctctacgtctcctcagccaacactaggttaggtcctctggttttatactgccatagtgtacaatacttttttttccttttgtatgctttgcacacctataatttgttcaatatcccttctctccaacactcattttcatgagatccagtactatttcttcttttttttaatacctaataagtagaacagtaccaacagcatagttgacactatctatttgtggtttgattagtctgttttgttccagttgccatccaacatttggaaaatagtttcctggtcctctcaatgaaatgtttaaagaatttaggccatttctgagaatgaaacttttcataattaaagtttgattcttcatttaaaattatttctattatcacttggtagtatttctgttaacttatcaatagaaagcatattcatattcaacacctgggatgttacagctgtgtgataaaaagtaaattaaacagtttatacagctttataatattttgttctgataatttcataagcttttttagatgaaaacattccatttttaagcaaaaacatgtaaaacatctagattgatcagagcctcttctattactaacgacaggacaaacaaagcacactaacctaaaacacrgaaagacagcagccagcaagagaaaaacctggcaacctctgtcaaagagtaccagagaccatttgcaaactatgatggaatcagtaataatgtgagtataaaattgttccatttcattcttttggttcccatttaggtgtttcctatggatattattcttttaaatattgctatctattttaaggtaatagagtatatttctatttcggaagcagataaaattaatgtgacggtatttgccttcagcagaaaagtctttgttaattttagaaacctgaaattccatcggtgaaataaaagcaagtgtttgtggcctgacttgctatcaataaaattttaatttttgtcaatagagattctttaggaagaagttgagttcaaagtgacactttacatagaagctaccacactggaggggatacagagaaaataagacagaattctgccattgtggagcaaattctatcagaagagccaggcatgtaacttattacaatacagtgtggcaaaatatatatataagaagaattttttcattgtacttctgtttaaagtgtmtttaatatgaaaggaaaagtgattgattttgcctggctagtggggaggggtacttgagagaaatcagagagaaaaagtacaaagagtatatgatttgtgcatcagactactatttattccatctttttttcttttctaggacaattttgagtaacagtattaaagaaaaagaagaaatacaataccatctcaacttcctgaagaaaaggtaatactattgcataattaaaatgattaaaacataatttttwaaaacctgacttctttctatgttgccaaatagacacttgtggaatgtaagtttttctttttttttagagaaggtgaacaacttggaagtatgttttctcttttttctaaactgctgctccacatgtttctcaaataagtttcaggggaacttacaaaaaaaaccctgaaaatcacgaaattctgtttccacagttcactcttccatatcagaatttgaaaacagttttgtcaacttgaactcccttcaacttcatttttaataatttgaagttaatagttcacaactcttatctatctgatatttaccctattgctgtgtttttccacttcatattgtcttaaattatttgcatgagcaacaagtataattttctaagatattattgctcttcatcttatggtaaatcaccaatggagatttcttctcaggagttcttaaaaggcacaccactgcctgtgattttcaataattacttttctctagtatttacacaactttttctttttataagaaactaagcttcataagtgaaggagaaataaaatcctttacagacaagcaaatgctgagagattttgtcaccaccaggcctgccctaaaagagcttctgaaggaagcactaaacatggaaaggaaaaaccggtaccagccactgcaaaaacatgccaaattgtaaagaccatcgatgctaggaagaaactgcatcaactaacgagcaaaataaccagctaatatcataatgacaggatcaaattcacacataacaatattaaccttaaatgtaaatgggctaaatgctccagttaaaagacacagactggcaaattggatagagtcaaaacccatcagtgtgctgtattcaggagacccatctcatgtgcagagatacgcataggctcaaaatacagggatggagaaagatctaccaagcaaatggaaaacaaaaaaaggcaggggttgcaatcctagtctctgataaaacagactttaaaccaacaaagatcaaaagagacaaagaagaccgttaataatagtaaagggatcaattcaacaagaagagctaactatcctaaacatatatgcacctaatacaggagcacccagattcataaagcaagtccttagagacctacaaagagacttaggctcccacataataataatgggagactttaacaccccactgtcaacactagacagaccaatgagacagaaaattaacaaggatatacagtaattgaactcagctctgcaccaagcagacctaatagacatctaaagaactctccaccccaatcaacagaatatatattcttctaagcaccacattgcacttattccaaaattgaccacatagttggaagtgaagcactcctcagcaaatgcaaaagaacagaaattataacaaactgtctctcagaccacagtgcaatcaaactagaactcaggattaagaaactcactcaaaaccactcaactacatggaaactgaacaacctgctcctgaatgactactgggtacataacgaaatgaaggcagaaataaagatgttctttgaaaccaacgagaacaaagacacaacataccagaatctctgcgacacatttaaagcagtgtgtagagggaaatttatagcactaaatgcccacaagagaaagcaggaaaaattgacaccctaacatcacaattaaaagaactagagaagcaagagcaaacactttcaaaagctagcagaaggcaagaaataactaagatcagagcagaactaaaggagatagagacacaaaaaacccttcaaaaaatcagtgaatccaggagctgattttttgaaaagatcaacaaaattgatagaccactagcaagactaataagaaaagagagaagaatcaaatagatgcaataaaaaactgataaaagggatatcaccactgatcccacagagatacaaactaccatcagagaatactataaacacctctacgcaaataaaatagaaaatctagaagaaatggataaattcctggacacatacacctcccaagactaaacagggaagaagttgaatccctgaatagaccaataacaggctctgaaatggaggcaataattaatagcctaccaaccaaaaaaagtccaggaccagacagattcacagccgaattctaccagagatacaaggaggagctggaaccattccttctgaaactattccaatcaatagaaaaagagggaattttagaccgatatccctgatgaacattgatgcagaaatcctcaataaaatactggcaaaccaaatccagcagcacatcaaaaagcttatccaccatgatcaagtgggcttcatccctgggatgcaagtctggttcaacatcaataaacgtaatccagcatataaaccaaaccaaaaacaaaaaccacatgattatctcactagatgcagaaaaggcctttgacaaaattcaacaacccttcatgctaaaaactctaaataaattaggtattgaggggatgtatctgaaaataataagagctttttatgacaaatccacagccaatgtcatactgaatgggcaaaaactggaagcattccctttgaaaactggcacaagacagggatgccctctctcaccaatcctattcaacatagtgttggaagttctggccagggcaatcaggcaggagaaagaaataaagggtattcaattaggaaaagaggaagtcaaattgtccctgtttgcagatgacatgattgtatatctagaaaaccccattgtctcagcccaaaatctccttaagctgataagcaacttcagcaaaatctcaggatacaaaatcaatgtgcaaaaatcacaagcattcttatacaccaataacagacaaacagagagccaaatcatgagtgaactcccattcacaattgcttcaaagagaataaaatacctaggaatccaccttacaagggacgtgaaggacctcttcaaggagaactacaaaccactgctcaacgaaataaaagaggatacaaacaaatggaagaacattccatgctcatggatgggaagaatcaatatcgtgaaaatggccatactgcccaaggtaatttatagattcagtgccatccccatcaagctaccaatgactttcttcacagaattggaaaaaaaaaactaaagttcatatggaaccaaaaaagggcccgcattgccaagacaatcctaagcaaaaagaacaaagctggaggcatcacactacctgacttcaaactatataaaaaggctatagtaaacaaaacaccatggtactggtaccaaaacagagatagagaccaatggaacagaacagagccctcagaaataataccacacatctacaaccatctgatctttgacaaacctgacaaaaacaagcaatggggaaaggattcctatttaataaatggtgctgggaaaactggctagccatatgtagaaagctgaaactggatcccttccttataccttatacaaaaattaattcaaggtggattaaagacttaaatgttagaactaaaaccataaaaaccctagaagaaaacataggcaataccattcaggacataggcatgggcaaggatttcatgtccgaaacaccaaaagcaatgacaacaaaagccaaaattgacaaatgggatctaattaaactaaagagcttctgcacatcaaaagaaactaccatcagagtgaacaggcatcctacagaatgggagaaaatttttgcaatctactcatctgacaaagggctaatatccagaatctacaatgaactcaaacaaatttacaagaaaaaaacaaccctatcacaaagtgggcaaaggatatgaacagacacttctcaaaagaagacatttatgcagccaacagacacatgaaaaaatgttcatcatcactggccatcagagaaacgcaaatcaaaaccacaatgagataccatctcacaccagttagaatggcgatcattaaaaagtcaggaaacaacaggtgctggagaggacatgcagaaataggaacacttttacactgttggtgggactgtaaactagttcaaccattgtggaagacagtgtggcgattcctcaaggatctagaactagaaataccatttgatctagccatcccattactgggtatatactcaaaggattataagtcatgctactataaagacacatgaacatgtgtgtttactgcggcactattcacaatagcaaagacttggaaccaacccaaatgtccatcaatgatagactggattaagaaaatgtggcacatatacaccatggaatactatgcagccataagaaaggatgagttcatgtcctttgtagggacatggatgaagctggaaaccatcattctcagcaaactatcacaaggatgaaaaaccaaacaccgcatattctcactcataggtgtgaattgaacaatgagaacacctgggcacaggaaggggatcatcacacaccggggcctgtcatggggtggggggagggggagggatagaattaggagatatacctaatgctaaatgagttaatgggtacagcacaccacatggcacatgtatacatatgtaacaaacctgcacagttgtgcacatgtaccctagaacttaaagtataataaaaaaaaaaaaaagaaaatgttctgtttctcagtttcaagtttgcctagaaatatttgtgacctattttaaggaattcttttgagtacaaattctatttagtttttctttaaatataattttcaacccacaatagccaagtagaaagagtgaatcagatgggttgggtcagggtgggagtttgctgagaaaggtttaacaaattaaaaactgctagaagcaggcttgtaaattgcttaaaggtatagcagcctattattaaagaaggaagaagatattaaaaagataataagctaatacaagtataatgaaaatgtagctgtttaggatctttttaatatagaacaaatactaatgtttagtttatgaatgtgactattacataatagttgctgttcatagtgatcaccttggttcattggaaaagattatattcaacagataggcagtctctttgtcatgtaacagctatggagtacatacatttcaaggcctgactatttcctccttatttttactttcacagcttgctttctttagttcctgaagtcaccatacccaagatacagttacttctaccaatacaacaaagtacaacattagcaaactgatcctaattggaactctaaatacatttttctgtagcagtgtttctgaaagtatatttgaaacacttgttcttacagatagtctatggataaaagtaacctatggtgaattatatttgggtaccttagcatgtaagaagccctgcagtaaataaatctatttcattttctttaagctagcatctcccaaattgctatttctgggaactcattttcatataaatctatttcattttctttaacctagcatctcccaaattgatatttctgggaagtcattttcatatattagtctcatctctgcttttgactaaacgttagcttcattattttcattttttagttttcagttcttactagattacagctatagtcataggcagcttcctgtgtatatcattttagcctggcgaagaaagaggaaaaagacgattcttaccccttagcttcagttagaaaattctaggagatggtttctgatttgctgagcttaggtgatatacacctattcttggcgtgattttgtgacaagagctaccatggatatgattgatatagactggattatatacctagccccatgattacacagacaagtttgctaggcaaacaaaactattcrccattacaattctaaaggaacatacttccagaaagtctgccctatagaaacaatgttataagtggtgattaaatgttgctgatataataggatatattcaagccatggttttagtttctaagagttagtgagactcttggaaatctaactgctatttagaacatttggagcagtgaatgactcttccacataattggtttaataaacatatagaagaaacttcataattaaaatatttttgttaagaaaataaaaaacttattcctcttaggaaagcttaggcagatagtttgtgtttaaatgtgatagcctaatgatgatttttctaaataactagagtttgtcttaacagtttaatgagaattatgatttgtggggtttttgctgcctacttttttctttacaaaaattaaaattttatttgcaaacaatgcatcaaacraaggtctgtatcaagactctattagaaacttaaacaaattagcragcaaaaaaccaacaatcctattaaaaagtgggcaaaggacatgaacagacacttttcaaaagaaaacatacatgcggccaacaaacatgaaaaaaatgctctcaacatcactaattactagagaaatgcaaatgaaaaccacaatgagataccatcttaaaccagtcaaaatggctgttattaaaaagtcaaaaagtaacagatgctgggaggttgccaagaaaagggaatgcttataaacttctagtgggaatgtaaattagttcaaccattgtggaaagcagtttggcagattctcaacttaaaacagaactaccatccaacccagcaatcccattagtgggtatatacctgaaggaatataaattgttataaagacacatgcacacttatgtttaccacagaactattcacaattgcaaagacatagaatcaacctaaaggcctatcagtggtagattagataaagaaaatgtagtacatataaaacttggaatgctatgcagccataaaagaatgagatcatgtcctttgcagcaacacggttggagctagaggtcattatcctaagcaaactaacacaggaacagaaaaccacatagtgcattttctcacaagtgggagctaaacattgaatatatatggacacaaagaagggaacaaagataccagggcctacttgcgggaggagagtgagggttgagaaactacctatcaggtactatgcttattacctgggtgaaaaaataatctgtacaccaaagccccacaacatttgcctacataacctgcatatgtattcctgaatctaaaataaaagatttttttttaattaagatttttaaccagatcccaaaagtgggatagtgggttccactattgttcagatttcttcaaatcttaagtagtagaactttttagaacccaaagatactgctgttataaagggaatcaaatttagcttttcctcctcataaaattcaagaatcaaatctgggaaagctattttgcagtctgccagatgtgatgatagaaatagatgtttctactggtgatcaactcaaatttgtaaaagaattttttaactttaatattaaatgccattcatgtttatagaatttttgagcaatgcactttgatcttagtgttttatttgccttaaactctatagaactcagttttctttgaaatcatttagaataactaatgtaartcttctctatttttgatcacattctctaaaataattgagatttgkggtccagggtcatagttaagacttctagactagtgttctgtctctcaaccaataattcacaatgtataatagactcatgtagtgtaatagtctagaaaacatctggatgataaaaggaaattttggttttaaaatgtatataaattgtcaaatgtgtaagatagaaaatttgcttttagtaaagtagccccagtgtcccttaatttgaggtaaatcttaataaattgaaaggctaaatgatgatttgtcagggcttttagagggrgagatttactggcaatgttacccagtggtaataaaagaatattgtacccttaagaatatgaggacaagaaaaaatgaggactgttttaaaataataatagtactcaaaaataaacaaaataattgtttttattttatccttaagattgctacaacagtgtgaaactctgaaagtccctcccaaaaagatggaagatttaactaatgtatcaagtctactgaatatggaaagggcacgagacaaagctaatgaagaaggtctggcattactacaggtatgaaatttgaatagggaatccataattagagagttagggaaagggaagaagaccaaagtttttaaaattatcatgatgttcttccagtagtgaatactagatcttgaaccaggttttttcattaaattgtttttttgttgttgttttcattaaagcaaaaatttgtctgaacttggcacctctaaagttgaagtatttctaatatatttgtggttaagtagtgtgtccggaattggtgggttcttggtctcactgacttcaagaatgaagctgcggaccctcgtggtgagtgttacagttcttaaaggtgacgtgtctggaatttgttcctcccggtgggtttctggtctcactggctcaggagtgaagctgcagaccttcgcggtgagtgttacagctcataaaggcagtgtggacccaaagagtgagcagtagcaagatttattgcaaagagcgaaagaacaaagcttccacagcatggaaggggacccgagagggttgccactgctggctcaggcagcctgcttttattatcttaactggccccacccacatcctgctgattggtagagccgagtggtctgttttgacagggcgctgattggtgtatttacaatccctgagctagacacaaaggttctccacgtccccaccagactcaggagcccagttggcttcacccagtggagcccacactggggctgcaggtggagctgcctgccagtcccacaccgtgtgccagcactcctcagmccttgggtggtcgatgggactgggcgccatggagcagggggcagcactcatcggggaggcttgggctgcacaggagcccacggaggagggaggctcaggcatggcgggctgcaggtcctgagccctgccccacagggaggcagctaaggcccggcgacaaattgagcgcagggccggtgggccggcactgctgggggacccagtacaccccccgcagccgctggcttgggtgctaagcccttcattgcctggggctggcagggccagccagctgctccgagtgtggggcctgccaagcccacacccaccggaactccagctggcccgcaagcaccgcgcgcagccccggttcccgctcgcacctctccctccacacctccctgcaagctgagggagccagctccggccttggccagcccagaaaggggctcccacagtgcagcggtgggctgaagggctcctcaagtgccaccaaagtgggagcccaggcagaggaggcgccgagagtgagcgagggctgcaagggctgccagcacgctgtcacctctcaatcccccctctaaacaggacatcccaactgctgttgggaatttgcctgatgaccactctagctacttcctgctggatggggcgatgaaggggccctggagttgtagtgtcctccagaggggaggtctctaggccagggaaagtgccagtgggtcggtccaggggtcctcagtagaagttgttagttgaactcctttgggattctatttgtaagaccatctgtagcttgatggcctcgatttrctcagtgataggcaatggtctcactgcttggcgatggtctcaccgctcggcgattgtctcaccgcttggcgataggcgaaggtccctttgtggtcgccaaaatgtgtctggagttggtgggttcttggtctcactgacttcaagaatgaagccacagaccctcgtggtgagtgttacagttcttaaaggcagcgtttccggagtttgttcctcccagtgggttcgtggtctcgctggctcaggagtgaagctgcagaccttcgcggtgagtgttacagctcataaaggcagcgtggacccaaagagtgagcagtagcaagatttattgcaaagagcaaaagaacaaagcttccatagtgtggaaggggacccaagcgggttgccactgctggctcaggcagcctgcttttagtctcttgtctggccccacccacatcctgctgattggtagagccgagtggtctgttttgacagggcactgattggtgtatttataatccctgagagctagacacaaaggttctccacgtcccymccagagtagctagatacggagtgtagahtggtgcattcacaaaccctgagctagacacagggtgctgattggtgtgtttacaaaccttgagctagatacagagtgcarattggtgtatttacaatcccttagctagacataaaggttctccaagtccccaccagactcaggagcccagctggcttcacccagtggatcccacactggggctgcaggtggagctgcctgccagycctgtgctgtgcgcccgcactcctcagcccttgggtggtcgatgggactgggcactgtggagcagggggcrgcgctcatgggggaggctcctgctgcacaggaaccctctgaggggggaggctyaggcatgtcgggctgcaggtcccaagccctgccccacagggaggcagctaaggcccagcgagaaatcgagcagtgccggtgggctggcactgctgggggacccagtacaccctccacagccgctggcttgggtgctaagcccctcattgcccagggctggcagggccagccagctgctccaagtgtggggcctgctaaacccacgcccacctggaactacagctgacctgcaagcaccgggcgcagccccggttcccrctcgcgcctctccctccacacctccctgcaagctgagggagccagctccagccttggccagcccagaaaggggctcccacagtgcagcagtgggctgaagggctcctcaagtgccgccaaagtgggagcccaggcagaggaggcgccaggagtgagcaagggctgcaagggctgccagcacactgtcacctgtcagtagcagtcctattttttcatcagattttaactgaactatcttagtatttttaattatcaatttagaggagcttatcactaaatactgtggaattttaaaacgtggaaatttttctgacctgtgtatggcaagaaaacacaattatcattagagttaatatatactggggacttcctacactccagacactgttctaagcactttatagttatatcccttaatcctcacaatgacttagagtatgacctaaattattctgtttttataaatgtgataaaaagacataatgctatttctaactgaaccttagacaagttgcttaaagttgagatgctaactttgtcattctgacagtagcacatgattcttgatcactatgttgtatggcatcctgtggaagataataggagataaccttatctatcatggttaacttccagcttttaatgaatggatatccaaacaactaagwcaaagcaaccttgaggagcttatyagataattataaaaactaacacatatgggaccgtatctcttagacattttgaagtagtttgtagatgtggtgcatagattttagttgcaatttattaagtacaaggtggtagtagtttctgaaggaatatattcccaaaatttataataattcaaaggtaacaattcattcccatttttccataggattgagaataaagttgaaggaacaatttctgagcacaaatctatatgtatttttagctaatagggcggcattttttggtggctgcctcactttattcaaactgtggtattatattttatttccatcccaaggttcctacttttttagggcatcttttcagtattggcactagcttcatcacctaaacacttagatgacgtttatttaggttattttaaaaggtttgaaagtataatcatggagaattttaacatttagtatttatgcacatcagttaagggtgttctgaagtcataaatgatagtgtgatttttatgctactggtaagcatttctggcctccagctgaaatttgacctccatgggacataagcataattacaatctataatttgcttgttagtcactcagaagaagcaccgctggcatttggggcaggagagttctccattggcataagaagatctttggactagcagcttgtaaactctatctgtattcattagttttctcctctgtgccttagaaccattgctttttctcactgcagcctagagtcattgctggtgatgatcttccaaaacctgtaatagtaacagaaattttattcatttaacattttcatcgtgctctcactcagtaatggtgctggggaaacaacaatggtgaacaccatctcggagattctgggaggatggcattagaacagctgaagcataattttttagactcccttgatcttgtcataaaaatggagccataggatttcagaatcagagttagcataagaaaatatgacaataaagaccaaaaataacattcctgatacaccgaaagcataccaaaaagacacgtgcctagaacagataaacattaacctaatttatcaagtgaactgaaataaattcagaaaaaatgatagaaagtataggggaaaaattataaatcagaattagaaatactgataaatgtaagtagagaattcaagaatgaatgagacataaaagagaaaaccttgcagatatgtagactaaattagaagaaacactaaagcaaataaacaacagataatgcttatggtaaatagaagataaagagaaaattttcagaatcataaaaacatttttaaaaggaattgagaaaaaaaaaacctcaaagaagataccatatgagtatggtagtaatacccaaagataaccaaagcaatggaacaaaataaattttataatgagaaattttaatccttgttatatttaacccwtttgttcattcaatgctgttatacattccctttgtwgtgggttgaatctaggaaaagggtcttgtccaatataattaaggatctcaagatgaagcatcctgtatcgtcacgggtacgtcctaaatccaatgacaagtgttcttataaaagacaagagaaggcacaaagacaaagaaaaagccacgtgaaacacaatagaaggcataaataaaaagccacgtgaaagcaaaggcagaaactagagcaatgcagctacaaagaatgctgacagctaccaaaagctgaaaaagacaagaaaccattctcctctcttgtcttcagagggattgtggccctgccaacaccttgattttgtacttctgtcctccagaaccatgacagaatgaatttctgttattttaagccaagtaggtggtacagcagccacgggaaactaatatatgtggtttgctttatatttatgttggacagcattctcttagatcctacaaccaattcacagaaaacacagggctgaggaaccagttaaacttcaccagggaatacagttcacaaaatttagcccatgggaaattccacagagtaaactatctaatctccacaaataaattgaaatggaagccttctatggatgaaaagagactyagacatatcaaccagtcacaaccagtttggaacctgattaaaacaaaatgtaaaaaaaaaactccaatttatgagaaaattgaaaatgtgaacactaaccatatgtttgatattaaggaatttattgagatttttttaaagtgtagtaatgatattgtactcttatgtatctttaaatcctttagagctgtatactgaaatatttatagataaaatgataggatatctaggatttgaaatagcacaggggaagcaggagaagcagatggagttaaaggtgtgacaggatggccatgggccaggcgtggtggctcacgcctgtaatcccagcacttttggaggctgaggctggtggataaccagaggtcaggagttcaagaccagcmtggccaacatggtgaaaccctgtctctacttacaatacagaaaaaaaaattatctgggcatagtggcaggtgcctgtagtcccagctacttgggaggctgaggcatgagaatcacttgaacctgggaggcagaggttgcagtgagccaaaatagtgccattgcactctagcctgggcaacaagagcaaaactccatctcaaaaaaaaaaaaaaaataaaaaaaataaaaacagagtctgttcctccatggagtttagattcaagtgaatagagctcacagtcccaaaatcttaggcattcagagaacagcacattcccagtaaggggccagacaacattttagcctttatggaccacatgtggttgactgttttgttgcatatccttttgttttgttgaggttttgaccaatcttttaaaatgtacaaacaattcacagttcttgaactgtacaaaaacatcccatgggcaattgctgacccctgcagctaccctttyttaaaaaaaaaaaaaagtcatttagaagccaaaatatatttcttgaggaagactactctcccagcaatagttctgcatccagtatttggaaaagacatagatatagcatcaactttattgctgaacaagatttaagagttattacttatgtatattttctgtgtggcttatttacttgttccccaaagcatacaggcaatgttatcattgactgttgctaggaccatatttgaaagcagtgccatgtttaataccctttagaaacctggaggcttgctaattttaattttatacttggcctgcacacaacacatccttgatgtgttgtccccatacttgttttattcatttcttattttcttttcatcttcctctctaaattatgtattcctttaatgtgggaaactgttactctttttttttattctccctgctctaatgcccaacattacttccttttgacaaattaaaatagcaggctcttaaatgttcctaaataaatgaaaacaattcagaatttctccactacatgaagttttatgctgcttaaggaaggttgctgtatttgttgtcatcagttctgggctctgctagatttacacttggatcttccaggatctctgaccctaccagcattggtacgttttgaggaagtgttcatgtacatctccttattccagggaaattagatatccttataacacattaataccttgacataccagctttccaagaagtctcttttttgaaagaaacaaaagtaaattcaccagttgcttctaaaaatgttttaaatatatatggtgtttttttaaaatgtgtatgtataacaatatctattaggatttaatataataatgtgtttaagttaaaatgttttttttctctttctgactcaggaagaaatagataaaatggtagagaccacagagttaatgactgggaatattcagagcctaaagaacaaaattcagattctggcaagtgaggtggaagaagaagaggagagagtaaaacaggtaattattttaaactgtattattggaatttggatataatttttaatggttaaattatgcaaagataactttcgagtataatatgatgagagaaatcagctttttgaaataatctgtagctttcttctactttagatgcatcaaataaatagtagtggagtactctctcttccggaactttctcagaaaactctcaaagcacccacacttcaggtaagtgcctatttaccatattgattacaggcatactttagagatgttgcaaatttggattcagaccacagcaaaaaagcaaatactgcaataacgcaagtcacacaaatgttttggtttcccacggcatatggaagttatgtttacrctatactgtagtctagtaagtgtgaaaaagcattatttcttttttttttttttaaagggacataccttaatttagaaaacgctttactgctaaaaaatgttaacaatcatctgcaccttcagcaggtcgtaatctttttgccagtggagggtcttgcctcaatgttgatggctgctgactgatagcgtggtgattactgaaggttgggatgcatgtggcaatttcttaaaataagaagacaatgaaatttgccacatcagttgattcttcctttcacgaaagttttccctgtagcatgtgatgctgtttcatagcattttacccacagtagaacctccttcaaaattggagtcagttctctcattccttgtcacagctttgtcagctaagtttttgtcatatactatatccttcattgatatttcaactatgttcataacatcttcatcatgaatagattccatctcaagaaaccactttctttgctcatccataagaagtaactcctcgtccatccaatttttatcatgagattgcagcaattcaggtacatcttcaggctccacttctaattctggttctcttgctgtttccaccacatcttcagtcacttcctccactaaagtcttgaacttctcaaagtcatccatgaggattcaaaattgaatccattttttctaaactcctgttattggtattttgacttcctcttgtgaatcatgaatgctcttactgacatctagaatgataaatttattttaatatgtttacaatttattttgcccagatccatcagagaaatcactacctagggcagctatagccttatgaaatgtatttcttaagtgataagacttgaaaattgaaatgactctttgattcagaggctgcagaacagatgtgttagcagatgtgaaaacaacattaatctccttgtatatcttcatcagagctcttgggtaactgtgaacattttcaatgagcagtaatattttcaaaggaatcttcttttctgagcagtagctcttaacagtgggcttaaaatattcagtaagccatgctctaaacagttgtactgtcatccaggctttgttgttccatttacagagcacagacaacrcagatgtagttgatttagtagaattaaggaccctgggattttcagaatgatcagtgagcattggcttcaacttcatgtcaccagctgcattagcccctaacaagagcctaacaaaagcatctcctttaaagctttgaagccaggcattgccttctcttttccaactatcraagtcctagagatagcatcttcttccaatagaatgctgttttatttacattgaaaatatgttgtttactatagccaccttcaccagtgatcttagctagctaggtcttctgggtaactagctgtaatttttctatcagcacttgctgcttcaccttgcactttttatgttataaacacagcttctttccttaaaccttatgaactaacttctgctagcttcaaacttttcttctgcaacttcctcacctctgtcagccttcatagacttgaaaacagttagggccttgctgtggattaggatttggtttaagggaatgtcgtggctggtttgatcttccatccagaccactcagacttcccatatcaacaataaggctgttttgctttctcattattcatgtattcactgaagtagcactttaaattttcttcaagaacttttcctttgcattcacaacttgggcgtttggcacaagaggcctagcttttggtttgcgtggcttttgataggccttcctcactaaacttagtaatctctagtttttgatttaaagtaagagacatgattcttcttttcacctgaacacttagaggccattgtagcattattaactggcctaatttcaatatcgttgtgtcacagggaatagggaggcccaaggagagggagagaaactgggaaataaatggccggttggtggagccgtcagaacacataacaattaccaattcagttcactgtttgatatggttgcagttatggcacccagaacaattacagcagttccatcaaagaacactgggcatagatcaccataacagataccgtaataatttttaaagtttgaactattacaagaattaccaaaatgtgatgtagagatacaaagtgagcatgtgcttttggaaaaatggtgctgatagacctcctttgcacagagttgccacaaaccttcagtttgtaaaaaatgcagtgtctgggaacacggtaaaatgaggcatcctggtatatcatagaccaattatacattacatatatgaaaacattatgtcctatttcgttctttaaacaaatggaacctgatataaactgtttggcaaattacttttctcattcgactgtatagtttgaacatcttgtcagtcacgtagatctctcatttttgttgatagctatgtaacattctgttgyatggaggtcatataatttgtaaattactgatggaaatacataatttttttaatacaggtaagactgggtacacccttgtacatatgtctttactgatttgtatagtcataattgtaggatacatttctagaagtaaatactgacagtttggtttttttaatgcttctaacaatagcatataactccttataaaatagtactgtcttatttgtagtaaactatttcttccaagggctctagtagacattgtagtrtaaatgtttgtagcattggaaagtcttcatgttttctcaagaagtaatttgaaattttcctattggctgggcacagtggctcacacctgtaatcccagcactttgggaggccaaggcaggcggattgcctgaggtcaggagttcgagaacagcctgaccaacatggagaaaccccatctctactaaaaatacaaaattagccaggtgtggtggcacatgcctgtaatcccagctattcgggaggctgaggcaggagaattgcttgaacctgggagctggaggttgcagtgagccaggactgcgccattgtactccagcctgggcaagaagagcaaaactccacctcaaaaaaacaaaaacaaacaaacaaacaaatcctatcatttaccagtggtgaaaggagcaggatggggagagggagagatagatttgaaagaagaatggcgattcgttgacaattattgaagttggatgatagatacttaaggtttattttactgttctctctracatacatttgagatttctcataataaaatgttaacaactacatttaatactatctttcccacagaaagaaattttggcgctaattccaaaccagaatgctcttctaaaggacttggatattcttcataattcatcacagatgaagagcatgtcaaccttcattgaagaagcctataagaaactggrtgcatcttaaagagtgttttttttttagattgttccatattaatttaatgttcgtgaatttgtaaaactgttaacctatgattatatgtacagaggctaaggcttctgcaggatttattatctcctgatatgcactttaaaattagtctttgtagttctatcattagcatctartgtagttctgaagactgtttttagcagttgccaaatctaggaaactaacatttatattgctgtatctataagtatttgcctaaaaccataaaataggaattgccttaaggatctartagtttataatgcctgaatggaactcatttattggttaacagctcatatcaggagctgtgataagtaagtgtttacatacactgtctagtgcataaaaaccttagtgtttgctatcattcattctgtagccaatggcttacagtttctgtctggtcatctggaacttgaaaaatcctcaaatgccttcactcttttacctaactccctagtctttttgggaagtagttaagatatgcctgctatctttaactttggaggtagtatcaaaattttacttctttggttgtttagtgaattaatgttgaatattttctactgtcatcaaaacatattcccaaaaagtattaaaaaggaaccttagcacatttattttattaaaacaagaaaacccaaaatatataaaccttttcttattatgataataagcttatatatgtgaataagttataacctagtgtataaaaaattatttctaacaaactacagtatactgtcttsggttkttttttttttttwagtctgtaaaataaaatgactgcaattacttttttatgtgacctataatatcagttaatttgggagatgccataattctgttaacacccttcaggcagagaccactgggaacaaacctgtagttaaacaagttgggttttcagtgtagtgaggagatcacacatgaggaccctggggcagctcaagaaaagggtcacaagcaatatcctcataggaataatggtaaagaaggcctattaatagattttggaggaaaataaaatctcaaagaaaaacctggcaaagtgactaaaagtaaagattattacaaaatgtcttaaaaacccttcacttggaaacttaaagcttcatgtttttagaatgagtagtagagccctaactcagtgatttttaacactaatgttatagtagcttttggtggtgggggaggaattatgtatgccatttctctcagggcatctgtttaacagataactgatagttaactgggattttaacttaccattgttgctgagtgatacagttcttcaccctgtgtgaactggccatactactcttgtagctttgaagagtttataatctaactttaagagatctacaatatcttctggtaggtagcatccaatccaaaacatacacagtattttctttaaataagactgcattttggtgtactctttggaaagaatttaagaattaattacagatctgttatggtttgcctagggtttatttggccccaccaacctcatgttgaaatttgatccccaatattggaagcggggcctggtgggagttgtttagatcatggcgtggatcgctcatgaatggcgtggtgccatagatgctggtgccatgcttcttgtacagcctgcagaaacatgagccaaatctcttcattaataaattacccagccttaaatattcctttatagcaacactaaacatactaagaaaattggtattcaggagtgaggcattgctctaaagatgcctgaaaatgtgggagtagcttttgaactgggtaataggcagaggttggaagagtttggagggttcaggagaaaacagggaagacaagggaaagtgtagaacttcttagagattggttaagtagttgtgtaccaaaatgcttatagaaaaagagacagcaaaggtcatactgaggaagccttagatggaaatgatgaacttataagttactgaagcaaaagtcacacttgttacaccgtagcaaagaacttgtctgcattgtgtccatgctctagggctttatggaaggcttcatttaagagatggcctagggtatctgggaaaagaaatttctaaccagcaaagtgctcaggctgctgcatggttacttctaactgcttacagtagagaccagaggaaaattggaaaatgtgcagccttgccttgtgttagagaaggaaagaagagtgtttttaggagaggaatctaagagtatgaccaagcagcagcaatagtttgctaaagagatgagcatgactaaaaagggccaggtgctaataagactatggaaaaaatgtctcaaagctatttcagaaatctttgccacccctcccatcacagattaagaagtttagaatgaaagaatggctttttgatggggcaggtgatactgctccccacaccccagcggcaccagctcaaagggcctcaggctgctgctctggaaggtgtacccagtaagccttggagacttccatgtggtgttaagtctgcaagcatgcagaatgcaagagtagtggagacttggcagcttccacttacatttgagaggatgtattagaaagcctgggtgcccagaaagaaggctgccacagggtctgagagcctctactagagaagtgcctagtggagcagatggagcaggggcaccactctccaacctcagaatggtagagccaccaacagcttacaatctcagcctggaagagctgcaggtattggattccaacccacgagagcagctacgtgggctgcacccagcaaagccatggggatggggatgcctgaggctctggaacccaccccttgaaccagtgttcttaggatgcgggacatggagtcaaagcagattattttggagctttaatatttaatatctgtcctgataggtttgggactcacatgaggcctattacccctttcttctggcctattcctcccttttggaatgggaatgtctgcaccaccactgtatcttggaagtaaataacttctttttttattttacaggttcacagttgtaaggaacttgccttgagtctcaaatgagactttagacttttgagttgatgctggaacaagttaagactttgggggatggaataattgtattttgcaatgcaagaaagacatgagatttgtttttcatgccaccaaatcttatgttgaaatttgatgcccaatattggaggtggggccagatgggagaaatttgggaacagatcccccatgaatggcttggtgacattctcccaggagtaaataagttctcttggttcccatgagaactgcttgttaaaaagcctagcatctccccatctctttcttgttttctctctcaccacatgatctgcaaatgccagctccccttcacattccaccatgagtagaagcagcctgagtccctggccagaagcagatgctggcaccgtgctttttgtgcagcctacagaacgatgagccaaataaatctcttttgtttataaaatacccagcctcaggtattcctttatggcaacactaaagagacccaagacaagatccaaataaaattaaactgccgggcgcagtggctcacacctgtaatctcagcactttgggaggctgaggcgggcagatcacctgaggtcaggagttcgagaccagcctggccaacatggtgaaaccccgtctctactaaaaataccaaaattagccgggcgcagtggcaggctcctctaatcaggaggctgaggcaggagactcgcgtgaacccgggaggcagagattgcagttagcccagatagtgacactacactccagcctaggtgacagagtgagactccatctcaaaaaaataaaaataaagaaataaataaactttgactatacatggtcccaataattcaaataacagtcctcctctgtagtgacctcagccatctaagttctcccatgcacagcccatgccaactatgatacatctcttctctagtgactgataaatgccaatgtcagaaacttaaacaataacaaaaaaaatacacttttgagatagaggatatattgtattaaaatgtagcatatgataaagatggcatttcaaatgaaatacagaaaaatatttattaataaatggtcttcataaaactggctaactacataatggagggtgagaggatgtttaatattcctactttatgcctaagtacattcccactaaataaagttaaatataaaaatagaagctaaaaagaaagaaatgaacagtggatgtcagggtagcaaatgccctattatgcatataagcaaaagtaaaatcatgaaagattattacataatattttgaactttttgaaataagatttttaaaaatacaaaaccggccgggcatggcagttcatgcctgtaatcccagcactttgggaggccgaggtgggtggatcacctgaggtcaggagttcgagaccagcctggccaacatggtgaaaccctgtctctactaaaaatacaaaaattagccgggcatgatggtgcatgcctgtaatcccagctactcaggaggctggggcaggagaatcgcttgaccctgggaggcagaggttgtagtgagatgagatcgtgccactgcactccagcttgggcaacagagtgagactgtctcaaaaaataaaaaataaaaataaaacaaaatcaagccaaagacacatcacaaataggaaaatatctacaatataaataaaacaaagaaataaaacttttttaaataaagagctctgaaatatcattaacaaataggttaaatacaaataggaaaatgggcaattctcaaaggaaaacatccataagtatttgaaagatgatcaaccttaacttcaccatttaaatgcaaattaaaacatattttcacctatcaaattgacgaagacgggaaaaagctgaaagaaaattgctgaacatactgaaaaatgggcaccgagtacttgtgctaaaggaaggtgaattggtagaactgttttgagaggcagactttacagatatgttgcagaaccttagtgtaatgtcggccacttcaaattcgtactttatatgagccctttgattttccccaactcccagttgggcatatgttcaacaaacaggctttgtttaaatacgagccacctgcactggaacctaaaattaaaggatttacttttgtttatttggttggatagaatttcttggcattccctgtttaccaaaaatatgcagttgcacctgtcaaaattagtatttgagttatacgggttggcttagtttctaaacataagtctaaatcctctcatgtttcattcattgttaagaaatatttagctttgagagagagaagggaaagaaggcaagcaaaagcagagagaaattttaatttctcagttgggttttattatgtcaaaaagtgagctatttttgttttctaattcgcaattttggttaagagttgttactaaatgtgtttcttcacaactaagccaccatagaaccaatttttcttgacttaggtgtttgctgtcttattaaagtagcctctgttcttatcagggctgtgaagttgctttagcaaccatctccaaaattggatatagtagttgttaaaactagacaaagaagaagataaaagagggacattttctgaattcattagaactacaatagagcacatttttaaaattaagttgttcattttttttaatactttaagttctagggtacatgtgcacaacgtgcaggtttgttacatatgtatacatttttaaactaatagaaataaatgtgccttagccaattttgccccatttctaccccctagagttgtccttaaaattactgtaagttttcaaatagtacaacagggatataagacagtcatagcaatgagaaaaatggctgacatttattgagtgcttgctacatgccaggtactagtccaatgccattacctatatacatgtatttatgccaatgtttaatcttaatggaaaccctatgggaattaaacctcataacattcattattatctccatcctgcaggtgaagaaactgcggcacagggaggctaaataacttgagatcacacagatagtaaatgatagaacaaggaagtgaaaaaataattgaaccttttcttaggagttttctgataaactacaagtagaaggggctagtgaatctaatgagtaacccctattacagcaaagtacaatctgatgtatttttctgagtaaagtgataatatgtattgcggatttgttcacctgggttttcagaagacaattcctttaaattaatcttacattgggaatctccttttttcctcctttttccgttaatctcagagttaaaagtttgccttagcctaatatatatacatatctcaaatttaattaccttcaaccatactttccaggaaaaggaatgttttgcctttttattatttttttcttcaggcaaaaattagttccaattagttctgatgttttataaagaacaaagagctcaaatttctgttttaaatgcacttggaaacaagacgtaatctaaatttggggagacttttacatgtctcagagtttataaataaccagaccccaaactttttaaagtttcccctaggatattgcacttactgtctaaaggagttcctgttttgcaaataaaaaaaaagcttaacttttaaaaaatatattttactcagttaatatttagaaaactatatttatataggctccttaggtccaagagtaggtatactttgttctcagta
